United States Patent Application Publication US 2012/0117685 A1 - sequence listing, part 3

SEQ ID NO: 3272 - DNA, 1367 bp, Glycine max
  misc_feature (5)..(7): n is a, c, g, or t
  misc_feature (17)..(31): n is a, c, g, or t
  misc_feature (52)..(52): n is a, c, g, or t
  misc_feature (67)..(67): n is a, c, g, or t
  misc_feature (70)..(70): n is a, c, g, or t
  misc_feature (123)..(123): n is a, c, g, or t
  misc_feature (219)..(219): n is a, c, g, or t
  misc_feature (791)..(791): n is a, c, g, or t
  misc_feature (827)..(827): n is a, c, g, or t
  misc_feature (1240)..(1240): n is a, c, g, or t
  misc_feature (1367)..(1367): n is a, c, g, or t
  Peptide Sequence Number=SeqID_6752
  Probeset Number=SeqID_13051
ggggnnnaagggtgttnnnnnnnnnnnnnnnttgtggaaggatggggttttngttaaacccaaacanacncaatataatttaaggtaatatcagctagttgtctcggcggctgtgcggcgtantagtggaagtagacgttggcggtcgatgcgtatctggtgaggggtaattttaatgaacgaatgtaacactctcaccttcacctaatactctcatantcacgcgcaggtgaagaataggatggcgggggagaaatgtagcagaatagacgcggatttcgcgtctattagaccaattcgagcgccggaatgtcgtacgcgaggggaggggacacaagacccacagatgctatatgggaagatatagaaacactcattatcactctctgtacggcgccggcgctgtgtctctgctagggcgggtgcgcgtcgcccgtgcgctcgacggcctgcgcttggtgtggtgctgtcgctatttaattagtgatattatactatttattgatattggattagtatctcctctcggctgtgtcttggctgcggtatgctttccgtgctgttctgcggtggcgcggtgtggtgtggacgtgggtggggggcgcgacggtggtggtcgcgtgttccgctcctcttcctgttgcttgcgggctctgctatgtcgcggtttatgacggcaagacacaagtgaggtcggtacatatcttataggtgtgttaatgcgcgctgggtgtctggagcctctcacatgctcgcatatactgatagttagttttgtttgagtttaatcncctactatgcatggcaacgaacctcacaaaacgcgncgaccgaacctcacacccctcaaaagaaactgatagatgatatttataagatgcgactgctcgcctcgaggcggatattcagaaggagtcacgcgccgctctggcgtcctgctccctctcggcctgctagtgagaggacacatattcacgtccgtcacaggtccgacactctgcggtatcttgctatgatccctacaataactccttatctccatcagaatgataactctattgcgcctgtgtggtatatactgagagtcccgccgctcgtgatcgtcgatagactactcatacgacaccacctctacaccactcatattcactcgtgactgatcactgatagaatactcactccgagatttaccgtgtactcctctcgagtcatcacttacgcgcatgctacggcgctcacnacactaatatgaccatcgtatacatacacaatgagatgaacgcgacagtggtggatcgaaaatagataatacatatgacgactcgatcgactacatctaaatcacacctctatacgccaatacgatn

SEQ ID NO: 3273 - DNA, 1418 bp, Glycine max
  misc_feature (1)..(1): n is a, c, g, or t
  misc_feature (17)..(17): n is a, c, g, or t
  misc_feature (21)..(21): n is a, c, g, or t
  misc_feature (28)..(28): n is a, c, g, or t
  misc_feature (36)..(36): n is a, c, g, or t
  misc_feature (42)..(42): n is a, c, g, or t
  misc_feature (82)..(82): n is a, c, g, or t
  misc_feature (88)..(88): n is a, c, g, or t
  misc_feature (90)..(90): n is a, c, g, or t
  misc_feature (97)..(97): n is a, c, g, or t
  misc_feature (455)..(455): n is a, c, g, or t
  misc_feature (457)..(457): n is a, c, g, or t
  misc_feature (607)..(607): n is a, c, g, or t
  misc_feature (677)..(678): n is a, c, g, or t
  misc_feature (684)..(685): n is a, c, g, or t
  misc_feature (756)..(756): n is a, c, g, or t
  misc_feature (1081)..(1081): n is a, c, g, or t
  misc_feature (1115)..(1115): n is a, c, g, or t
  misc_feature (1134)..(1134): n is a, c, g, or t
  misc_feature (1255)..(1255): n is a, c, g, or t
  misc_feature (1275)..(1275): n is a, c, g, or t
  misc_feature (1283)..(1283): n is a, c, g, or t
  misc_feature (1395)..(1395): n is a, c, g, or t
  Probeset Number=SeqID_13052
nttttttatttaatttntttnttgtggngtgtaaanagggantattaaaagaggaggctgggttctttttctttcttgtttnctcatncnaggcggncctagcggacaaacacaacagctgggcccgcagagaagcggaggacgcgcctctaacacttgcgtttcggcgtacccgtgcgcgcacgttggtcatgattacttgttttctgctccgttgttgtgcgcaatcgtacggcatactaatataatcatatagcagtacgcgttctcttcatattgtgtgtatggtggcaaaacgaaggtacaaggtgaggacatatatccttggtcggcggtacgtatgtttctattgtgcattcttgtttctgctctctcattgcaactactaaatctccatctgtgagtttgctattctcgagcgtctcgcgtgctcccctttcactgtcatcttcttncntctccttcgttgtcctcggaattcattgcatattataattatgttgtatcacacgtgctcgtgctatggtctgttcgcttaacctgcaagaacgacgagagccgaccgcgatcaccattcattcggctcactcataaatactataaatanatatgtggtgtggctggtggagggacgttctgatgttgttatgtttatagtgtaaaatataacactatanncggaanntataatattcacaaccactcactatgtaatcagcggtgccctctcgctgctcttcctctctcctcatcacnatccacttatggcagacgtagtaggtgttggtgtggggcgtggtgtgattcgctccgcaccaatatacaaatagatatgtatggtgcgtgtgcgcgcgcgtgggccagcaacccgccacctatcgctctcatctgttgcattatcattagcgtgtatagaagtgtgatatgcggcatgcgtgcgatataccgcgtcatcacccagacgaaggcgtgcgtgcgggcagagttacattcgctgtcagctcggatgaagcattatacgctggctaagacccggggcgcgaagatcatctcgtgcggcgccgtcgtgtagacgagcacngtgcgcagcacagcgggcggcgtgtgcgtaccgntatatatactctgtatcgncttaggcagtcattgtctactggatatatctcgctacacgccgttacatatatgatcttctgtgtgtttgtattgttggtgttgtgattgctatcagcgcggcggcgctgccactgtcgantagcacgtctgctagctctntccgactnacgccgcttgcgtggcatgtgcagtggatgggttatatcggaccggagcgggagcagtgcttcgatggagccgtggacgtctgcggtgcgtagcggacgtgactagcgaggngtcgtcagctgcggcgcgcgtcg

SEQ ID NO: 3274 - DNA, 1412 bp, Glycine max
  misc_feature (22)..(23): n is a, c, g, or t
  misc_feature (35)..(35): n is a, c, g, or t
  misc_feature (41)..(44): n is a, c, g, or t
  misc_feature (52)..(52): n is a, c, g, or t
  misc_feature (57)..(61): n is a, c, g, or t
  misc_feature (63)..(63): n is a, c, g, or t
  misc_feature (66)..(69): n is a, c, g, or t
  misc_feature (71)..(72): n is a, c, g, or t
  misc_feature (180)..(180): n is a, c, g, or t
  misc_feature (233)..(233): n is a, c, g, or t
  misc_feature (310)..(310): n is a, c, g, or t
  misc_feature (332)..(332): n is a, c, g, or t
  misc_feature (334)..(335): n is a, c, g, or t
  misc_feature (339)..(339): n is a, c, g, or t
  misc_feature (380)..(380): n is a, c, g, or t
  misc_feature (389)..(389): n is a, c, g, or t
  misc_feature (562)..(562): n is a, c, g, or t
  misc_feature (569)..(569): n is a, c, g, or t
  misc_feature (612)..(612): n is a, c, g, or t
  misc_feature (623)..(623): n is a, c, g, or t
  misc_feature (703)..(703): n is a, c, g, or t
  misc_feature (771)..(771): n is a, c, g, or t
  misc_feature (777)..(777): n is a, c, g, or t
  misc_feature (780)..(781): n is a, c, g, or t
  misc_feature (785)..(785): n is a, c, g, or t
  misc_feature (787)..(787): n is a, c, g, or t
  misc_feature (789)..(789): n is a, c, g, or t
  misc_feature (791)..(791): n is a, c, g, or t
  misc_feature (793)..(794): n is a, c, g, or t
  misc_feature (796)..(796): n is a, c, g, or t
  misc_feature (801)..(801): n is a, c, g, or t
  misc_feature (813)..(813): n is a, c, g, or t
  misc_feature (855)..(855): n is a, c, g, or t
  misc_feature (1073)..(1073): n is a, c, g, or t
  misc_feature (1140)..(1140): n is a, c, g, or t
  misc_feature (1232)..(1232): n is a, c, g, or t
  misc_feature (1235)..(1235): n is a, c, g, or t
  misc_feature (1309)..(1309): n is a, c, g, or t
  misc_feature (1341)..(1341): n is a, c, g, or t
  misc_feature (1343)..(1343): n is a, c, g, or t
  misc_feature (1362)..(1362): n is a, c, g, or t
  misc_feature (1412)..(1412): n is a, c, g, or t
  Peptide Sequence Number=SeqID_6753
  Probeset Number=SeqID_13053
ttttgtgtttttctgttgtgcnncctccccctccncccccnnnnccccaccncccannnnnanagnnnnanngagaagcggacgcttactacagctaacgcagaccacgacgatgcactaccctctgcacacgacagacagaacattattatataatcacaccacacaactaaaccctcncatacgccatgtacggcgtgcgcggtgcacctcgcacagagacgacgaacganaaaccacaaaccgcacactaatatcatgccaacgcactacatacgcctctctgctgactgattgcatctgtcaaagntactccgtaccaatactgcttntnnctantcacatccttctcccttgtctatcatgcacgcgttgctcgncgagtccgnctgggcgcaggactgccacgaacagcgcacgaacacgacaccaccgcccgccgtgctgctgctcggcgtacgctcgatgtcagtattgtgatgtgtatgtgatgtggagatgataccagcgcgcgagagacacgaaagaaggtcgcgctgttgttatgttacgaccaccgcgntattttncggcgtcgagaacgcgcgagcgagtgcatccgatacgtgatantactctggtgntgagaggaaatgagctggtgaagactacgataacagtcgagatcagtagtcacgaccgctagagaagcgcggcatatagnagaagtggtaggatgacgtgaggcgcatatatcgaatatcagtgcgatgtagtgtgtggtctaccagnggaganaannaaananananannanaaccnacaccaaaaganatgaaatgagtatactatcacatgcaatatcatacatgtaanaacacacaagacatgtcagtgatgatcctccctctaccgtgacggatcaccatcttactcgaccatgtccatctgccatcgatcgagtcatcgcacgtcacatacgagattcatcatcattatctgccttgacggtgcacgtacagtgcgtgtcagtgtccgtacgcgtgcctgagctgctcaggcgcgcgcgctctgattgtggagtgattctgcangtgctacatcctatacacttacatgacacattacactgactgcggctcatacaatgtgactattcancagaccgcgacatcaccactctacatattctgactgcctctcgccttatctgcactcatagagtgctatcgtattatcggtacatagtcacntantatatgtcacagatcctatatctgataactcatgcacatcacgcggatacattatgacacgacgcgcatcgcantacgcacacgacacgacacaacacaacagacnanacgacacatacacacgcangacagacacatgcacgcggtgacgtcatgtacgcgtctctcagtgtgtgn

SEQ ID NO: 3275 - DNA, 444 bp, Glycine max
  Probeset Number=SeqID_13054
ctgcaggaggcgaacgaagagagtaaagtggtgcacaatgcaaaaccaatgaaggagctccgggcgaggatggacaaggacgtggagcaggtccttaagcgcgtgaaagtaatcaaggggaaattagaggccttggagcgttccaacgccgccaacagaaacatccctggctgcggtccgggttcctcggcggacagaaccagaacctcggttgttagtggattggggaagaagctgaaggacatgatggacgatttccaaggtctgagaacatggacgacctccgcatcaaccgatagaagacaatattgggctatagtgtatccaaaagcaaatgaaattctcttatctctcacctatggtcaacttgaacatgaatctttcttaggtaaggggctccatccatactcactcgatcccatgcccttgattaccctcctgcag

SEQ ID NO: 3276 - DNA, 2023 bp, Glycine max
  misc_feature (1)..(1): n is a, c, g, or t
  misc_feature (83)..(83): n is a, c, g, or t
  misc_feature (95)..(95): n is a, c, g, or t
  misc_feature (115)..(115): n is a, c, g, or t
  misc_feature (171)..(171): n is a, c, g, or t
  misc_feature (195)..(195): n is a, c, g, or t
  misc_feature (210)..(210): n is a, c, g, or t
  misc_feature (212)..(212): n is a, c, g, or t
  misc_feature (231)..(231): n is a, c, g, or t
  misc_feature (271)..(271): n is a, c, g, or t
  misc_feature (288)..(288): n is a, c, g, or t
  misc_feature (291)..(291): n is a, c, g, or t
  misc_feature (324)..(324): n is a, c, g, or t
  misc_feature (326)..(326): n is a, c, g, or t
  misc_feature (345)..(345): n is a, c, g, or t
  misc_feature (358)..(358): n is a, c, g, or t
  misc_feature (501)..(501): n is a, c, g, or t
  misc_feature (505)..(505): n is a, c, g, or t
  misc_feature (523)..(523): n is a, c, g, or t
  misc_feature (573)..(573): n is a, c, g, or t
  misc_feature (624)..(624): n is a, c, g, or t
  misc_feature (673)..(673): n is a, c, g, or t
  misc_feature (740)..(740): n is a, c, g, or t
  misc_feature (759)..(761): n is a, c, g, or t
  misc_feature (786)..(786): n is a, c, g, or t
  misc_feature (792)..(792): n is a, c, g, or t
  misc_feature (824)..(824): n is a, c, g, or t
  misc_feature (828)..(828): n is a, c, g, or t
  misc_feature (877)..(877): n is a, c, g, or t
  misc_feature (879)..(879): n is a, c, g, or t
  misc_feature (898)..(898): n is a, c, g, or t
  misc_feature (926)..(926): n is a, c, g, or t
  misc_feature (959)..(959): n is a, c, g, or t
  misc_feature (1162)..(1162): n is a, c, g, or t
  misc_feature (1192)..(1192): n is a, c, g, or t
  misc_feature (1222)..(1222): n is a, c, g, or t
  misc_feature (1266)..(1266): n is a, c, g, or t
  misc_feature (1269)..(1269): n is a, c, g, or t
  misc_feature (1308)..(1308): n is a, c, g, or t
  misc_feature (1352)..(1352): n is a, c, g, or t
  misc_feature (1400)..(1400): n is a, c, g, or t
  misc_feature (1437)..(1437): n is a, c, g, or t
  misc_feature (1443)..(1443): n is a, c, g, or t
  misc_feature (1449)..(1449): n is a, c, g, or t
  misc_feature (1461)..(1461): n is a, c, g, or t
  misc_feature (1484)..(1484): n is a, c, g, or t
  misc_feature (1494)..(1494): n is a, c, g, or t
  misc_feature (1502)..(1502): n is a, c, g, or t
  misc_feature (1521)..(1521): n is a, c, g, or t
  misc_feature (1616)..(1616): n is a, c, g, or t
  misc_feature (1678)..(1678): n is a, c, g, or t
  misc_feature (1797)..(1797): n is a, c, g, or t
  Peptide Sequence Number=SeqID_6754
  Probeset Number=SeqID_13055
ngatatatcatgactacttcactgctcctgtcgcggccgcggcgacatcagcgacgatagacgactcgatcatgatgtcggangatgggcacagngtcgactcgtcctagcagcncctacgttatacagacactatcgttttgtagtgagagcccactaccccatgtcgtnctgtgtgagtcagcagtagactanaggattcggtgcttntngttgtcgctgtgtgtacgnagtctgtgtgtgtgtgctgagctttcgttgcgccagacangcagtcgcggatatctnatnatactgaccacaagcacagcgtgggcatatgantnacactatagcgcgcagctncagacgtacgcancgagtcacattatcaacgtgtgcgcggcgcgcggagcgagggagtgtgactgatgatcagtatgtgttcgttatctacagaccgtagtgtcgcgcatcacacaccaacgcgcgtctgtcgttgatgttcacttgtctgtacgnctanacgtcgtcgctcgacacngcagtgctgcgtagtcatcatgtcgtatattgaatttattgtgagagagnggcggccggttgttgtgtgtagtagtgtgagggtagtattatatatcatantactcacctcatgcagacatcataacacgcgcacatactacagaatgantgagagcggactacacgcgagagagactgagtgaggaggaggcgagatagcggtcagttcgagaggntctgtggtacgcgagcggnnncggcagctgtgggaggcgtccactntactcnatcatcccgcgcgagacggcgcgcgtgaatcntatnatatcgatggtatgaccgatgaacgaccggctgcgatgtagcagactancnttgccttcacgtcgacatncgcgcgcgcacgtctccacgagtggtantcgcgcgcatctgatgtgtcacttcgcacatcnggctatatcattatataccacacaacgacagagatgaagtaaggcgcgaacgactcgacgcgggcatccgtgcgtgtagaccgcccactcactatctacgcgaatatatatcaacgttctgctcacagatggagtcagagtgagagtgacagataagagagacacacacgacacgacacgcgcaccgcgcgcacgccacacanagtcgcgacggagagcgactcggcactaancaagcgaatcacacgctcgtgaccgcgganagcggagatcacgcagcttacgatgatcatagagtgaggagagnatngcactgtactgtgaggatctaatcgcgcactggatgcgncgaacgacgcgcactcgtcagcgcgcgacgcagcggcgcacgangcactgctctgtctcggtgttagaatcgtgtgagcgctcgacatgatncactcttctatactccgtcgtggctctcgagaggganatatantgccgntatgggcgtgtntgctcatgctgctccaggttgtnctgtctatgngggactangagctccgcgtggtggcgngaggcccttgcgccgcacgctgctgttggctattcgatgagcgtctgcagcatgataagtcgagagtgaattagatctactgcgccccgacatantatgtgagtgatttgttatttcgccacgacattctttgacaggatgaatgtggtattttaangctcttaggactctgaagcgatgagagattacagcatacgcgctaagaggcgagattatctcgcgcgcctccgttcacgcgccgccgcaccgggtgggcggtactccgcgcctaacaanaagtgttgtgagagaaggcgacgccgcgcgagacgtatcagcaccgaagcattcctcagagcgcgctaatcctctgcgtcacagagacttgcttcgattgcgggatcgctttctactctcactctctgtcacctctattcagggctccctacaagcgcgcactgtgatatgtacttatcgagcggggcgtgcgttcgtgttacgtatacacccaccataaccaacc

SEQ ID NO: 3277 - DNA, 440 bp, Glycine max
  Peptide Sequence Number=SeqID_6755
  Probeset Number=SeqID_13056
gcgaaagaatataagcttgcgagatcttttgaggttttaccataaactataaacacttaatggggaaatggggctaatgttacaaaactcttcccacccccattcatatattccataagtttaaacgtataacatgccatttagcgactacagaaaagaaggggaaatctcttggccatgcacgaagaaacctgtgactacccaatcgctgagatcaaagctgctcatttcgaggagtcaatgaagtttgcacggaggagtgttagtgatgctgatattcacaagtatcatgcatttgctcagaccttacagcaatcaagatggttcggaagtgaatttagggtttcagagtctggagataggactactactggctctgacctccttgccagctctgctggtggggcctaccaagatgatctatatagttcggctttatt

SEQ ID NO: 3278 - DNA, 624 bp, Glycine max
  misc_feature (462)..(462): n is a, c, g, or t
  misc_feature (556)..(556): n is a, c, g, or t
  misc_feature (624)..(624): n is a, c, g, or t
  Peptide Sequence Number=SeqID_6756
  Probeset Number=SeqID_13057
tcagctacgtaggcccccccccctttgctgaccctgatatcctgttattggatgaacctaccaatcacttggacttggacgctgttgtttggcttgaagagtacttgaatgactggcccaacactgtcttgatcgtttcccatgctagaggattcctgaataacgtgtgtactgatatcattcacttcagagatcaagtcctcactcaacacaagggagactatgacacttttgagaaaagaagaaacgccttgatcacccaaaagaagagagaatctgaagcccaaaagatgaaaattgaacacactcaaaaattcatcgacagattcagagctaataacgctagagccgctcttgctcagtcaaagatcaaggaactcgcaaagatggaaatcgtcgaggagatcatcgaagatcccgcctgtgtgttcaagttcccatctgctgaggcccttgaccctnctcttttaaagattgaggacggagagttcggatacaagtgctgataagatctttgcttaaagacattcagttttggtatcgatatggaaagtanaaatcgccattgtcggagctaacggctgtggtaagagtactctcttgaaacttttgaatggagagatn

SEQ ID NO: 3279 - DNA, 467 bp, Glycine max
  Peptide Sequence Number=SeqID_6757
  Probeset Number=SeqID_13058
atagtatttggctagttctcggtccgtgtgctaagatcttaaaatcgattgcaaagtcttctgaagctctaatcttcctgaagcgatggctaataagtatgatcggaatccattcgctgaggaagaagaagtcaatcctttcgctaataataatagtgggagtgttccggctgcatcgaactcaagactctcgcctttgcctccagagcctgctggtttcgattatggtcgaaccgttgacattcctctcgacaatgaccgatccgcttcacagaatttgaagaagaaagaaaaggaacttcaagccaaagaagctgaccttagacgaagggagcaggaggtgaagcggaaagaagatgctgctgcacgagctggaataagtattgaagtgaaaaactggccgcctatcttcccacttatccaccatgacattgcaaatgaaattcctgttcatctccaaaggctgc

SEQ ID NO: 3280 - DNA, 1458 bp, Glycine max
  misc_feature (55)..(55): n is a, c, g, or t
  misc_feature (157)..(157): n is a, c, g, or t
  misc_feature (225)..(225): n is a, c, g, or t
  misc_feature (242)..(242): n is a, c, g, or t
  misc_feature (356)..(356): n is a, c, g, or t
  misc_feature (466)..(466): n is a, c, g, or t
  misc_feature (591)..(591): n is a, c, g, or t
  misc_feature (1173)..(1173): n is a, c, g, or t
  misc_feature (1210)..(1210): n is a, c, g, or t
  misc_feature (1350)..(1350): n is a, c, g, or t
  misc_feature (1438)..(1438): n is a, c, g, or t
  Peptide Sequence Number=SeqID_6758
  Probeset Number=SeqID_13059
gcccctccacgccgccattctctctatcgagtttcgcttcttcagcggctgttantggtattatatgcccccacacaccgaccccaataaggctcgtgagagcgtcctacccttcctttctctgggccgcggtgagcggtacttaggcagacttagntagcggattctacctccgcgtagccacgagcgcgaggagacgtgcgcatgtgtacatgctgcttggcncacacctgtcccatgcntgtgtgtgagatttcttacacggaggctcttgtatgggccagatagattactacatatccttagtggctacgccggagccctagcactgtgacatagtgatgagtagtgtagcntctgtcatagacagtgggattcatagtagaccacgcatgtcatgtcagttagatcttagtacatcacacgcgcgtacattgttggtggtgatcccattcggcctgcgcgntgctgctagtgtatacactaaagagagctatagtagtaatgagcctagtgaacacgctagacgcttcacgtgacgtttacacacgggatacataggcgccgtcgcgatgcctgttgtctctttgntaggcgcaaggtacatatggagtagagtatatcgaattgtgctagcacctgtgttcagcagagcgagtgctatctttgacgcccatgtccatacactctctgactggtcttgaagatgtatgtccgatctgagttagaatacccgggctagattgcgcagcgatcgtctcgcataagcgctatgaagtatgatctctctcacgctatcctacagcaattgtcgccgcccggagagctggtgtagacgtatagatggagttgcagaattaagctcctcgccgatcgcgacgtgtagtgaaggacatgcgagcagatgatccccctccattctattagagctccgcaccccatgtcggatgtacgatgagtatctcagcgctaggacctcgcccgcgaaaataatcgcgaatagatgcgttggctaggatggtcgatcaccgtgcctcgcttgtgttctaagactattgaggatacgtgtgcatgtggctctccttctctccacccatctctgtatattctttacacttgtgctccatagtgggcgttacatcatgtgggtcgctctgacgcgagtaggattcnccaacgggcgccctcatctcataccttcgtgtgttcnactatgaatagctcatgtatgcttttgacgtggttagacactgcctagatgcggactcgacgttgtggacgatatcaagagttacggtcccgacctagtgagttgtggtgagcatcgtgcactctgtaggagaagagacnactctgcggactctgcctgctagtgcgctacttactgtgatgagtggagtagcccctactgagtactctgtagtactatggctcactncgtcttagactcgacacgct

SEQ ID NO: 3281 - DNA, 489 bp, Glycine max
  misc_feature (111)..(111): n is a, c, g, or t
  misc_feature (120)..(120): n is a, c, g, or t
  misc_feature (128)..(128): n is a, c, g, or t
  misc_feature (425)..(425): n is a, c, g, or t
  Probeset Number=SeqID_13060
aaaaaaaaaaaaaaaaaaatccgcgattcgctcttctcttggaaaagtgaaaaccagaagtacgaacgaaagagaagagcgatttagaagtgagagaagatggggttgtcnttcacaaanctgttcancaggttgtttgcaaaaaaggaaatgaggattctgatggtaggtctcgatgctgctggtaaaacaaccatcttgtacaagctcaagcttggaaaaatcatcaccactatccccaccatcagatttaatgttgagactgtggaatacaaaaacatcagcttcactgtgtggaatgttgatggtcaaaacaagatccgtccacttataaaacattatttccaaaacactcgaagtctcatttttataattaataccaatgatagagatccagtagttaagacgaaagatgaactgcacanagatgtgaattaaaatgaacctagaaaatctgtttgacttggtttgcgcacgagccagaatctt

SEQ ID NO: 3282 - DNA, 2130 bp, Glycine max
  misc_feature (1)..(1): n is a, c, g, or t
  misc_feature (12)..(12): n is a, c, g, or t
  misc_feature (15)..(15): n is a, c, g, or t
  misc_feature (42)..(42): n is a, c, g, or t
  misc_feature (116)..(116): n is a, c, g, or t
  misc_feature (118)..(118): n is a, c, g, or t
  misc_feature (170)..(170): n is a, c, g, or t
  misc_feature (173)..(173): n is a, c, g, or t
  misc_feature (181)..(181): n is a, c, g, or t
  misc_feature (200)..(200): n is a, c, g, or t
  misc_feature (222)..(222): n is a, c, g, or t
  misc_feature (224)..(224): n is a, c, g, or t
  misc_feature (263)..(263): n is a, c, g, or t
  misc_feature (287)..(287): n is a, c, g, or t
  misc_feature (393)..(393): n is a, c, g, or t
  misc_feature (431)..(431): n is a, c, g, or t
  misc_feature (450)..(450): n is a, c, g, or t
  misc_feature (455)..(455): n is a, c, g, or t
  misc_feature (508)..(508): n is a, c, g, or t
  misc_feature (530)..(530): n is a, c, g, or t
  misc_feature (603)..(603): n is a, c, g, or t
  misc_feature (730)..(730): n is a, c, g, or t
  misc_feature (745)..(745): n is a, c, g, or t
  misc_feature (750)..(750): n is a, c, g, or t
  misc_feature (776)..(776): n is a, c, g, or t
  misc_feature (829)..(829): n is a, c, g, or t
  misc_feature (885)..(885): n is a, c, g, or t
  misc_feature (896)..(896): n is a, c, g, or t
  misc_feature (899)..(899): n is a, c, g, or t
  misc_feature (926)..(926): n is a, c, g, or t
  misc_feature (943)..(943): n is a, c, g, or t
  misc_feature (965)..(966): n is a, c, g, or t
  misc_feature (1041)..(1041): n is a, c, g, or t
  misc_feature (1050)..(1050): n is a, c, g, or t
  misc_feature (1077)..(1077): n is a, c, g, or t
  misc_feature (1106)..(1106): n is a, c, g, or t
  misc_feature (1139)..(1139): n is a, c, g, or t
  misc_feature (1196)..(1196): n is a, c, g, or t
  misc_feature (1242)..(1242): n is a, c, g, or t
  misc_feature (1244)..(1244): n is a, c, g, or t
  misc_feature (1252)..(1252): n is a, c, g, or t
  misc_feature (1323)..(1323): n is a, c, g, or t
  misc_feature (1372)..(1372): n is a, c, g, or t
  misc_feature (1452)..(1452): n is a, c, g, or t
  misc_feature (1522)..(1522): n is a, c, g, or t
  misc_feature (1536)..(1536): n is a, c, g, or t
  misc_feature (1621)..(1621): n is a, c, g, or t
  misc_feature (1680)..(1680): n is a, c, g, or t
  misc_feature (1716)..(1716): n is a, c, g, or t
  misc_feature (1881)..(1881): n is a, c, g, or t
  misc_feature (1891)..(1891): n is a, c, g, or t
  misc_feature (1919)..(1919): n is a, c, g, or t
  misc_feature (1930)..(1930): n is a, c, g, or t
  misc_feature (1933)..(1933): n is a, c, g, or t
  misc_feature (1958)..(1958): n is a, c, g, or t
  misc_feature (1961)..(1961): n is a, c, g, or t
  misc_feature (1969)..(1969): n is a, c, g, or t
  misc_feature (2023)..(2023): n is a, c, g, or t
  misc_feature (2085)..(2085): n is a, c, g, or t
  misc_feature (2090)..(2090): n is a, c, g, or t
  misc_feature (2092)..(2092): n is a, c, g, or t
  misc_feature (2112)..(2112): n is a, c, g, or t
  Peptide Sequence Number=SeqID_6759
  Probeset Number=SeqID_13061
nacagtgcacantanccgcaatcatctcgacgtacgatgtancacgtatctaccgcaatgctaacagtgagtgttcgtcaacagagtacacgattagcgatacatacagaagtagntncgacgacgtgttatcgtactctgtagagacatacgcctcatatcgaatgtcnagnccgtccgntaatgcgtcatgtgtcatntctctattgctatatcaggttngngccgtctccgtcatcgtacagcatcacgtgcgactacgncgtcgctgtcacatatattcgtcngccgaacgtcttcagcacgtcaccgtagctcacactacgctcgatagacatcgtaccaaagtcacgatcgcgctcctgtactctctctattaaacgtgcgtgccantccatagtagcagtcatttcatgcatgagtgagcttgnagtatatctatcgtcgctnatcantagcgagatcgacgacgtcgcttctgctgtatgtcagcgtctcatttgctcgnacattaggacgacgtagagtcngtacgtgttatctgagatgacgacgtagcatgacatatacagtacgtatctaatacacagacgctactgctcntaagtactgctattcaatgctatactatgtacacacatcccaagtagtgcattacgatgacaagtatatatatctatacgcctcactccgcgctctgtcgcgcgatagacgactagtaattgcaatntgatcaccgtagtantcacntctcaagcgatgtctgcgcatagcgntcgagcgtcgccatccgtgtctgcgtgagtactcgtcgtcgctacacatcgtnatcacattgaatcttgtgcgcatgagcatcgatgtagcgcgtcgacagatcgcganttcgagacgangangtagagtgacatcagttcatcagtacncgtacgagtagtgatgngcctgttatcgtgcatcgatcnnaatagcgccagtacgtgataatagacgagtctgatacacactctcgacgatcatgactatgactacactacgcantcaatacgntcacaaatacgtatagcagtgtcaatntatacgatagtgtcatatcgctagccatntcgtgcacacgtgaagcgcgcgctcactgatantctacgccgtcatcgtctcgcactatcagtatcgacgtcgcacgcagctgacgtccngtagcgcatgcagatgtatcgcgtgatacgagtgctatatatcgtntntatccagntcgcaggtagcgctgtatgccaccgcacacactagtggcgtagcatacgacgatacgagcagataggacgntgcgcgacagacatcaagtattgcgtgatacttatagcatatgagtagncatcgcagacgagtatgcagctagtgcagcactcattcatctagcgcacgttacatcttcaacgctacttagcgcatgcnatcagcatcgttcagcgtctgagagatagagtgcgtgcagataagtgtcttagctccactgatatcgtanctcgcatcatatcntgtgctgttgcatgtagatctgatatagttagacgcgattagtgtgcgcgtgagccgtgcgcggcacagagtgaactagagcganaccacgagatgatatgagtcgcgtgctatgccatgcgactacgctatcgtactgcgcantagtatcacgatctagcttagctgcacatactcgcntgatcagcgtacacttgtttgtatcagtagtgatcgacgagatacgaatatagtgtgatacgacagtggaattaacgtatgtcgtcgctcgtgctcacacactacacatgtatctactagtacatacgactaagacaccagacaactcacagacgcatcagacgncgcagcacgngcggcgcgaacgtcgcgtgatgagtcgnctgacactatnacnatctacatactctcacgcgtcgacngcnggtgtgtnggatatgatgtctctatctaccgtgatagtataatctagcgagtctctactccntatatgtactctgtctgcttcgtgtactattatatctctgtgtaggcatgacgctagatganagatnanaagtgtagagtagtgagggntagtctgcatgcgatagt

SEQ ID NO: 3283 - DNA, 558 bp, Glycine max
  Probeset Number=SeqID_13062
ctggagctccccgcggtggcggccgctctagaactagtggatcccccgggctgcaggaattcgcacgagaccattacctagaacatcctaatcaaaaaccttttttaagactgagagagttatgttttgtccatgtcattgacacagtattaaatattacaaatattctgttcaaaaacaagttttaaaatgagctgtaaaatcaaccatataatcaaaagtgtgattaaaacaattaagtaatacaagctagtttatttctgcttccaacaagcatgcagtgcacttattaaaaaaagggttaggttagtcaattaggcaaaacatgttaaactgttagttcaacaatataaaaatgcatttaattacttgtcttgtagtttatttaacattaattggacaaaataaagctgaatcaatgcttgaaggcttctactgcggccgagacaattgttatgatgtgttgggtgttactcgggatacaagcagagctgacattgcaaaagcctacagaaaacttgcaaaaaaattccatccagatttatataggaatgaaga

SEQ ID NO: 3284 - DNA, 798 bp, Glycine max
  misc_feature (1)..(1): n is a, c, g, or t
  Peptide Sequence Number=SeqID_6760
  Probeset Number=SeqID_13063
nccacgtgtccgcccacgcgtccgcccacgcgtccgcccacgcgtccgcggacgcgtggggttctataggctcgtacctctgtgtccttgagttctaaggagacaggaacctacgtctggtggatgaatcatgaccgtgtgatcagagcgtgattaacggcccgggtgagtttctctttggagtagtctcatctttggctgtagaggatcgttcttaggacacttccatgtgcctgggaatggtcatacggttgtctgacagaccaaaaaagaaaaaaagacaaaaaagtaataaaaaagaagaaaaaaaacaatataaaaaagacctaaacaaatttttttcaccgttctacaattttttgcacatctgcttggaaacttgttcgtgcttaatggtgaaatgtacaagtagaaacactaaggaagggttcttccctcacccaaagataagttgctgtatttacttcttcaaaagagattagatccttactccaaagtactttggcatgagttctttgggttcacatcataaccatttcaggtgaggggagatgccacgttcaaagggtaaaatgaagtttaacattgttcaatgctcaataggcccaggtggcacgttacaagataggactcatttttttagccaacagcctaatgatactaagaacattcataatgagagttgtttatgtaaaaaaattgtgtgtgtttgcattgttgaagttccgagttgaagtcgatgtcattcgatgataaatgccatgatgttaaagggaagggctaccgaagtgcaatatc

SEQ ID NO: 3285 - DNA, 266 bp, Glycine max
  Probeset Number=SeqID_13064
ctttattaattctcgatgttattaacgaatgaaacagtgtttggcacacccacagaaccctctatacaatggaggaatcatccaaaacccagaactgaataatggacttcaagggtggactgcatttggagacgcaagaatagaacatagagaatcattaggcaacaaatatgtggtagcccataggagaaatcaagcacatgatagtgtctcccagaagatttaccttcaaaaggataagcattatactttatccggtaaatttt

SEQ ID NO: 3286 - DNA, 1412 bp, Glycine max
  misc_feature (17)..(17): n is a, c, g, or t
  misc_feature (351)..(351): n is a, c, g, or t
  misc_feature (455)..(455): n is a, c, g, or t
  misc_feature (519)..(519): n is a, c, g, or t
  misc_feature (521)..(521): n is a, c, g, or t
  misc_feature (754)..(754): n is a, c, g, or t
  misc_feature (857)..(857): n is a, c, g, or t
  misc_feature (916)..(916): n is a, c, g, or t
  misc_feature (1249)..(1249): n is a, c, g, or t
  Peptide Sequence Number=SeqID_6761
  Probeset Number=SeqID_13065
gccaccaccaccccatntctcctctacccacttctgtcctctaggtgcccgccacatacccaaagccggaaaagtcgcggaccctccacgcggggcgcggcgccgcaacatattaggatatctcccgcgcgagcccgccgcgagagtgtcgcagagatctcctcaactaagtattaggtagcccctcagaatggagtactttctccttcatgctctatgcagagggctagcggtcaggaccgcttcttatggtctagtctccatactattgagcctctaggtgtgttgcatgtatgtcaagcgcagagagaggtctcgatgctgtaggacatccccatactaatgctaccntgcagccctccctctgcacacgtttagtacgaagcgtattacgcaactcttgcccttgtgcgactctacgccatggaactctgtcgccggatctaagatcctgnatgggaccccacgtatctctagtatagcagagtcaggatgaccccacctgagacgcacagcctntnctgtttcttagcctctccgggagtggtcttcgacgtacacctccagtgaagttcattaaataagcagcctgagtcctctctccatcagtagcagttccgcagcgacagcacgacccgaagccgatgtactatagtagggagaagaagagaggccctgctattataggcgatgtcactgccacgcctcctccactttctatctattagcctagagcccgtgacagcgtccacgnctcacgacagatcttaggctcgtgccatcgctatactcagaggtgccctcgggcgcagtgtagagtgtccttgctcgcgagactacgtatccgagacaagagncaagcgggcatatcctacacttccggcgcgcaatccataagagacgtagtatgctcctncttacatttcctcgcgtctcgtcctagtgctatgagaacccttcgctgccacatactactttgatggtgtatactctgagagtgaccgtatgcacactctaggcgccgatgtagtttcattgtgcgctctctgccgcgctcagaggtgcactcacgcctcagccgcgacactctccgcccttcgatgcgttaatacgctgtgttcgagagcagtcacgtcgacggacccccgcaccctgcacgagacgacaacagtgtgtgtcgatctcacgcacggatccagtagatagagtcgtcatccgaaggagcacgtgcgctatttctgcaagcgtnagagcacatcgcccggcgagtgcactcctccgcaccacggtgtggtataacacccacataatgcactcgtatgccctattcgcttcgctcacccatacgctgtaggagatctcctcttgcctctctactcattatcgtctacgcacgccctcgcatcgcgacc

SEQ ID NO: 3287 - DNA, 580 bp, Glycine max
  Probeset Number=SeqID_13066
aaataataaagcttggttttattgaaccctaatattgattatgaaataccttatcggtgaaatgagaacaaacaagataatgagttgatatttttaattaataacacaggatctcaaaattcaataaactttaaaagaaatcagaatagctcacagcacatacagacaacacaagagaacaataattgttagcaaagcagttgatttgtgtttgcaatccttattgacacactgtcaataatgcaataataaattattttgtttaaagaatggtgttaaaattaacaagatagtaccacaagcaatggtatgtgaaaaaccagataaagcgaaaagagcaacaatgtatttacataagtaatttaggaatgacttcaagtatgactacatactgtgtacacagcatttttcaccgagaggcaatagatgcaagacttgacaaactacttggcccacttggagcattcccactaagcttttccatctcttcatcagtctgattgctctttaattcttgaagtgtgtaaacaaatcggttccactcatcaaggcggggatgtgccagttgctcaccaacatc

SEQ ID NO: 3288 - DNA, 2036 bp, Glycine max
  misc_feature (49)..(49): n is a, c, g, or t
  misc_feature (65)..(65): n is a, c, g, or t
  misc_feature (91)..(91): n is a, c, g, or t
  misc_feature (134)..(134): n is a, c, g, or t
  misc_feature (178)..(178): n is a, c, g, or t
  misc_feature (235)..(235): n is a, c, g, or t
  misc_feature (299)..(299): n is a, c, g, or t
  misc_feature (334)..(334): n is a, c, g, or t
  misc_feature (417)..(417): n is a, c, g, or t
  misc_feature (465)..(465): n is a, c, g, or t
  misc_feature (485)..(485): n is a, c, g, or t
  misc_feature (517)..(517): n is a, c, g, or t
  misc_feature (545)..(545): n is a, c, g, or t
  misc_feature (553)..(553): n is a, c, g, or t
  misc_feature (594)..(594): n is a, c, g, or t
  misc_feature (613)..(613): n is a, c, g, or t
  misc_feature (627)..(627): n is a, c, g, or t
  misc_feature (692)..(692): n is a, c, g, or t
  misc_feature (728)..(728): n is a, c, g, or t
  misc_feature (1568)..(1568): n is a, c, g, or t
  misc_feature (1984)..(1984): n is a, c, g, or t
  Peptide Sequence Number=SeqID_6762
  Probeset Number=SeqID_13067
agttgtgtcgtcatcgcctcacgtcactggcgctaaattgagcagtacnggcatcagacggctgntgttcatcgtctattgagtatccttngcctacgatgggccattacgttagacgtttaggcatgcatgtngatggatgatctcacatgcttcatcattcagcatgtcgtatctnctctgctgcatctcatagccctgctgatctcgcagtgtatctagtatgctatctcangatcacatcctctgccattaggtgtactgctatctcagacacacgttccagctatgccgatcgngtcatgtagatcttactcatcgcattacacactcntacgtctcatagccagttcgctcgtcacgcagtcgaatcggtcgtctgtatctgatgagagctcgcacgctcgcgtgctacgnactcgtcctgcataggtcgctcgttcatgctctcactgtatgtgcacnccgctcagcacgctgcagangtgtcatcacgtgcagcgcacgtcatgcatcnaccgcgtcacatctgcgcgtcgcgaatncgtccacntttcactcgagacagcggtgtcgtcacatccgtctgtactntcttcttcactgcatctcncgttctcatgtcgnatctgcgacatcactatgactgcagtacgcacgcgatctgcagtcactctctatacgaactacgnccgtgtctcccagcgtcgcatgtctgcgcatgcgtncagctgcacgatacgtggtgccgcctccactgctgcgatcatgagtctccgcctccacagctgccgctgctacagctccatcacctaccacctgccgcagcaccgcgcatctctcatcgctctgtgcacgtcgctgttcgcaggctcactctctctcgctacagaggctcatctctcgtacaccaccttctcgagcgtcattctgtgtctgctgcacccacacatatctctcgctacgtcatactgcgactcctcgtactgagcacctgccgcacttgggaaacagtcacatcacacgagtcacgctggtccttctctcacacgtctcctgcatggtctatactccctagcataactgcttatcacactgcggcacaggtcgggcacgccagccagtcatcgataatcacagcttcgccagtcagtgcactcgtacgcgcctgcacttgctgccgctcatctcacaccacctacgcctacacgcatcctccatgccttacgttcgacgcgcgctgcacatctcgcgtgccgctactccttctccgctctctctcctccatctgctcaccctcatccatcttcctcacctcatgtctgtgcctacgtccgtctctctgctccggcccggcttcgcccgtcctcacaccgccgttgtcgcactgagctccttccgtacctcgcttatacctccatgcagctgcctcgctataccactgtcttccgctcacccactagctagtcgcgcactctgtcgcacagtctcacatgcgtctgtcttcgttagcttctatcttctctctccttcactcctcccgtctgctcctaagtccgcactcttcnttcctcttcgtccgcgcggcggagggtgcgggccgcccatcgtcctaggcgctctgatctcttcgtgccctcattcggcgtctcatccccgcctctatctcctctcgccaatccttgcttgttatctcccatctgttatctctccttcgtctgctcctcttctttcgtggtgggtgtacaactaaaggcacaccttgcttgtcctgatcccattccctgctgtcttcgccttctctcttgtgtttttgtattctggcttttgtttgttgtgggagaaagaaattcagcggccgcgcgtctccgcgccgcgctactcttcttgtgaggacaaatccatctcgccgtccttcccctcgcttcgattcttataattcccttatcttttcctatctttctatcccgtactctttttcttnttcttgtatcctttctctccttctcctccccactgccgcgtactcgctgctc

SEQ ID NO: 3289 - DNA, 415 bp, Glycine max
  Peptide Sequence Number=SeqID_6763
  Probeset Number=SeqID_13068
ttctcgcaccatacaacgccaaactcatccacaaccacctcctcatcgacccagccggcgccgtcttaccacgccacagccccgactaccagcatctccgtcgcgctattcgcacagcagtctttaacactctggcaacatctcgcgacaccttcgactcgatctacgtcttcacagacttccagtcagatgatgagatcggcagcggtgtcatggacgagtatgaagccttggctgcgagccgtggctgcaccctcgtacctgttcatgctacatgcggcacggcggagaaccttcgtcgcttgacttcctctgaacgcggcatgcatggcaagctgaccgatgcagagctggtggtgcagatccgggaaagtgaggtgatctaccagtggccagcggagaatccttttcactt

SEQ ID NO: 3290 - DNA, 1426 bp, Glycine max
  misc_feature (18)..(18): n is a, c, g, or t
  misc_feature (323)..(323): n is a, c, g, or t
  misc_feature (403)..(403): n is a, c, g, or t
  misc_feature (829)..(829): n is a, c, g, or t
  misc_feature (1243)..(1243): n is a, c, g, or t
  Peptide Sequence Number=SeqID_6764
  Probeset Number=SeqID_13069
tgtggtttgtgtgtgtcncgtgcttcgccgtgtcctcgcgcgtcgcctcttatctatatgcttattcggtccttatttgtgtctgagcacgaaagcactatcaatgctaaacattaatttggtgatattgtgaggcgcctactctcatgtgggaagagagatgtgatgtctattattgtgcgcacataccccaccacatatcaagcgtgtggataagttgcgtaccatgataccttcacatctgaccgctcccgctctccgctcaagaatatgataggtacccgcaatatacaaagcgtgagactcaaagatattctcttatngtatgctcatgttgatatgttgcgcgcttcagcgattacgtatactacgatgaatactagctcgcgtgtacagtcgagtnaagattaatgcgctcgccgcgagtatataggcgagcgggcattaagatctcggctgtgccatccctccacccatagacgttagcgggtcttaacctgactatacacaccttattgttttattcattggacgaaaaatagatgtgcacctacttcatcagtactggtcagagtgaatagcgcggtaattatgcgctctccgtcgaagactggtcgtctgctgagagcactccgctatgttaacccatttgcacagtcgccgatgccgcccactccctttatccgctatacccaatcatacagaatatgggcaacactcatcctagagatcccgatgttatgtacggtgggatatgaatccgtcgacaccatcccccattatataatctgacccgtcagtgcgcgctcgtcgtgttgtgcgcgtgcgngttgatttaatcctatccgccccactatacctcccgcggctccgcctatgttttatctatctctttaaatgtgggtacgaaatcggttattacgtttcgacgtgtaggttatatcgccccccacgccagcgtgcgataggagagactgtactcttttcagcgtctgcagctctgccccgcctttggcgttgtgatattgttactgcgtacatgttggttctcctattctctctattattctctacagtagcgcactcggttattgcttcgcgcgcatcataaatgctccgagagatacccagtgtgtgaatggaactaggtatatactgcctcgtcttatagtaacacgacccgcttggcgatattgtaaggtgggtagtatcgtcacagttacccagtctttatagtctatcncactcttcggcatgtatcgctctatgcgaccagctgcgccattcttggactgtgtcgctgatctgtgtatttgattataatatcagcgaggagcagacatctgtgcgcgtggttatcttgtgcatttatatatgttgctcgaacatcgctataagtccagcgctgtccgcgagtcgctgactg

SEQ ID NO: 3291 - DNA, 1726 bp, Glycine max
  misc_feature (1)..(1): n is a, c, g, or t
  misc_feature (19)..(19): n is a, c, g, or t
  misc_feature (21)..(21): n is a, c, g, or t
  misc_feature (48)..(48): n is a, c, g, or t
  misc_feature (68)..(68): n is a, c, g, or t
  misc_feature (112)..(112): n is a, c, g, or t
  misc_feature (132)..(132): n is a, c, g, or t
  misc_feature (134)..(134): n is a, c, g, or t
  misc_feature (173)..(173): n is a, c, g, or t
  misc_feature (178)..(178): n is a, c, g, or t
  misc_feature (183)..(183): n is a, c, g, or t
  misc_feature (185)..(185): n is a, c, g, or t
  misc_feature (201)..(201): n is a, c, g, or t
  misc_feature (246)..(246): n is a, c, g, or t
  misc_feature (294)..(294): n is a, c, g, or t
  misc_feature (315)..(315): n is a, c, g, or t
  misc_feature (410)..(410): n is a, c, g, or t
  misc_feature (416)..(416): n is a, c, g, or t
  misc_feature (421)..(421): n is a, c, g, or t
  misc_feature (493)..(493): n is a, c, g, or t
  misc_feature (514)..(514): n is a, c, g, or t
  misc_feature (591)..(591): n is a, c, g, or t
  misc_feature (695)..(695): n is a, c, g, or t
  misc_feature (733)..(733): n is a, c, g, or t
  misc_feature (840)..(840): n is a, c, g, or t
  misc_feature (851)..(851): n is a, c, g, or t
  misc_feature (880)..(880): n is a, c, g, or t
  misc_feature (892)..(892): n is a, c, g, or t
  misc_feature (1073)..(1073): n is a, c, g, or t
  misc_feature (1198)..(1198): n is a, c, g, or t
  misc_feature (1495)..(1495): n is a, c, g, or t
  misc_feature (1605)..(1605): n is a, c, g, or t
  misc_feature (1666)..(1666): n is a, c, g, or t
  misc_feature (1690)..(1690): n is a, c, g, or t
  misc_feature (1695)..(1695): n is a, c, g, or t
  misc_feature (1697)..(1697): n is a, c, g, or t
  misc_feature (1710)..(1710): n is a, c, g, or t
  misc_feature (1713)..(1713): n is a, c, g, or t
  misc_feature (1722)..(1726): n is a, c, g, or t
  Probeset Number=SeqID_13070
ngagtagcacgtgtagttnanttacatgcatcatcatatcataatgangcaagtcagcggtgcattgncttatcgtcatacatcatagcaccacgcatgtaacctagctcanctacaccgcgtcgcgctcancntgtatcgcgcagctcgcggcgagccgtgctatcgcgatngttgncatcncngcgggcgcgtgcgganaactctcgtcagcaagtagacacgcacgcgagttcatatgtgagncagcggcaagtgcgcgagctgttctgcgttaacaccagcatgacgagncgcgcatcgtgccgtccgtcncgctcgaattacgatcaccgtcgcgatgcattatctgtcgacacgcgcgcggtataccactacgatagcagtagcacagtgtgtatgacgtgtanacgagngtcgnagtctcgcgcgcagcgcgcaatgtgcgatatcatcagcgtacggcaccgacgcgctagtactatcagcgatnagattatcgacacatcggagnacagagcaagcacagcgacatcgcgaatacgaatcgagagacgaccgaacgcgtgtatcacacgcgcgacgcaacgngacgcggtgcgcgatcgctatctcactagcatgtcgtatgtcgaatcgttgatgtagctcacgctcgacactcggaagagtcgacgtcgcgagagcgcgaatcntcgacatggctcgagagtgcggcgagtagtcagcatcnactcagatgcgagtttcgtgcggtgcggaatgagctgaggcaccgtcagtcgtgcgactcgtcacagatcgtacgcggcgcgtgagaggatggatttggttgagtgnagagatggtancttcttgttactcttgtctatattttttncactccttattntaatcatatatatagtgtcaaccatcattgctgatactacgctacataatatatatatatccgtatttctgtgtttcgttaccactgccgcctgcggtatatacggtgaatgtatgtgatatagtgtagagctgacgtagacgagagatgagagtgaggcggagcgactgcgcgggcgctntggcgcgtgtctgtgctttttgtctgtccttacgctgaatcttcattactcgtcgcgtccatcgcctcgcgcactcctacacgctaaaatacgatagagcatgctgcaagcgtgatctctccccnagccacgttctccctctcacgcgcgccgcgctgcaagaggcgctggacacgcacacaaaagaagagtcacatataatcgtatcagtcgaatgcggcgctgaccgcaccacctacacatgatcccgcaccacgatcccgcgcatggcgcaggatgcgatggcaaatacagcgcgttcgagcgcacgacagcacccagacacaaccacaggacaggtgggacagagagacgacagcgcggcagaccacagcatgccggggcgcgggcgcgtacgcgtagcgagtgcgagcagtctgatncattgtagtaataatgatgctataataagtactctaacatcgacgacgggcgtgtgtggcgtgttcatctacttcgcgctttcattgtttatacgagttagtgagcatanatacatgttttcaatttcgcgctcgtggctccccgtttggcgagtggtggaagggagtgtnaagtggcccaccagggtggacacntgcancncccgaacaataanccnccacccaannnnn

SEQ ID NO: 3292 - DNA, 1576 bp, Glycine max
  misc_feature (1076)..(1076): n is a, c, g, or t
  misc_feature (1127)..(1127): n is a, c, g, or t
  misc_feature (1164)..(1164): n is a, c, g, or t
  misc_feature (1332)..(1332): n is a, c, g, or t
  misc_feature (1336)..(1336): n is a, c, g, or t
  misc_feature (1443)..(1443): n is a, c, g, or t
  misc_feature (1554)..(1554): n is a, c, g, or t
  misc_feature (1576)..(1576): n is a, c, g, or t
  Peptide Sequence Number=SeqID_6765
  Probeset Number=SeqID_13071
gagggcccccgcctgcgccctctaagccgcgcgcgatactcggcccgacccgccctccgcggttcgctggtggtcgccggcgagggcgaggatgttaatatttatttttgtcccaccccgcaacttgatgtaagtaatctttagatcggcccaccaaccagatcactcgggcatccctcctttggccacaaaattaccccaccaaatgtatccggcatcaacatttacaaacatgcccgcccctcccttctagcaccccatgtcctttatatatcccttgctccgccttattatttttgttgcggctgttctctgatcggctaggcatcgccggccattaaccgtagggcgtttggtgtcgccccgctctccccccccacccgcgactatgtgataccccgccccgctgtttataagtcgctccccgcgccagcgcgcgcattgggaagataaaggaataatgatatccatccacggatcacgtctctcgcccacaacccgctctacttgttctattttctccacgcagccttggttatatctccgcgcctaatcatatcataccatccccgcgctcgggtatatataatctcttccctcccctcaactgaataaaaccgccggctattgttcgggacacgaaataggggtgatgtgagaacacgcccccgccgggaaaaagcacgtgataataggtgcgttgcgctacccacttcaaccacctcacaaacgagatggtgttgaaagcgtcggcatcgcttatgtgttaccagcaaatcggcggcgtcacatagtgttgtgagaacaagcggtttcgctaaacacatcacagacttttcgtactaatactcagtatgatgatattctgctgctagcacaagaaaataagaggcgtgtgcgtgtcatattatctcccacgattgaattacgccgccgcgcgagatatcggtgcacacgctccgcctctcgcctatatatttcacaccctcgcctgcgctcgttgttatcgcgctgcggccatcatggtgtgtcagaatatatacatatcggccggcgcggcgacatatatatatacnctctctcctgcgatgcggctatatgacacgatgataatgtatcacatacantctgtcgcgtacgcacgctgcgcgcggcgtcggcganaatatgacggtatacaatctgatagatgctgtggcgaaaaatacacgtgctctgctcgctacggccctgctatcctatgtgcgtgtctatacccaatatacgacgcgtcgtctgatcgtcgtgcgcgcgcgatactcgtgataaaaccgcatgcactaacgacgcccnacangacactgtgtcttgattgtcggccgggcgtgagtatactacacgagcgtgacgtgtgattagtatgatcgcggtgaggcgcggtgggcgagagacatatgagtgggnctatatcgcgtgcgcgcgcgctctacggcgcggcgtatataatgcgatgtatggtttcgattatcatgcactgtagttgtcacggacggtatataatcgacacatgaaagngtcgagctatctgatctcgatn

SEQ ID NO: 3293 - DNA, 341 bp, Glycine max
  Probeset Number=SeqID_13072
ggccttagaggtccctatagtgatgtctgcaccaaggtgagctctggcatcaaatcttgcctagccaaagggataaaagtttagttgtttttgtggagataggtcataggtagatacttcccattgcatacccctcaggacgcaaggataagtgcgattcttaccttgggaacaattctatggggggaagccctctttctccccctaaagaatccgctgtattgacggcatgcactaggacaagtaagaaggtccaagcttgtattggcagatacttgcaaggtactgcaaagggtcctgcaacaaggaaagaaaaggtattgatcgcaggcagcaagtca

SEQ ID NO: 3294 - DNA, 1485 bp, Glycine max
  misc_feature (7)..(7): n is a, c, g, or t
  misc_feature (15)..(17): n is a, c, g, or t
  misc_feature (19)..(19): n is a, c, g, or t
  misc_feature (29)..(29): n is a, c, g, or t
  misc_feature (33)..(33): n is a, c, g, or t
  misc_feature (39)..(41): n is a, c, g, or t
  misc_feature (53)..(54): n is a, c, g, or t
  misc_feature (105)..(105): n is a, c, g, or t
  misc_feature (107)..(107): n is a, c, g, or t
  misc_feature (113)..(114): n is a, c, g, or t
  misc_feature (120)..(120): n is a, c, g, or t
  misc_feature (191)..(191): n is a, c, g, or t
  misc_feature (218)..(218): n is a, c, g, or t
  misc_feature (300)..(301): n is a, c, g, or t
  misc_feature (311)..(311): n is a, c, g, or t
  misc_feature (314)..(314): n is a, c, g, or t
  misc_feature (365)..(365): n is a, c, g, or t
  misc_feature (443)..(443): n is a, c, g, or t
  misc_feature (445)..(445): n is a, c, g, or t
  misc_feature (447)..(450): n is a, c, g, or t
  misc_feature (1174)..(1174): n is a, c, g, or t
  misc_feature (1447)..(1447): n is a, c, g, or t
  Peptide Sequence Number=SeqID_6766
  Probeset Number=SeqID_13073
gtgtttntggtggtnnntntgtgtggggngtgngtcgtnnncttcagtgcccnncccttaaggctataccgcggcgtcgcccgagcccctgccaccacataaacncnattacnncgcacncccctactattatcacagaactctgttataacaaaccgtgactgtaggacacgaacagcggaagaagcttnctcacaaacacacagcgagggacgcancgacatactagtaggacacaaaagagaaatcgttctattcgacgggcggtcccttaccgtggggtgcgtccacgtaaagcgnnttctgagccnctncttttatgggtagcatatatcatcgtggcgggtacgacatgtatatcaggntgatggggtgcgtatatgtttattaggcggggtgcatatagtataggcgcggacgttctttttgagttaacaactagngnannnntatgcagtcacgctattgacaatactatcatggattgcgttatttatatcatctgttcctcgctttgagggcgcggcagatgcagaatattagacatcatagtacaataaataaaaaacggacggtattcatttactttatctcgtgtcgtatttccacactactggcgcgggggttatcacacaccctgcgagctcagcgatctaatactggtgccgctcatccttctatagcctctccggtctcattacttctctcgcgctagctacaatcgctctaccccacccactgcgataccctactttacatcactcgaatataagagtcgattaaagatgtcatagatctgtataattatattaaacacggcgttcaaattggacggagcgggaaatagggaaacccaacccctctattcattacctctctcctctcttctacatggcccgtacaatgtatactgtctattaactatgtcgacccacacaccagcatcgcgtaaatataccttatagtcatatagacatattctaacttgtacgcgcatatttattagtatattccacccgcctatacacaactcgccgcctaaatactgtcgtgctgcctactgtggcgctgcggaccgcccatcactattcacgcgcatgtttcttcttcattttgccacatgcacatattcgatcgtgaccccgatataaatctatctgttgaataagatcgnctcgcggagttgatgttgtgccgcgattactgtgctgctatatataatacgttatgttcgatatatattcggtactcatattcaatcatatctgtgaggcggtgatagagcgaaggtgacggtgggcgactaccacctcatcccactccgtcactgccgccacactacccactcctctatatattatttatttcatagaccatcgatgtatcattgtcctgtatctcataaattatatcatactatatctagtgatgatatacttataaatgncgcatatggtgggcgcggtggtggcgcgggaaatacaa

SEQ ID NO: 3295 - DNA, 456 bp, Glycine max
  Probeset Number=SeqID_13074
taattgacttatggttataatgtgtgtagacaagtgtgtatacaatttgctcctttattcaaatttcaatgtgaaaaacactaaattttctcatatttgaaggtgggagctttcaaagactcttcatgatttcttatctcgatgaggagatacttgtaagtttaacatactatcattctccggaatcaattttagataaatttgatgcatgtgtacccttgtagatgactatgctgacagagctaatgtgaaatctcaaattttgatgcacgctctaagaagcacatgggtatatttcaactaatataaatatgatatggggatatggtcaatttttgggattaaatgttccaaatatacattgttaaagttgttatatatgtatatgtataataaagtctcttgcaactaaaaagtttttccgattggatatttggatatattttacttgaactg

SEQ ID NO: 3296 - DNA, 451 bp, Glycine max
  Peptide Sequence Number=SeqID_6767
  Probeset Number=SeqID_13075
gcacgagataagccggaagcgattataaaacaactgacggcactggagtatgttctcacttttttttacttgctttagtgaacttttcccttcaaagatttaatgcaattctcacacacaccctatacatactagaaaattgagaagagatacaagtgacctaagttgacgaggccaaaaatcatcataagaacaaaataaaacttccacagtgatatcccattaatttgatgatatgaactctattcatagggcttattagagatgtgattaacaattaataaacatttttaacaacataactaaataacacatttcgtaactaatacaactaacacttgattaatatcctgatttttttctttttcaggttcgtgattacattcatgttcttgatttagcagatgggcatattgttgtgttgcgtaaactagatgatcctaaaataggc

SEQ ID NO: 3297 - DNA, 1627 bp, Glycine max
  misc_feature (42)..(42): n is a, c, g, or t
  misc_feature (100)..(100): n is a, c, g, or t
  misc_feature (365)..(365): n is a, c, g, or t
  misc_feature (794)..(794): n is a, c, g, or t
  misc_feature (799)..(799): n is a, c, g, or t
  misc_feature (1233)..(1233): n is a, c, g, or t
  misc_feature (1299)..(1299): n is a, c, g, or t
  misc_feature (1318)..(1318): n is a, c, g, or t
  misc_feature (1320)..(1320): n is a, c, g, or t
  misc_feature (1376)..(1376): n is a, c, g, or t
  misc_feature (1491)..(1491): n is a, c, g, or t
  misc_feature (1506)..(1506): n is a, c, g, or t
  misc_feature (1548)..(1548): n is a, c, g, or t
  misc_feature (1625)..(1625): n is a, c, g, or t
  misc_feature (1627)..(1627): n is a, c, g, or t
  Probeset Number=SeqID_13076
tccctctcctcttccctcctccccccccctgtctaccttctntcgttccccgtctgcttcgcaccgccccgcgtcattcccctccgtggatatctggttnccgccccggcggcgcgcgcgcgcatcgaggacaaccgcgcagtaataccgcatatcatatgtatacctggtgagagactatactagatagatatgcgccgtatcgtgtagtgagcgctagcgaggcggtggcgccatgtgtgtgtgagatttcatcttcatgtactcccgctcgtcgccccctcgaacatcacacaccatatacccagagatgtagacgatgtgtgaggtgaatcgttagtggcggcctcgcgcgcgtgcgactntgcactcttattgcgactgccaacaacactcacacgacaaactgatctaattacctactaaaatatatactacacaggcatctgtatataccagataactcagatacgaaatctctacatatataaccacgaacatactacccagacaccacaattcagtattaatatacacttccatttatatgattatatgaatattcgacgcgcgtagataacactggttatcattattgtgtactatcatagatgtgtagtaggtattgatacgtatgaaggacatacggcgacatctagtaacaggaaccatgtgatacgatataggagtttgaagcactgtctacagaactaacggatctcgtatcgaaggctagaaacacaccatgtcgagttttgattctgaatacatcaataataatatgcgaccaaggnctagnacgtacatgctgtaaatataataaacgcataattctcatgccgcagcttggcacgcctatgcgcactcgacatgtaggtactcgccgcgcaaagtactgtattagatactgtcactacaatataacactatatatatacatcacccgaaaatacagaagattcagatatatgatgattaaataagagagtgcgaatctatacgacacatatacacgagcagtgtgcagtgtataacgcgcctacgtatactcagagtgagagtgtccaccacaagaccggatagcactataacgacgagtggtgatgttcgctgcatctaacacatcggagttggtgtgcatatcatagattatacgtgacgacatacacacgcaacatctctcatcacacacattcgagtcatgtactcatatccaattatacacgtgtacanatcatatcctcatatctgtacatacatcctcacgtcgcgcagctatgtctcacatctcacacacgntgagcgctacgtctaatcncncagacgcgcacattacatcattacatatatacgacgagtcacagtatacactgcgntacatacgactatgtcgcacgaacagactaagatacgtcgaagatcgagtatagatatattattgatgtgtgccgatgatactttcatacacgttctcctgatgctacatatcancgcgtatcgtgatcntacgcattgatgatagcacgagatgagcgttaatagatgagnaatagatatgacgacacatataggtacactgtaccgaccactcagatatactatcgcgtagaataagctaagagatnan

SEQ ID NO: 3298 - DNA, 2023 bp, Glycine max
  misc_feature (218)..(218): n is a, c, g, or t
  misc_feature (1333)..(1333): n is a, c, g, or t
  misc_feature (1355)..(1355): n is a, c, g, or t
  misc_feature (1362)..(1362): n is a, c, g, or t
  misc_feature (1378)..(1378): n is a, c, g, or t
  misc_feature (1411)..(1411): n is a, c, g, or t
  misc_feature (1418)..(1418): n is a, c, g, or t
  misc_feature (1447)..(1447): n is a, c, g, or t
  misc_feature (1458)..(1458): n is a, c, g, or t
  misc_feature (1482)..(1482): n is a, c, g, or t
  misc_feature (1543)..(1543): n is a, c, g, or t
  misc_feature (1546)..(1546): n is a, c, g, or t
  misc_feature (1643)..(1643): n is a, c, g, or t
  misc_feature (1657)..(1657): n is a, c, g, or t
  misc_feature (1667)..(1667): n is a, c, g, or t
  misc_feature (1716)..(1716): n is a, c, g, or t
  misc_feature (1754)..(1754): n is a, c, g, or t
  misc_feature (1761)..(1761): n is a, c, g, or t
  misc_feature (1768)..(1768): n is a, c, g, or t
  misc_feature (1780)..(1780): n is a, c, g, or t
  misc_feature (1847)..(1847): n is a, c, g, or t
  misc_feature (1910)..(1910): n is a, c, g, or t
  misc_feature (1915)..(1915): n is a, c, g, or t
  misc_feature (1919)..(1919): n is a, c, g, or t
  misc_feature (1926)..(1926): n is a, c, g, or t
  misc_feature (1938)..(1938): n is a, c, g, or t
  misc_feature (1956)..(1956): n is a, c, g, or t
  misc_feature (1997)..(1997): n is a, c, g, or t
  misc_feature (2023)..(2023): n is a, c, g, or t
  Peptide Sequence Number=SeqID_6768
  Probeset Number=SeqID_13077
acagccgagagacgagggcgcgcggaaatgacaatcatcagtaagcgaagagtctatgaagataattgatgtaccgagccgcgtgcgtgcacaacacatacgcacaccacaacctagaagcacgacactatttttctccaatgttagtgtggaggaattatcgtatacggacaagtattttataacaatagacactgagaaacaaacgacgcaaccanacagactcatgttattatctcatccacacaactctaacgccatagaacacctatttgtgacactagcctgttccgctacctcgtgcgtgacgactgttatctgtttatatatcatgactgaatcaacaacacctactaaacacataacataactagagcgacgcgccatgcagcacgccttgccatactaaactacatatatgtctcctctatcgctctgcgctacgcaccgacgcgaacggcgtaactgcgtacttcgtgctccgccgctcatgtgatgggtggaggctcgtagccgctcatgatactaataaacacaatcacacacatttacgaatcaaccttctctctatcactttcaatatatcttttgaccccacccacggcgacaccggcatctcagttatacaatcaaacaacataggaatatcaaacacgcacttcacacattttacttacattacaataacgagctaggagtctgttagtaatacgcacacacatcataacccgtgtgcacgaatgttagtatacatatcgatgcgctcgcactgactcacgcgctgcgttatactaatgcgtggcgctactcagtcttgtgaatgcgcgtagatatgcgtacccgaccgcgccccggaatagtagtataacgcaccagacacatatcactacacgctcgctctactccagtcctcggatattagatcactatcgacacatccagtgtaaatatctctagagcagctagtaccataccacaagatattcatgtatctgcacatatcaacgaacaatcggcagaatcgtgattacagccattagaggagctaagtatataggacgctctatacactacatctggacgaatcgagcagagtgtgagagtacagcgccgaccaatgacgtgacattcagtgacgacagcatgcgacgagagtacagacgccggcatcatctatatcgctactcgcttgatatgaaacgatactagtgatatagcatattgacaggtcgcttctatgctcatgagcaatgtacacgctgccgaagataccgcagagaccgcggcatgaggcagtgagacatgccggcactatgatatacgtctgactaangtttgccatctgcttcccgcantctagtntacgatcacttactancacatatcatccagatgacgcccagctagtcantcgtcangatgtcatggttctgtcagcgtgtcgtantctgtatcgcnagcatgatagtcatcgagtcatanacatcatctgttgtagtcgacagcatgaatatcatacactatgcatatgcacgaatctatngtnctcctaaccacctctgactcactgtacgacggactatcatgtcgtcacgtgacgcatgacgcagcttacagtgctgcgcaactcacgacgtgcactncagcgtcagccatntgctatactncatcgacgtgctgatgctgtaatcattccgtcagcgtcgcgggctccancaagcgaccatcgtgctgatatgtatcgacaactgacngctcgcnctcctcntctagcaactgncgtcatctaacgtcgaatctaaatagtcagtatgctgaacaattcagtgtaggagtaaatatgacancgtcgcgatcgactgtatagtgatgcgtcgagtggacgtcgtcatgtctgatgagtagacgancgcgntcantctctantagcagcactancactctagtagcgatagntagtaaatgatcagtcgtcgtaacatgatacgctgcatcgntacctatgataaactgatgatacgan

SEQ ID NO: 3299 - DNA, 1567 bp, Glycine max
  misc_feature (1)..(1): n is a, c, g, or t
  misc_feature (44)..(44): n is a, c, g, or t
  misc_feature (67)..(67): n is a, c, g, or t
  misc_feature (73)..(73): n is a, c, g, or t
  misc_feature (90)..(90): n is a, c, g, or t
  misc_feature (160)..(160): n is a, c, g, or t
  misc_feature (209)..(209): n is a, c, g, or t
  misc_feature (244)..(244): n is a, c, g, or t
  misc_feature (267)..(267): n is a, c, g, or t
  misc_feature (317)..(317): n is a, c, g, or t
  misc_feature (482)..(482): n is a, c, g, or t
  misc_feature (763)..(763): n is a, c, g, or t
  Probeset Number=SeqID_13078
nctcgacgagacatgcagagaaggagacgggaggttgacagagnagctactatagcgacgttagctnccggancggatcgcgctagcatncatatgaagacgatctcacactacagggcacgagagcgagatacgtgcgctgcgctgcgtgtgcgtaacnatgtatcatgacacgagaataaacgcatagcacacaccgtcgcacgttnagtatatcatcagacgtctgcgcagatgctggcangtcaaataatagcgcgcggatancgaagcgagctcgcctccacctcgcgcctcgtatcatccccgtcatacancaactacgcagcgtatgtagtcggagtgatacaccagcggacgtggattcgcgagttgccatgtcctagtcctcataccacactacacgcgcaaagcgctatcctagctgaaagcaattagcgtaggcacggtacacatacatacgctcgactcagtacatacgngcgcgagtagaggagacgagcacagcggaggtcaacatctaaatatgacacgcgagcagcggatatgaaacatcggacgatgaccactagtcgcggatcggatctcctctcccgagcatcgatcgctagcctaatctcgctgacacgccacgatactctttgtatctaagaggccgagacgcgcgtgataggtggagagtcgtagggtgctgcagacgcactagttaagcctgagagagcgtgggtataatcgcccacaccagtcttcgctcgcacagcgngatcgtacatacgtcagtcgcgtgcatgcatacgtcacagtcacgacaacaagactccgcaagcgcgtcctcttattgctcacctgtacatgggtgcggcatcgtctcgaacgtatctaggtcctacatcgtatacggcgcggcgcgccccacagaggaaggcggcagaaaaatatagtctcgccggacagcagagcgggccctcattcgactacacgcgtccgctttcacttgcatcgctcaagcccaccacatatcgtcaccactacgaggcgagcggacctcactgacggcagaacactagaggacgcgtaacggcaatctaagagaggagcataccagaacgcggaggacgagtgatacaaccattgaacacgctactccacgctctcccactagcccaccctgccctgcgtcacgaagcgcagccgacgggccgacgacttagtgggttaccccgctgagactagcacgatcgcccgtcgcggcgagatcgtcacctgcgacgtattatgtaagccgttatccccacattatcattagatcttggcttggatttatcatatggatcagacacactatacatacgcttgactaccgtgttcatgtatcctgcaacacctcgatcgtatgcgtatactcaatatacatgagtaaaggcaagtagtcgtgtcaggcccaacgacgggggaggggggcgtgtgactataagtgaaaaagcgtggaggcccggtcccccatcccaccatctcccgcccccatgctgttgagagactggggatcggaggagagaaaggaaaggag

SEQ ID NO: 3300 - DNA, 2021 bp, Glycine max
  misc_feature (509)..(509): n is a, c, g, or t
  misc_feature (1007)..(1007): n is a, c, g, or t
  misc_feature (1189)..(1189): n is a, c, g, or t
  misc_feature (1364)..(1364): n is a, c, g, or t
  misc_feature (1370)..(1370): n is a, c, g, or t
  misc_feature (1373)..(1373): n is a, c, g, or t
  misc_feature (1379)..(1379): n is a, c, g, or t
  misc_feature (1404)..(1404): n is a, c, g, or t
  misc_feature (1448)..(1448): n is a, c, g, or t
  misc_feature (1457)..(1457): n is a, c, g, or t
  misc_feature (1470)..(1470): n is a, c, g, or t
  misc_feature (1477)..(1477): n is a, c, g, or t
  misc_feature (1552)..(1552): n is a, c, g, or t
  misc_feature (1569)..(1569): n is a, c, g, or t
  misc_feature (1576)..(1576): n is a, c, g, or t
  misc_feature (1610)..(1610): n is a, c, g, or t
  misc_feature (1617)..(1617): n is a, c, g, or t
  misc_feature (1623)..(1623): n is a, c, g, or t
  misc_feature (1678)..(1678): n is a, c, g, or t
  misc_feature (1690)..(1690): n is a, c, g, or t
  misc_feature (1692)..(1692): n is a, c, g, or t
  misc_feature (1725)..(1725): n is a, c, g, or t
  misc_feature (1727)..(1727): n is a, c, g, or t
  misc_feature (1740)..(1740): n is a, c, g, or t
  misc_feature (1747)..(1747): n is a, c, g, or t
  misc_feature (1755)..(1755): n is a, c, g, or t
  misc_feature (1757)..(1757): n is a, c, g, or t
  misc_feature (1793)..(1793): n is a, c, g, or t
  misc_feature (1795)..(1795): n is a, c, g, or t
  misc_feature (1811)..(1811): n is a, c, g, or t
  misc_feature (1815)..(1815): n is a, c, g, or t
  misc_feature (1832)..(1832): n is a, c, g, or t
  misc_feature (1855)..(1855): n is a, c, g, or t
  misc_feature (1857)..(1857): n is a, c, g, or t
  misc_feature (1866)..(1866): n is a, c, g, or t
  misc_feature (1884)..(1884): n is a, c, g, or t
  misc_feature (1895)..(1895): n is a, c, g, or t
  misc_feature (1902)..(1902): n is a, c, g, or t
  misc_feature (1909)..(1909): n is a, c, g, or t
  misc_feature (1942)..(1942): n is a, c, g, or t
  misc_feature (1960)..(1960): n is a, c, g, or t
  misc_feature (1969)..(1969): n is a, c, g, or t
  misc_feature (1973)..(1973): n is a, c, g, or t
  misc_feature (1976)..(1977): n is a, c, g, or t
  misc_feature (1979)..(1979): n is a, c, g, or t
  misc_feature (2018)..(2018): n is a, c, g, or t
  misc_feature (2021)..(2021): n is a, c, g, or t
  Peptide Sequence Number=SeqID_6769
  Probeset Number=SeqID_13079
gacgctacacacgacagagtcgacacgctccaccgctctacgagctcgcggcggacccgtacgtcgcctcgcgcaatacccacttcatcgccgcgtatcgcgcggcggcgcgtcggtgctccacgccctgccgtctcctgacggccacttcttctccctgatagagtatccgcgggcgacagcactcatgcccctatgcgcgttgtcgcccagacgagcagacgcgacgcactatatcctaacgtgcctgtgtgatagccatccgccccacacttcaacagtgaactgctgcctacgcaatgatgtaactgtactcgcagcccggtccgcgaagagccagagctactatatgacacaacatcgcgacacgccgcgagtcgcaaggcgcgaaagtagaatatcggtggtataggatgagtgtcccagttctacgagactgatacatgcgctgagacattcattaaaggtccgaacacaacgcgacgcgagtatgcaactatatattagtngtccacataactagtactcgtcctcaactgagaatagagtggggcgtgacacagccaacacacgcagcacacgtgtagagacaccatacctcaacacacatagagacactacataatacactgcgatacagaagagatcgcttgaatgagagctagtgagtgaagtagataaatatacatatataactctacacaacggacatctaccttgtgtagcagatgacacagtatcatgatcagaatatcaagtcatgcactcgatactaaacgatagagacgcgtagagacgactatggcagcgcgatgtatagtatcgacagtactaatcacactcgatagatcacaacgtgagaatgtacggcagctacgtatgtacgccactgtagcgcggcgagttgtgatgtagattatatttcgtccagcggcgtgcgatagtttgcgctgcacgactcacgacaactccgatcacctcatattatagaccgcaacagccgtatnatactaatcatcgtgtaccaatgatgcctgccgcacgcgccaacttctcacacgcacacagatgctccatacatcgtacgcgtcgccccccaacaactactattcaactcacctgccgccgcgactgcctgataaaccaccagcatcgacgcacaatatactcagtttacatacttcgcagnccacatcgcgcagtagatcaggagcgttacacctcgtgcgctgcactgccacgacacgcatagcacactctgtcaagaaaatcaagtaagcatacacgtagagtgacacgtactacgtcatcgtgtcgtacgctggacacgccacattcgacattacccgcatagctatgattcnacctcnatnctcganaccacccactcgcgcaccagcgacnctagtcactgatcatattatgcgtgtgcatgtaccgccgcatantacatgctnggactcaccgtanatatgancgtgtagtacatgtgccgcgatactagatcgaagtagagcggacgctgatcgcggactgcacgcctgcccgacgncgatgctgtgacagagngtacgantgtctagctcgtagcatgtatgacggtgcggctnatgctanctgtcnctctggcgacttatgtagtgcatagtcaacatccatctactctatacgtaatccncatacgcgcagnancgcgacactgctagtaaactatacgcatcactncngacgccgatctcncgatgcncacgtctncncgccgtcgatccatgtcacatctacgtcgtcatcanangtagtataccaacgantgtntactcatactccagcgnatctaggataatgtgtagcgtangntcaatctcnactgacgatagtctgcanctacgcatcgngatcagncgtcatnaggctgacgtacaacgagctgcatatatcccgntgacgagtagccgtaggnactgcaagngacncanncntgactgcctgatatcgtctcgatcacatgacatgcactncan

SEQ ID NO: 3301 - DNA, 2289 bp, Glycine max
  misc_feature (8)..(8): n is a, c, g, or t
  misc_feature (24)..(24): n is a, c, g, or t
  misc_feature (31)..(31): n is a, c, g, or t
  misc_feature (35)..(35): n is a, c, g, or t
  misc_feature (37)..(37): n is a, c, g, or t
  misc_feature (39)..(39): n is a, c, g, or t
  misc_feature (41)..(42): n is a, c, g, or t
  misc_feature (53)..(53): n is a, c, g, or t
  misc_feature (58)..(59): n is a, c, g, or t
  misc_feature (61)..(61): n is a, c, g, or t
  misc_feature (68)..(68): n is a, c, g, or t
  misc_feature (74)..(74): n is a, c, g, or t
  misc_feature (106)..(106): n is a, c, g, or t
  misc_feature (115)..(115): n is a, c, g, or t
  misc_feature (122)..(122): n is a, c, g, or t
  misc_feature (126)..(126): n is a, c, g, or t
  misc_feature (129)..(129): n is a, c, g, or t
  misc_feature (160)..(160): n is a, c, g, or t
  misc_feature (182)..(182): n is a, c, g, or t
  misc_feature (192)..(192): n is a, c, g, or t
  misc_feature (203)..(203): n is a, c, g, or t
  misc_feature (222)..(222): n is a, c, g, or t
  misc_feature (248)..(248): n is a, c, g, or t
  misc_feature (251)..(251): n is a, c, g, or t
  misc_feature (262)..(262): n is a, c, g, or t
  misc_feature (270)..(270): n is a, c, g, or t
  misc_feature (277)..(277): n is a, c, g, or t
  misc_feature (285)..(285): n is a, c, g, or t
  misc_feature (289)..(289): n is a, c, g, or t
  misc_feature (304)..(304): n is a, c, g, or t
  misc_feature (310)..(310): n is a, c, g, or t
  misc_feature (342)..(342): n is a, c, g, or t
  misc_feature (353)..(353): n is a, c, g, or t
  misc_feature (357)..(357): n is a, c, g, or t
  misc_feature (360)..(360): n is a, c, g, or t
  misc_feature (371)..(371): n is a, c, g, or t
  misc_feature (383)..(383): n is a, c, g, or t
  misc_feature (390)..(390): n is a, c, g, or t
  misc_feature (394)..(394): n is a, c, g, or t
  misc_feature (396)..(396): n is a, c, g, or t
  misc_feature (400)..(400): n is a, c, g, or t
  misc_feature (411)..(411): n is a, c, g, or t
  misc_feature (427)..(427): n is a, c, g, or t
  misc_feature (474)..(474): n is a, c, g, or t
  misc_feature (476)..(476): n is a, c, g, or t
  misc_feature (563)..(563): n is a, c, g, or t
  misc_feature (566)..(566): n is a, c, g, or t
  misc_feature (589)..(589): n is a, c, g, or t
  misc_feature (594)..(594): n is a, c, g, or t
  misc_feature (713)..(713): n is a, c, g, or t
  misc_feature (718)..(718): n is a, c, g, or t
  misc_feature (720)..(720): n is a, c, g, or t
  misc_feature (722)..(722): n is a, c, g, or t
  misc_feature (730)..(730): n is a, c, g, or t
  misc_feature (750)..(750): n is a, c, g, or t
  misc_feature (766)..(766): n is a, c, g, or t
  misc_feature (786)..(786): n is a, c, g, or t
  misc_feature (796)..(796): n is a, c, g, or t
  misc_feature (894)..(894): n is a, c, g, or t
  misc_feature (925)..(925): n is a, c, g, or t
  misc_feature (988)..(988): n is a, c, g, or t
  misc_feature (995)..(995): n is a, c, g, or t
  misc_feature (1044)..(1044): n is a, c, g, or t
  misc_feature (1077)..(1077): n is a, c, g, or t
  misc_feature (1121)..(1121): n is a, c, g, or t
  misc_feature (1124)..(1124): n is a, c, g, or t
  misc_feature (1157)..(1157): n is a, c, g, or t
  misc_feature (1170)..(1170): n is a, c, g, or t
  misc_feature (1192)..(1192): n is a, c, g, or t
  misc_feature (1239)..(1239): n is a, c, g, or t
  misc_feature (1246)..(1246): n is a, c, g, or t
  misc_feature (1266)..(1266): n is a, c, g, or t
  misc_feature (1308)..(1308): n is a, c, g, or t
  misc_feature (1310)..(1310): n is a, c, g, or t
  misc_feature (1345)..(1345): n is a, c, g, or t
  misc_feature (1354)..(1354): n is a, c, g, or t
  misc_feature (1368)..(1368): n is a, c, g, or t
  misc_feature (1370)..(1370): n is a, c, g, or t
  misc_feature (1391)..(1391): n is a, c, g, or t
  misc_feature (1417)..(1418): n is a, c, g, or t
  misc_feature (1427)..(1427): n is a, c, g, or t
  misc_feature (1452)..(1452): n is a, c, g, or t
  misc_feature (1455)..(1455): n is a, c, g, or t
  misc_feature (1616)..(1616): n is a, c, g, or t
  misc_feature (1626)..(1626): n is a, c, g, or t
  misc_feature (1659)..(1659): n is a, c, g, or t
  misc_feature (1704)..(1704): n is a, c, g, or t
  misc_feature (1749)..(1749): n is a, c, g, or t
  misc_feature (1765)..(1765): n is a, c, g, or t
  misc_feature (1791)..(1791): n is a, c, g, or t
  misc_feature (1831)..(1831): n is a, c, g, or t
  misc_feature (1833)..(1833): n is a, c, g, or t
  misc_feature (1835)..(1835): n is a, c, g, or t
  misc_feature (1883)..(1883): n is a, c, g, or t
  misc_feature (1904)..(1904): n is a, c, g, or t
  misc_feature (1912)..(1912): n is a, c, g, or t
  misc_feature (1950)..(1950): n is a, c, g, or t
  misc_feature (1963)..(1963): n is a, c, g, or t
  misc_feature (1972)..(1972): n is a, c, g, or t
  misc_feature (1976)..(1976): n is a, c, g, or t
  misc_feature (2010)..(2010): n is a, c, g, or t
  misc_feature (2020)..(2020): n is a, c, g, or t
  misc_feature (2121)..(2121): n is a, c, g, or t
  misc_feature (2149)..(2149): n is a, c, g, or t
  misc_feature (2177)..(2177): n is a, c, g, or t
  misc_feature (2195)..(2195): n is a, c, g, or t
  misc_feature (2213)..(2213): n is a, c, g, or t
  misc_feature (2233)..(2233): n is a, c, g, or t
  misc_feature (2272)..(2272): n is a, c, g, or t
  misc_feature (2285)..(2285): n is a, c, g, or t
  misc_feature (2289)..(2289): n is a, c, g, or t
  Peptide Sequence Number=SeqID_6770
  Probeset Number=SeqID_13080
ataaatanacagtaatatgtaatngtatatntatntnantnntttatgtatgnatatnntntatatantacttncatatgatacagagcagtatactactgactancaacgcatngtacganctgntcntgagacgtcacgagccagtctaactacgtangtgactggcgtgacgagtagtngggtagctgncacttcgtgtncctgcgtcgcgcgccgtcngtcgcttcgcgtcgctcgtccgcctnatngcgacatacantcaagganagagcgngtagaaangtanctcgcaatctctacncacganatcaagtgcctcctacgtccgcaccactgcgntgcacgactgncatncantgcaatagcgnacatcatcacgnatcacgnacgncnctangctgcgtgacnacacgcgcatggaggncgtagcacgcagtgagatggagctgatactatcgctactaggctaangngagcgagagctgctgtagccagataccatgcacttgacgcctaatgcgacgcccgcactcgaactcgtcagatacactggtcactgnctnctcacgagtagcgtctcagcgtnctatncatcagacactctacgtgatgtgatcgtcgtcagagcatatagcagcagtgtcgcgcgcgcgcgtctcgcgcgccggtgcgcgtgatcgatgagtcgtagctcaaacgcgagctggcgncgagntnancgtatgcnatgacgagtacgtctatcangcgagcgcacgcagancgaccgcgacgagcgcatanagtagggatngtatgctcagagcgcacactactcgtctccatcatcagcgccacatacgtcttcatcgcgctgcatactaccgcgcgcagtcaggcgtcgcacgacgnatgacgtcgggactgcgtggctctgctgccnacgtcgtcgtcagtatacatgcgaccgtggcatgtgtcactggctacatccttcatctccctntggtcantcgctgatatgatacgtcatctgagcactcggacatgagactaagcgcngtatgatgaatgtgcacgactactagcatgacnacgtcgtacatatctatagagcgtagatcagagtctaggttgcnagnagatcactgtagtctctcagctgactaatgatnacgtgtctgttantcgtcgcgcgcagtacgacatncgatgccgactgacgacgtgctcgcacagatgatctgcgacgctatncgcacanacacatatgatgattgaaangactgacacacagacgagacacgcgcgatcacataccaccancntaactgctgtctctcgacagtctatatcgctcacntattatcanaaatcaatagcggncnagctgatacgaggtatagtanagctgtcatacgctagcatatcagtnnctgcctcgncgcgtatcatcacgtccacgtgtgntantatcgagtgctgacacgtacagagtggtaggctacatctgaactcgattcgtctagtcagagagagtgtgatgtttaggatatcagatagtaatctatatgtagacacacgcacgcgtgcgcgggcgttatcacagctgacacatcactaggaccgtctancgacaatgtnactattcgagctgcgcgccgcgcgacagagacnagagtcgtcagcctggagcgctcactgactctgcgtcacgatgcnatgtgtgtatcgtacgtcaccgactgtgaagacatgagatgcatnacactcctggatattnctggagacgaccgcatcagttgtcancacagtgcctgctgcagactcctcgagaatgtcgtatgcntntntactgcactgacacgttgtacgtgcacgccatgttcttctgacatttnatgacgctgactataacgacnatctcgcngccagtgctggcgaacgacatcagccagcacacgtganctatctaacgacnatctcgtgntctntccagctatcgctacatacgatcatcgtagtggnttgataagcntatgatgcgagcatgaatatatctactgacacgtaacgcgtcggatgtagcgcactatggcagcactgtagtcgtgtgagtcgccgaatttatctgctctncgacccacactcgcgactactcatagcnactagcgctacctacggccgtgcgtgtntgtccggtagctcatcgnctgacgtgatactcacgnctatgcacagctgggtcagntgcagtatgactggtagcttgtctgatgtcgcgcactantcgtagcgcttcntagn

SEQ ID NO: 3302 - DNA, 2058 bp, Glycine max
  misc_feature (311)..(311): n is a, c, g, or t
  misc_feature (317)..(317): n is a, c, g, or t
  misc_feature (385)..(385): n is a, c, g, or t
  misc_feature (387)..(387): n is a, c, g, or t
  misc_feature (483)..(483): n is a, c, g, or t
  misc_feature (523)..(523): n is a, c, g, or t
  misc_feature (575)..(575): n is a, c, g, or t
  misc_feature (1015)..(1015): n is a, c, g, or t
  misc_feature (1182)..(1182): n is a, c, g, or t
  misc_feature (1211)..(1211): n is a, c, g, or t
  misc_feature (1367)..(1367): n is a, c, g, or t
  misc_feature (1471)..(1471): n is a, c, g, or t
  misc_feature (1481)..(1481): n is a, c, g, or t
  misc_feature (1612)..(1612): n is a, c, g, or t
  misc_feature (1707)..(1707): n is a, c, g, or t
  misc_feature (1715)..(1715): n is a, c, g, or t
  misc_feature (1792)..(1792): n is a, c, g, or t
  misc_feature (1796)..(1796): n is a, c, g, or t
  misc_feature (1799)..(1799): n is a, c, g, or t
  misc_feature (1820)..(1820): n is a, c, g, or t
  misc_feature (1879)..(1879): n is a, c, g, or t
  misc_feature (1882)..(1882): n is a, c, g, or t
  misc_feature (1892)..(1892): n is a, c, g, or t
  misc_feature (1953)..(1953): n is a, c, g, or t
  misc_feature (1988)..(1988): n is a, c, g, or t
  misc_feature (1998)..(1998): n is a, c, g, or t
  misc_feature (2001)..(2001): n is a, c, g, or t
  misc_feature (2053)..(2053): n is a, c, g, or t
  Probeset Number=SeqID_13081
gagcgacgtctctatcgtcctgtctagagatcttattatatatattcagcacactgtcgttccctgtcgcttctttgttgtccattatgttgttgctgttgctctcctgccggcgcggctccgccacgccgccgtgtccgttctaccacacgcctctttttctctctcgcgccgtcgcgggctatctacgtagtcattctggcatcaaagcatacgtcttcctcctctgttcatatcaggctacacgacacacgtgcgcacatgatcgcaccatgatgtgttgtctaagatgccagggagcccaccgcaangagaangcgaagcgggcgttagtgtgactcaccattaaactctatcttctcgcgccgctgttctctggtactangntgttatattgtatataatgactgtccgcacagacgcgctatccggcgctcgtaattccagtcggctgtgagatatcgcgtcggtcgcgtgatcgtnaagcacgcgcatgcatgtcgataccaagcgaactatgatnatttactcggacaccatcagatccaatggccgcgcactccgacgaatgacgntatgcacggctatacaatcgtggcgccgtgcgctactggaagagggcgtgagtattgatacgatcgcgcggtgtcgggagatgatagagctgagatgcgcgcgatgtggacgagtgactcagcgtcgacgccccgtggcgagtgcaggagaattacattatagatcatcactccacacgacccacagcagctgccaccgacacaagcggcgtcgcgagacgcctatcggtggtagcgggtcgcgaccagacataaggatgagcacggcgtgtagtgcgtgttcgcgtcacgctagcagtcacgcgtcagtgcgtgatatactgtcttaggctacgacttcagatgatcactgtcgcgtgcgtgcagctgtccaggtgcagtcgtcactccccgactgtcgcctcatcggctgactgacacatgccacactgtgcccctgncgcatgtgcgatatcgtgcatggagcgcgagcgtgcggtgcatggcgcacatcgaatcaactgcatggcacgtctcgcactacgactagtcgcgtcgcgcacacgacgtacaccatgagatacgcgtcagataccgactgtgtctagcaattccgtacgcgaactgntacggcgaggtgatgctactgcgtcagcntgagacgacgctgtacgctgtagacgcgtcacatacacagtggctctcacacaccacactgctgtggcgcgcgtcaacgtcacgtgcgacgtcggcgacgcgcgctggatgggtacacggagggccgcagcagctgcgcacacacatctgcaacangtagtctagtggcgccgtcactttcataaatatatctacttcgccgtcaccgcccacccagtctactgtcgacgtctgctgctcgattatcggttcttactgtnatgcgaacanaccgcgtccgcgcgcgccacgatcacgtcatttgtacagacgctaggtatatcgtgtactatcagctatggctacgagactagcagcagactatgtgtcgagtactcgtcgcacgtagtctacactgagtntcactgtgtcacgagcgtggtgcggcatcgagtgcgtaccggagacgatatgttagaatgcgctaatgctgcaatcgcactgagctcacgcgggnctacatgnatgaatctagtcgcgtgcgcgattcattcgatacaggtcgacgcttgcgatcacgtggcgtcgacgtaccagtaatncgangtncacgtgtagctagacgctgtngagtacgaccgcgtcgcgacgctgtcgacgctacgctcacacgcacgacggcgtcgctngancgatagtcgngacgagcatgtacactagtcggtgacgcagtcgtatcagactgtcatgccacggcgacgtngacatctacgccagccgcgacgatgtctgctgtancgaagctgangcnagcgcggatcgatgcctgacgacaatggtcgttctacgactgtctcagcatncgcgg

SEQ ID NO: 3303 - DNA, 1450 bp, Glycine max
  misc_feature (33)..(33): n is a, c, g, or t
  misc_feature (36)..(36): n is a, c, g, or t
  misc_feature (45)..(45): n is a, c, g, or t
  misc_feature (82)..(82): n is a, c, g, or t
  misc_feature (104)..(104): n is a, c, g, or t
  misc_feature (210)..(210): n is a, c, g, or t
  misc_feature (238)..(238): n is a, c, g, or t
  misc_feature (1259)..(1259): n is a, c, g, or t
  misc_feature (1299)..(1300): n is a, c, g, or t
  misc_feature (1369)..(1370): n is a, c, g, or t
  misc_feature (1388)..(1389): n is a, c, g, or t
  misc_feature (1394)..(1394): n is a, c, g, or t
  misc_feature (1420)..(1424): n is a, c, g, or t
  misc_feature (1426)..(1435): n is a, c, g, or t
  misc_feature (1437)..(1442): n is a, c, g, or t
  Peptide Sequence Number=SeqID_6771
  Probeset Number=SeqID_13082
gcgccagccgtgcgcgcacggttcgtctcgatncanatggtactntatgcgtcggctgtgcttcacgttttatcagtgaganacatcacgctgttatggatcantaggcgcgtgtgtatcatacaccacgttatacatctcacgtcgctcgatatttactgtatctacggagcatcagtgtgattatatatgtgtgctcttgagcacatntgtatcgtcataatttctacatataacngtatctacatgtcaaggaggtgagaccgcgatgggacctccctcctacaagaacatctcgcacacacacaccgcatgtacgacgatagactacgaacaagagcataactacacaacaggctcccggaatcacctactcaccacacctcgggcgatgaggctcacactactacacgcgctagagcagtggcacaagcgcatgatagtataacttatctatcatatgagatatttactactgatcatttatcagcataaccacacgatatgagcaaataatgaaatgtagacgcgacagactataagatcatcttatgagcgcagcggtggtgtcgcggtagccggttctgcggttctcttacgtagagacttgtggtcggctcgatctgtttgcgtactctagcatattgtgtctatatcactgtttaccatatctcatactccgcatcgtctattctcgactttcgtctattaactgtcctcagttatatcgtgtgttatatacgtgtgagatgattgtggagatccgctcatgccataacctcgaatattaggccacgctacactctaaatattcgtgtacagagcctaataaatagtactacacgtaaatcaattcaaaatataacactactaatcgtagtagagtatacgtagtgatcgttcggaatcgtgataaagataattatagaactataataacgttgatagacacgagtgtacagtagacacgttgaagcatgtattatttaatattctatattatgactataacgcgacaaccgagagtaacatcagcggagagccggatcaccacagagacacgagaacaacatcaccttatatgactgttcttatctcctactttaaaacaacacgcccacaactcgactcagtgcttcgatttggagcgcgtcggtagttcacctatctgctctcttacgttgactctcctttggtcgatatttggtatcggtctcggcagctggctggctgtttgagggggcgctccgcgcgcgccngcgccacccccctccgcactcccccgccccctctccgctnnccccgaaccgcaccctggcgacggccgcgccggcgccgcgcacccgccgccgcgcagggccggggggcnngcgccgcgcgggggcggnngaccngcgcgggcccacaccaacgggccggnnnnnannnnnnnnnngnnnnnngggaaacc

SEQ ID NO: 3304 - DNA, 1537 bp, Glycine max
  misc_feature (10)..(10): n is a, c, g, or t
  misc_feature (15)..(16): n is a, c, g, or t
  misc_feature (18)..(18): n is a, c, g, or t
  misc_feature (141)..(141): n is a, c, g, or t
  misc_feature (151)..(151): n is a, c, g, or t
  misc_feature (205)..(205): n is a, c, g, or t
  misc_feature (443)..(443): n is a, c, g, or t
  misc_feature (541)..(542): n is a, c, g, or t
  misc_feature (544)..(544): n is a, c, g, or t
  misc_feature (549)..(549): n is a, c, g, or t
  misc_feature (570)..(570): n is a, c, g, or t
  misc_feature (649)..(649): n is a, c, g, or t
  misc_feature (708)..(708): n is a, c, g, or t
  misc_feature (732)..(732): n is a, c, g, or t
  misc_feature (1061)..(1061): n is a, c, g, or t
  misc_feature (1173)..(1173): n is a, c, g, or t
  misc_feature (1373)..(1373): n is a, c, g, or t
  misc_feature (1390)..(1390): n is a, c, g, or t
  misc_feature (1454)..(1454): n is a, c, g, or t
  misc_feature (1535)..(1535): n is a, c, g, or t
  misc_feature (1537)..(1537): n is a, c, g, or t
  Probeset Number=SeqID_13083
tttttctatnttttnntntattgtttgctctttctatagctttctagtgtatgttgctggcgaggttaccgtgtgacgcgtactctcgtaggaattatgatgtataggtgcatcgtctcgttctcacgtccacggcgctcncgactcttcncatcacttcaacgcctccctgacacgctctcctcgtgctcgtactctgtctacncttgcggtactgatcacacataactcaatgacgtctaatgagtccatgcgtcctatcacacgctgagatagacgacatatgatgtcatactatatatataacaagcgtcgcaatcgcgtacatatgtacgcgaagtcactgagtgagcgatgtatgctgtgagtgtcgtcgcgtcgtcgcggtgatcgtatgtgctgcgtgcggtagacactcatatactacttcaacgttaattaanttagagctatcgtcatcggatcgacgaacgagagacacgagtgcagtactgtgtagtggatgagagattgagacagtatgagatagacaggagcatcnncngcganaccgcacggagtgagacgaanatgtgtgcatagtcagtaagatacacaactgcctaagagatcctcactatcatagtagtatagtactagagatgagtangcatatatactgtctccatcgtcggtacgcgattggcgtagtagagacaagaccagtgnagcggtatgctgtgattgacgaangcgtcacgtgcgcggatgatgacggattgatatgatatatatctatgatgcaggtatcgatgcagcacgtgtcagtactctgtacgtgtgtgcgtcgactatagtatcatcatattgatgttgtgcgacacgcctcacgagcacgccgatctcctcatcattattgattacctcagttcgtgtgtcataaatagaacagcaagcgacgcgtcgcgacgtcgattctcgtcttcgtctcctacagctattatattctactacgtactcgtatgatgtgggcgtaggtgtggtagcacgacgtcagatgtgtactcacatatctgtgtttnacactatactttacactgatactacatacactccctacctgacttgcagtgacgatagttcgcatagactatctctacatataatattcgtttatatcacataccattcacngacgattctgtagtggtgctcgacatcttggactcatgatattgtatgttcgtgctgatttttgtcgacctacagagactcacgcgtcacagtatcctgtcgtgagttgaagcaaacgatgaacgtagaatggacaccatattaatcaatagtgagcatacatacatactcaagacgatacattctgtcgcgcacgtgtntctgacgtgactgtgantagtctgtcatgttatgtgagtcagcgtttgatagagtgtctcggacatgtgatcctgacatgntgaccctattgtgattagactgacgtagcggactccatcggcccggtcgcgacgaagtatgatcatgctccgtcgtgatangn

SEQ ID NO: 3305 - DNA, 1798 bp, Glycine max
  misc_feature (36)..(36): n is a, c, g, or t
  misc_feature (46)..(46): n is a, c, g, or t
  misc_feature (63)..(63): n is a, c, g, or t
  misc_feature (76)..(76): n is a, c, g, or t
  misc_feature (96)..(96): n is a, c, g, or t
  misc_feature (98)..(98): n is a, c, g, or t
  misc_feature (110)..(110): n is a, c, g, or t
  misc_feature (115)..(115): n is a, c, g, or t
  misc_feature (186)..(186): n is a, c, g, or t
  misc_feature (216)..(216): n is a, c, g, or t
  misc_feature (257)..(257): n is a, c, g, or t
  misc_feature (264)..(264): n is a, c, g, or t
  misc_feature (330)..(330): n is a, c, g, or t
  misc_feature (558)..(558): n is a, c, g, or t
  misc_feature (569)..(569): n is a, c, g, or t
  misc_feature (810)..(810): n is a, c, g, or t
  misc_feature (941)..(941): n is a, c, g, or t
  misc_feature (954)..(954): n is a, c, g, or t
  misc_feature (1475)..(1475): n is a, c, g, or t
  Peptide Sequence Number=SeqID_6772
  Probeset Number=SeqID_13084
ggtcgtgtattcacaactcatcatcgacagatacgnaatctcctancgtctatacaagacatncgagtacgtgtgntaggcaggatgatcatacgntntgcgtcatacgntgtgncgacacgacgcgacgacgtatatcagctagtcgttgctctaggtatagcagacgcgagcacgagagtagtntcaactcgaacatacatacgcgcaataganctcggacataactacataatactctacatatcgcgctccgnaatggtnacgtacttcacctgcgtcctcatcagcatcaccatctctaggtataagtgcaccgcgacgattatnacacgtgtgaggtctcatcatattacacatcacgcacacgcatcctcctctcggtcccgagacgaccagcattgatatctatgagcagttggtgtggatggtgcttaggatctagctatacatcgacatgtcggccactctcgatagatatacactcgggtcataatcctcatatggcgtcgctcaatgcaggcctcacgtggactatgcctacacacagtttaggtncagtataacancatcacgtcgtgactcgcagccgaccatatgtgcatcacgcactgcactgacgcatcaaatcatgacatccttaagtagtggtcatagaccacacatcccacatagtacacatccacgacgcctaacgctactcgtgtcaccgctcggatagaaacgcccttacctgcaccgctctactgtcgcacgactcttttacaacataaggctgagacgtcgtgacagagagacccgagcacgacntcagtagtactcaatatataatatcattggagcgagcacacaacgtcatgtcgtcgttacagatcatgaaatgccaactctcacgtagatatgctattaacaatcaacaattacaccgtgtaggctatcanactactagagacntacacacgccgtcgccttctcgctctccgcgactgaggcacaggataacacactagcaccactctcgatgacacacaacacttccgagactgtgctaacacaacgacaccacaggcagtgcacacgatcgcctcgactcacatgtgcagtcaataacagagcgcgagtcttcatacacacattctgcgtacactacgtaattattactactcgtaggagctgccgtgcggcgagtcggtcattcggcgttatcatctgatcgatcaatgtcacgacggaattgagaagagcgctatccgatgcgtaaggcatagttcgattcagctctagtgtgagtcactcatactcgcgtcggagaatagacatgatctaacccacatatactatactttacgaactatccgagtacaatcggtgcgccgagctagtatcgcgaacagacatctatcagtattgagtgcggcggacgaagcaacacacccggctatactcacgcatagcatcgatcgtatcgcgcactntcttcgctatctccaccaccgaacgatgcgcgcatgcgagacaagtagactgttgggctgcgtgagctcacatgacagatgtataataattgctcgaattctgagtcaggtatagttagtaagcacactaaatataacgagatatcactagtagaaccatcatagccgatggcgtgcgtctctatgcgatacagtgtagtgtagtagcattactccgtctcatagggcgcgtgtcgcgtcatgctctcgacgcagtgcgctcacctcgacatgtccgcgtcggccggcccatccgacactcacgacgctgataacacgtctac

SEQ ID NO: 3306 - DNA, 1769 bp, Glycine max
  misc_feature (1)..(1): n is a, c, g, or t
  misc_feature (3)..(3): n is a, c, g, or t
  misc_feature (64)..(64): n is a, c, g, or t
  misc_feature (120)..(120): n is a, c, g, or t
  misc_feature (142)..(142): n is a, c, g, or t
  misc_feature (247)..(247): n is a, c, g, or t
  misc_feature (296)..(296): n is a, c, g, or t
  misc_feature (333)..(333): n is a, c, g, or t
  misc_feature (418)..(418): n is a, c, g, or t
  misc_feature (501)..(501): n is a, c, g, or t
  misc_feature (515)..(515): n is a, c, g, or t
  misc_feature (599)..(599): n is a, c, g, or t
  misc_feature (929)..(929): n is a, c, g, or t
  misc_feature (1226)..(1226): n is a, c, g, or t
  misc_feature (1259)..(1259): n is a, c, g, or t
  misc_feature (1555)..(1555): n is a, c, g, or t
  misc_feature (1694)..(1694): n is a, c, g, or t
  Probeset Number=SeqID_13085
ntntgtgcggctatatgtcgtgcgactagatgagtgatcgattctatacgtaacatcatcgctntctgggcgagtcatgcagcgtgatattgcagcactgtcgcgaagatcagagcgaantagatgtgcatacgcactactntatgtatctccgacccgtcgcagcgaccgccgtctggtcagactacattcgtcccgtatccaagtttcttgtatcacgatttcatttctcgaggttcggcgtgtncatatacgcgacatatgtgcggcgcagtgcgcggcacaccatcattctnactctgtgagtggtatgcgttactaatctggcaggcncggctatatgtatgcgtggcgtgcgggcggtcatatgtggggagaagtgattgggacgacagaatatattgttgtacatattcanatgagttgagcgcgcacgcaccgtcgctagttatggtgaggttagataccacgcgtcagacacgcgtattcatcagctcgtanagtgtagactatanagggcggtagtctggcgacgaaagacacagctgcgcgcgtcattatcatagtagttgacgcaagagatcgtactacacgcgcgntgtatctcatgagatgtgtatatatatgtgtcgatatatcgagggagcagcgtctatagattcatgtgatagagagttgatatgtatttttatctttgttattcatcgcgtatgcgggtaggagggggccacgtcatgacgcgcatataactcatctcaatagaaagataaactggtgatcgcggataatatggtgtagcgacgggagctcacgacggatatcaggtgcatgcgcatcacgagcagaattcgggagcgagaaatcgacggcgatcgtatatataaagcacggtcgcggacgtgaatactagcgtagagtaggtgtcagancagcatacatagagacattcatctactctgcgctcgcgcggagaagggaattataaaataataaaaggagaaaggtgagggatcgagcacatgtcgcagatgcttcctgtcgttcagacggctccagtaatctcgcgtcgtgacgatgtgctcgcgtcgctttaatcctccgtcccattacattgttctccgtcactccgataattgagctacgcctctcgccggcctatcgaaacattaatcccaaagtgcgtccgtacgcccatataatgtaataaatattagagaccgcgcggncgcgctacagcagatatatcatattataaaaanatgcataaactgcgcgcagataagtaaagatagctcgacacgcatcgccgcgactgtaacgttctatatttagaatactgtccagtatacgtaagatcagggctgcgtcatggtgtcatggcgagctgggggcgatatctatactcgggtagtgcgtgttgagagtggttggaatgtggttgggcgagggtggtggtggcggacaattattattagagctggtcgcagacagttgcggtgcgatttatgtccgcccgccgccacttattctgttacagggggcctctaacgccccngcccgacttatatgaagtggaaggtagagagtattagtatagagtatgtttgtaattgtaaaagggggggaggaggagaagatgtgggcgtggcgatttgggtgttatagtcaaactgttaaatacaagcacaataatngtgtatgtgtcgaaacacgaaagcggtaaagggtgagaggtgtgatagcatatagacaatagggggggagtataa

SEQ ID NO: 3307 - DNA, 456 bp, Glycine max
  Peptide Sequence Number=SeqID_6773
  Probeset Number=SeqID_13086
aagcggccgcggaggggctcggctgccgagccgccaccagggggcgtaccggcgaggggctgcgtccaccttgccgtcgagtgcctcctcccctccggccgccccgattccctcttcatcctccagctccagcccaaccccgacaccccggacgtcaggcgggtcttccgtcgcctagccaacctcctggcccctcggcgcgatccccatccccggctgacaccgcccttcgcgccgttgaagaggccttctcccacctcttggagagcacctccaccagcgccggtttcgctcctgctgctcccggcggcgtttccgtctcagagatgtgctctggacggtctgcccccactgctgccatgtgcatgagtacgagcgcatgctggtggggtgtttgtttgggtgctcgaacccctggttcatgtgcgtgttcgtggctacctagcccgcgcggct

SEQ ID NO: 3308 - DNA, 1491 bp, Glycine max
  misc_feature (9)..(14): n is a, c, g, or t
  misc_feature (18)..(20): n is a, c, g, or t
  misc_feature (82)..(82): n is a, c, g, or t
  misc_feature (84)..(85): n is a, c, g, or t
  misc_feature (247)..(247): n is a, c, g, or t
  misc_feature (652)..(652): n is a, c, g, or t
  misc_feature (1210)..(1210): n is a, c, g, or t
  Peptide Sequence Number=SeqID_6774
  Probeset Number=SeqID_13087
tcatctctnnnnnntctnnnaccctcatcacctcatatccatcctctccccgcggtccttgacggatgcggtccactacccntnntctttcacggacccgacctacacccattcatctcgtccttccactgatccttctgcatacctcaaccccccgccctcccgcagaacgactatgagcacccgtatcaggtggcgggtgcaatcatgaatacactcagtcttgtgttattccctcctcaaaccntcaagactatcccactgcccaaactccaccgttctctctacgcaccgcccttctcttccctatacacctcatcctcaatcacccacactcatcaccatcgctgtccactcgcgtacaaccctcgttcttatgctgatcgtccacgggctcaaagacagcgacaacacggcgagaaaaccaccaagagagagaaagcgccaaacactctctgccccccaccctcctacggtgcacaggtagctcgatgcctaccacgcacgcgcacctcgtcctcgtctcgcctcagcccctcctcctcgcgcgggtcttaatactacgaacgcacatgcaatatctactcgagagagcgggtgccgcgttaaataaccctcccgcactactctcacacctatgcccaccgacagnattagcgctttgcattagcccatatcaaccccccatcgcacttcttcccttccctgcctctctccaccgccctgactgcgatggacgcgggatacaacagcgggcgagaacgtcgacgccgcttattctatagttaagcgcgacgacgcacgcgccgcgcactgattatcccgcactcccttatccgctcttatcatctattcctggtagacccatccatctcaatcctcgaattactcccccccgctgcttcaccctccacatacacccccgcatatccccgctgcgaggtacttctattatatcatagctatctccacaattctcatagccgacgcacgaccgctcgaatccacatcgcactcgtcatgagcatgtgagtgatataagtgaagagcacacccacgatcgactaacgtaatctccgccgacaatgatgtagatcgtggcgtgtatcggccacacgaacaacccatccccgcatctatccttcacgttcgacgactacgatacacactgtgataccatgccgcgcgatcgtgcactggagctacactnatagcgacattctacgagcagctgcgcgcgcacgacactattcatcacatgacttcactactctcgccgcgcctctgctctgatcatgtaaagtacgccgcaccacgactgctactaatatctgtaggtcatcacacatactaatgacgctacacatggccgtagatgacactatataaggagagatgtgtcggtcgccgcgcaccatacacacgtcctcagcgcccgatagcgtagtacacatctacacgcctacgcatgcgatataattacatgctccg

SEQ ID NO: 3309 - DNA, 430 bp, Glycine max
  Probeset Number=SeqID_13088
gaccgaggcggcgaaatccatatccccgtccgcgtatctcgcgaagtgggactacccacggccgacgaatataatcttgttaagagagtgggtccccaaagtggccgcggatgcttacgtagcacccaacggggaacgcgacggccaatgcaccggctgataaagagcctccgtctggcccggttgcgtcctccgcagcgatctcaacaagatcagcctaggatcctgctcctacgttcacgaacgctccgttattcacgctgctggggcttctccccaggacttccaactgacactttactatagagggatccgactaatggattatacaacctggagacgtccagcactattgaagccagaatgcattatggaggagcactccacccttatggaaagttcattgctggagacacgggaatcccttgaa

SEQ ID NO: 3310 - DNA, 1835 bp, Glycine max
  misc_feature (34)..(34): n is a, c, g, or t
  misc_feature (582)..(582): n is a, c, g, or t
  misc_feature (797)..(797): n is a, c, g, or t
  misc_feature (960)..(960): n is a, c, g, or t
  misc_feature (1195)..(1195): n is a, c, g, or t
  misc_feature (1257)..(1257): n is a, c, g, or t
  misc_feature (1300)..(1300): n is a, c, g, or t
  misc_feature (1362)..(1362): n is a, c, g, or t
  misc_feature (1367)..(1367): n is a, c, g, or t
  misc_feature (1376)..(1376): n is a, c, g, or t
  misc_feature (1387)..(1387): n is a, c, g, or t
  misc_feature (1417)..(1417): n is a, c, g, or t
  misc_feature (1423)..(1423): n is a, c, g, or t
  misc_feature (1430)..(1430): n is a, c, g, or t
  misc_feature (1435)..(1435): n is a, c, g, or t
  misc_feature (1460)..(1460): n is a, c, g, or t
  misc_feature (1527)..(1527): n is a, c, g, or t
  misc_feature (1535)..(1535): n is a, c, g, or t
  misc_feature (1542)..(1542): n is a, c, g, or t
  misc_feature (1603)..(1603): n is a, c, g, or t
  misc_feature (1621)..(1621): n is a, c, g, or t
  misc_feature (1665)..(1665): n is a, c, g, or t
  misc_feature (1676)..(1676): n is a, c, g, or t
  misc_feature (1685)..(1685): n is a, c, g, or t
  misc_feature (1693)..(1693): n is a, c, g, or t
  misc_feature (1723)..(1723): n is a, c, g, or t
  misc_feature (1743)..(1743): n is a, c, g, or t
  misc_feature (1756)..(1756): n is a, c, g, or t
  Peptide Sequence Number=SeqID_6775
  Probeset Number=SeqID_13089
tccacaactctcctccatcactcctccccttaanttagaataagagaatgatacgtacgatgcgtcgcttgtcgcgtgcacgtgtggcgcgagtcgcgtgtgatgagtagtgtttgcacatgcgtaagtcgcgttgtctctcgcatgatcgccaaatgtatcaccactacacaagcacaatgatatataatttctagaaaaccatatcacacaacacgcttcatgcttgtgcgtcatgtttgttatatacccgagtagcaggatgaggacagtatagacggatgttcacatatatcatcgatgcttaagaacgccgtgtgctactcacttttattgtatgtgtatatatgtatcatagaccatgtaactcaaccgcgccatgttgataatatctctatgcacgcctaacatgattgagctgttgtcctgctcttacgaaattgagcgcactacaattaagaagaaggcggccttgacggtatacgcgtcttgctatgcgtcgcgcgtgggtctccgctcagatgaggtgaatgtggagctcgaagaaacgagtacaggtagtgtgttaatcagacgtagatnttgccaactacacccactgacaatttgtaacaacaacatacacgtaaactgctatatggtaatcgattctggctgactcgtaccgtgtgcggtcggtgcgggttgtcggcccgtagattgagagtgtctcacatactaacgcaaatgagcatgtatagtacgtccgtctgagaagtgcgttatctgcccgttagttcgtcatactaacacgggancagcagacggacactctctctcactattacttgtcgagccgtctccacacacattgtgtgacgatgcgtcttcaccaacgcgcacgcggatgtgtggtatatctttgtatacgaccgaatggcgtgtataaagtccgcatgcctcataatattgtagtggatnggagagcaagcgttgcgagtagccgatatacgtgaacgctgagccgtactgatatcatgtacacgagcggaccgactacacagaccacgaactcgtaatgtctgcgatcaaatcacgatcactacgtcgtccactgatcagctctcagtactcacagacagatctctgctcatagtctccatgcctgcgtcttatgtgcgatctcgtcatctacttcttgacacttcacatagtnatcctctcctgcgtcgtgtcatatcacgatcaacgctctataccacatatgagcagatcgangtgcacgaatgtgtcattctctccatcctcctctcacgtgttntgtattcaataagatagacatcactataatatgatctcgcacgtacgcttcctatacttganatacngctgctctntatagatactntcatcgactcctgtcagtactagtcatatncatgcncccgctntcacncgcgctgattggcacactacgtcgncgtctgctcgcgcagtcgtagatatcgcgctgaatacgagccacagaccacaggacgttgagtccanctcagcantatacgncaagtgtgacgacgtgacgtatatgagtatatatactgatgtaatagtacgcgcgtagatntctcgactacgtcacagntctgacatacgagatgcgacgcatcaggtaggtgcacatgacantgctacacgtngcgtccacncgcctgcngacgactgttgtagcgtcatacctgacagnagatgggctgccgttgtaanctgactacggcgnagacgacccacacagcgatcttagcatctgtcgtcccttgacatcggctgtgatcaatgacgatcccaatgcatgaagg

SEQ ID NO: 3311 - DNA, 1467 bp, Glycine max
  misc_feature (14)..(14): n is a, c, g, or t
  misc_feature (41)..(41): n is a, c, g, or t
  misc_feature (52)..(52): n is a, c, g, or t
  misc_feature (84)..(84): n is a, c, g, or t
  misc_feature (102)..(102): n is a, c, g, or t
  misc_feature (113)..(114): n is a, c, g, or t
  misc_feature (178)..(178): n is a, c, g, or t
  misc_feature (188)..(189): n is a, c, g, or t
  misc_feature (191)..(191): n is a, c, g, or t
  misc_feature (196)..(196): n is a, c, g, or t
  misc_feature (198)..(198): n is a, c, g, or t
  misc_feature (260)..(261): n is a, c, g, or t
  misc_feature (349)..(349): n is a, c, g, or t
  misc_feature (353)..(353): n is a, c, g, or t
  misc_feature (365)..(365): n is a, c, g, or t
  misc_feature (425)..(425): n is a, c, g, or t
  misc_feature (464)..(466): n is a, c, g, or t
  misc_feature (488)..(488): n is a, c, g, or t
  misc_feature (529)..(529): n is a, c, g, or t
  misc_feature (563)..(563): n is a, c, g, or t
  misc_feature (704)..(704): n is a, c, g, or t
  misc_feature (1045)..(1045): n is a, c, g, or t
  misc_feature (1380)..(1380): n is a, c, g, or t
  Probeset Number=SeqID_13090
ccctgtgagatcgntcattacgtggcgcttggattgatacntgacgtgtggnggagcgggccggcgcgtgtcgctactgggacntaggcgagcgtgctcgtntgtgagtcatnntatacacgagcatcgcggcggcgcgtgtgcgtgtgttgttgtgaatgaatgtacacattcaccnccgctgtaanngngcggngntggtgtttaatgtgtgggtagcatctcactcgcggatgtcaagaagtacagaagtcaaacanntatctttaagcataacgaatctacagatcttggcgactagacttctccctgcagcgatggtttgtctccggcctttatgtgtgcttantcanctttcgagtagngtcgtgactcgcgcgacaacgtcccacctaataagtagaattgataccgcccgttgctcngccgtccgtggcgcgcggattgagcagtgtcggaagatnnnacgcactcaattgagagtgttnggtgtgaacatcgggtgggtgcttcgcgcgccgagcggtgnggttcctatcccccatattatcccgcgtagacgngggggcagtgaaacaaagtgcgagcgagcgtacgcaaattatttataaacgcgcggcggagggtgcgcgcaagacactatatcgaaccaaacgcacacacaccatcatagacgcggcgctagcgtccatgtgtaatatggngcgggtggtgccgcgccgtgctaaagtagtggatgaaaagagtaatctcacgggtgcgatataagatagggcggctccccttctaggtatacaggcccgtaacgctatgtgtgagagtgcggtcggtcgggcgcgccgttcgcactgtagaatatataagtatactgtcctgtatgccgccggttaggtgagtggcgatatcactacaggtgcagatcaatgcctcttgtcgtaaactaacataaagagaaagagggggggggggcgttgcggggcgtgaggtacatatgagcaaggtatgcatagtgcaggcgtgaatgctgcagatgagtcactacagnaccgcagcgtgccgcgaggggcgtactcggatcaacgactgcaatgcagataatatcgcgggcggacgatcagcatctctctaattaattgtgacacacgtgtgatactatacacgatgcgaacacacgtatcattatctactattgtggtcgtgtcacgtgtaagagcggggctgcgtcaagagataacgagccggatcagcattccgtaccggccacggtcctccctcgccgcgtgtagtggtgggcggcggcggcgtgatatatgggttacgaattatgattttcgaagtgagtgcgcggccgcgcacgatttcgcctcactttgtcgcctntgtaggtcggttgtaatcacggttgtggtgaatggagcgttggggcgagagaagacggcgaacggtggagatcattgtctaccacag

SEQ ID NO: 3312 - DNA, 1362 bp, Glycine max
  misc_feature (1)..(1): n is a, c, g, or t
  misc_feature (6)..(6): n is a, c, g, or t
  misc_feature (12)..(12): n is a, c, g, or t
  misc_feature (27)..(27): n is a, c, g, or t
  misc_feature (36)..(36): n is a, c, g, or t
  misc_feature (48)..(48): n is a, c, g, or t
  misc_feature (61)..(61): n is a, c, g, or t
  misc_feature (86)..(86): n is a, c, g, or t
  misc_feature (334)..(334): n is a, c, g, or t
  misc_feature (831)..(831): n is a, c, g, or t
  misc_feature (911)..(911): n is a, c, g, or t
  misc_feature (992)..(992): n is a, c, g, or t
  misc_feature (1074)..(1074): n is a, c, g, or t
  misc_feature (1076)..(1076): n is a, c, g, or t
  misc_feature (1146)..(1146): n is a, c, g, or t
  misc_feature (1182)..(1182): n is a, c, g, or t
  misc_feature (1260)..(1260): n is a, c, g, or t
  misc_feature (1331)..(1331): n is a, c, g, or t
  misc_feature (1335)..(1335): n is a, c, g, or t
  misc_feature (1342)..(1343): n is a, c, g, or t
  misc_feature (1345)..(1345): n is a, c, g, or t
  misc_feature (1352)..(1353): n is a, c, g, or t
  misc_feature (1361)..(1362): n is a, c, g, or t
  Peptide Sequence Number=SeqID_6776
  Probeset Number=SeqID_13091
ngaggnagggtnaaccgagatgcatantcatcaganaacagcgagcangagcgacgtaganggagagtcgcgcgtcacgatcagancgcgcaccccgcatctatatttgtgaatggtcacgatatgaattacgcgtcttctcgtggtgatatctactaatatatgtcatatgatagcattgttcgtagaggcagctgtctctaggagcgtggaaggagcgtgatgtgatgagagcgcgatatatagaatttaagagagtgtgcgccgacgtgacctcgcgagggtaactgcgaggcggtaggcttggtatatgatgagcattgtgatgccgtcnaactcactcgttagtgacagtgattgtgaaggtaggcatgtggggggtgaaccaataacaacgcgacgaggcggataaacatcacgaagtttgtgtaattgtggcgataccgtgagatgatcagtccgcggagttttgtgttttatagagtgactagaagtctagtacacacatcaaccccgagggtggagggcgagagtagtgatgctatgaaaggttctcacatgctatgaggagatgtaaagtgtggtgtattgcttttttcagtgtacggatataggtgtgtcgtaagataaacgaccgggactcaggtgaagcgtgtgtcgcgttcctccggcgaacgcgccacacatacacaccaccgcagcctccgtgaagtgtgtgttgacgtacggggctgtgattctgttcaggagttcctatttacactttttgcgcgcggttgttgtatcaggctacacccgacaattcttgaggcacaaatacacaaggcagtnggaagagtagttttgtcgacggattgagataggtattacgagactcggagagaagagagaaagatcaagcgcatcagtcncgtagggcgctgatatttcatcaagcgcagagcagagtgtatgaccaatgcaagatgtatagtgtatacgtagtatgtgtnatttcctaaggtatataatttgtagatctccgcacctccctccacctcctataacgtgtggaggcgcgcgcgagcgcagcgncnacgtgagctagaagcgtcgctactggatgcccgtcgagataacgagacactctaacctcgacacggccancaggaggggagtacctggcataggtagtactagtancgcgcgcgccgtgcgctcgacgacatgatgggtgaggtgccgggccgcacgcggtggtggtgtgcttattctggcgcnccctccccctctctctacacctgtgcgcgcccccgtgctatacttcctttatcccacgtgtgaccgcgcgncgcncacaccnncnaaaaaannaaaaaaann

SEQ ID NO: 3313 - DNA, 627 bp, Glycine max
  misc_feature (627)..(627): n is a, c, g, or t
  Peptide Sequence Number=SeqID_6777
  Probeset Number=SeqID_13092
aagaaaagagatcgaaccctaatctaggcaggaagatgatgaatttggggttgaagatgatgaggaaccttggatctgggtgtgcgaagtttggacgcagtgagagatggtattgtgtttcgagacgtgaaaagatatccttctcgacacctccagaggttaccttctcgacgcctccttctctagttagtctcctgtttacatccttcttcgggtatctatggtaccaaacaaaagctgcttcagaacaggaacgtctctgggatgttctgtctgaaaagagaaaccagattaggatcctgtcgcgacaagacgagtccaagcgtaagaaagtaaaagaggcagaaataaagcttattgaaaaggcagcaaccgtgcttagtgaagaaatccaagtctaatgtctgaagtctctatgtattcaatatctctctctctatgttaatataagttggtatgcagtttgtggtttcactgtcttctaaaactgatatgtaataagtttgctacttattagagaggcataatttatatatatgctagtgaaggaatttgatgtttttttggattctattaagttgtttgaaacaagtctctgatttaacattcataaattgaagtcgggtn

SEQ ID NO: 3314 - DNA, 596 bp, Glycine max
  misc_feature (295)..(295): n is a, c, g, or t
  misc_feature (304)..(304): n is a, c, g, or t
  misc_feature (316)..(316): n is a, c, g, or t
  Probeset Number=SeqID_13093
tttttcccccccaacccaaacgctgccaacaacaacactctctctacaaaattgatggtcccaccgacgagcgggtgtcggaatcggaggccatgaacggtggcgccaccaccgccaccttccgatccatcctcgacaagtccctcaaccagtttaccgaggatgacatttctcagctcactcgcgaagactgtcgcagattcctcacagcaaaggtatgcgtatgacttactggactgatcgcgagcgatccaacagtcatttctctgaaagcgctgctggaacttccgacgantgatatctncatctcctcttnctgcatgaatcacgtaaaatggtccatcgttatctcaggggatttgaatgaacctcctcttcttcggccaagggtccggaacttaaaagacccgtttttcagggtggggaaaattttaaaatccggcactgtggggaaaacctcccggaaattaaggccccccccccccggttgggccccccggggggggggacaaagggggttttttgggaaaaaaactttttctttgggggaaaggggggggttttaaaaaacccccccttgagagacaaattttttg

SEQ ID NO: 3315 - DNA, 537 bp, Glycine max
  Peptide Sequence Number=SeqID_6778
  Probeset Number=SeqID_13094
cggatctgaggcgcttgtctcctttgccgttgctaccagtgctgccttccccgggctaatcaaggggcaagaaattgatcacagcccacgggcaaatgttgcctaactgatggaatgtgactttgaccaaagcatatgcctttctcccagcaccttaatgcattatgctcaaagctctcttttctgcttgcagcctcagcgtgatacatacacgctactatctccttctgattcatagctggctgtttggataccagggttctaccttccctgctcaacatatacacagttttcttggcatcttcccaagaatttcacaaagtattctgtcttcattcccgaggatgatattcgtaagaggaatatcagtatagaggaaaggcttggtcagataccccctgagcaagtgaagatcatgagagaagaggtcattagtctcattccaagactagtgtatgctgatcctcgctccaaattagaaactcttaaagatgcatttgatgttgcggtgcaagcagaaattgacaacgttacaaa

SEQ ID NO: 3316 - DNA, 414 bp, Glycine max
  Peptide Sequence Number=SeqID_6779
  Probeset Number=SeqID_13095
agtgttttcaagaaaatgggccaaagaatatttaaattcattgtgggtggagcgcccagatttgagcttaggatatgccccaagcttactggcaagctgaaaagggaagttatcctaggcccgccaagtattgatgatcctgcccaatataccccgaaattgaagatgctgccagcccaggacctttcattggatgatccccaaatatgacgatgtcccccccttgaaaactggaaaaagatcttctgcttcccaaaaaaacgggtgggacccaaagggtttattcatcccatggaccaaattctttggacatttgacccgtgggaaagccaaccccctgaatgttaaactgggcaaaaattaggaattgttcattggataaagccaattttaaattttgaaaaatcccggggc

SEQ ID NO: 3317 - DNA, 565 bp, Glycine max
  Peptide Sequence Number=SeqID_6780
  Probeset Number=SeqID_13096
ctgaggttgaaattgacaccctgactggagattttcacaccagagtggcaaacgtatttttggatctaggttattctctgaatccagcaatagatgttggacagatcgagggagcttttatgcaaggtttgggttgggtagctttagaagaacttaaatggggagatgaagcacataaatggatcccgtctgggtgcctttacacatgtggacctggagcttataaaattccttctgtaaatgatgttcccttcaaattcaatgtctcactcctgaaggtatgttcctgaaccctgaacaattatttttttttcttttcttgtggtaagtggacgatgcacatgaaaatgattccattatgctacatggcccagtggcctagtagagtcatgagtgcaatcgcagacgtaagagtattgggtgttcacattttctttttgttatttatcagaacacactgctacctgtttatctttagcttgttcgtgttaatttccaaaaattgctttcacatttccttgaaggcttgacctcattctcacatccgcaccactctgagatggtc

SEQ ID NO: 3318 - DNA, 1539 bp, Glycine max
  misc_feature (1)..(1): n is a, c, g, or t
  misc_feature (84)..(84): n is a, c, g, or t
  misc_feature (171)..(171): n is a, c, g, or t
  misc_feature (222)..(222): n is a, c, g, or t
  misc_feature (337)..(337): n is a, c, g, or t
  misc_feature (486)..(486): n is a, c, g, or t
  Peptide Sequence Number=SeqID_6781
  Probeset Number=SeqID_13097
nagataattgcgagtcgggatgatggatgtaatatcaagacttcgtacactgcagacgcagaacagcgcgccgtcgcgcggcgngacgagattatgtagcccccatgtgcatgactagatatcagatatgatgacgtatcgtcgtcagagcatatacgtttctgtcgcgantagcgcggcagaagaagtggatgtagatctcaggtgtgttaggcgtgcctngatgcatatagcgtagtgtcgtacgagtaccgctctcgattggattttgtatatggagggcttgtcatatttcgcagatgtgtgatgacgtcgcggaccgtacgtgtgcgacagntacttgatagcggtttataatggaactacgcgttatgcgttgacactcctcacaggtaggctcttctgacggtttatctatggcttcattgcatattctactagatatttgctcctcgtgtgtgtgaacgacgtccatgggatagactntgcgtcacgtacctgtcgacagcattggacgattgcgtcagaacggagtggcacagtcgcgctgatagagatggcgtgtggcgcccgacgcgatccggtagtggaattgatgttagaaactttccacatcacactcagcgaaaggacgttccagagtagacgggaacatctggtagtgttgcggatgtgggtcgtggcgacaccacgaagacagcaatgttgtggtgagtgtatggaaatgtatgagagtcgtttcaatggctgatatacaggacgtgtagcgcggtagtcggcccacacggtgtgttagtctactcgttcgttggtgagcagactaggttaaatgaggcgcgcactatataaagatgtcggagtcaccacaacggttgtgggtcaggaggactagagagacggcatccgcatcggcgaggctctctgtgatattggctgataatcgccagtcgatgttcgtggggtggtggcagagggagtcactcacacgtcggaatatgggacggtggataggcgttcatggcacactgggtaatgtggtgggaaggggaacgagcggagccgttatcggtagagagcttggtatatctgggggggaggcgcggctacacgattctgggaggtcagtagaacccatcacagtgcgactgagatatcgcgttcttggagaaagacaatcatggcttaattgccgttctgctgattgtaccgagaataagccaacgcgatgtgaatggtcgcagaacatacaaatccaccgaggccggtgcgcactgtggatcaatggggcgtgccgtgaggtgagatcagccgctcgactcgcgggagacgaatctggagtcggtcgatattagtgaggccattttcgggagacactatcatctccagtgcgcagaaagattgtgaggtgacataagatgggcgggggagggcaggaccaaagaccactcagactccaaggtggggggcgccggcaccctcaatatgctaagtaccacaatatccagagtgggcgaggtgggcagagagtgaggagggggg

SEQ ID NO: 3319 - DNA, 1510 bp, Glycine max
  misc_feature (20)..(20): n is a, c, g, or t
  misc_feature (30)..(32): n is a, c, g, or t
  misc_feature (38)..(38): n is a, c, g, or t
  misc_feature (46)..(46): n is a, c, g, or t
  misc_feature (53)..(53): n is a, c, g, or t
  misc_feature (56)..(56): n is a, c, g, or t
  misc_feature (113)..(113): n is a, c, g, or t
  misc_feature (187)..(187): n is a, c, g, or t
  misc_feature (672)..(672): n is a, c, g, or t
  misc_feature (706)..(706): n is a, c, g, or t
  misc_feature (955)..(955): n is a, c, g, or t
  misc_feature (1057)..(1057): n is a, c, g, or t
  misc_feature (1146)..(1146): n is a, c, g, or t
  misc_feature (1167)..(1167): n is a, c, g, or t
  misc_feature (1251)..(1251): n is a, c, g, or t
  misc_feature (1327)..(1327): n is a, c, g, or t
  misc_feature (1362)..(1362): n is a, c, g, or t
  misc_feature (1392)..(1392): n is a, c, g, or t
  misc_feature (1497)..(1497): n is a, c, g, or t
  Probeset Number=SeqID_13098
ggggtggggtgtgttgtttnttttgtcttnnnggcggnagcacggngcggcgntgnctacctccactcctcctttctcgcatccagcacgcagagccaacatacctcaccacntacaatattataaaaagtcgactgaccacataccgtacacatagggggcagagatgagtagggctgaggagatnatatttatttatgatatagtttgtttggttggcccccactaataccatccaggcccggcacgggtgaggttgatgtatcttggtacatctactcattctatatatgaagctaggtgagagcgatgtagaatattatattactatcaattttaagttgaaggaagagaaagtgaggagaaagagatggagtgtaggtggacggataggagcgaacagtttcatgatgttaatgatggaggaacatgtacttaaggttgtatcgtgtatgacctcttgagttatatctcgtctatgcaccggcgaggtatggctgataggcgtagatgtagagagataacgacagaaatagtaaaagagagaagacaaagcagtaataataaatgtagatataatacactctatgtgtagtgtatgtatatgcagagaagataaacgatacttatataaataaaaagagagaaaaaagtaaagataaaataaaaacnatcacaatatctatgaatatacctctacaatgcngccaaccaccacaccagcaccccgcgactacacaaagtgagtcgagctgcgaccggccacacacacacgcacggaatatctcgctcatacgctcgtatatacaatacataagataggctgatataatgattatatacactcttgtcagaagtacagcggaagcaacacacaccacccccgtcccccacaacagcgtggtggtgagtatgtactgatgcagctggccgaccgctactgcgcagtaacacncatacacgcgatacaaattaggtgtatattaatgttatatgatatcgcgcgtagatcgaacaactgaacacacacacactcttctacagtgagtatatattntgtagcactgatgctttctgctaagtacgtatcacctcgcgatcacgcgcgagccaccgcggactcctgatgtgtagagtggcgtcatnatcatggtgtgtcgcatagcngcgatgtgcgttcgtcgggtgccgcggccacgcacctcgtactcgcccagcgcccgacgtcacgcgtgcacataccctctcagnagagatgcgtgattctgtagatacatcagtcgagtgctccgcctacacatacgcacgcgtgcaagacatacgacgncgcactaacataaaccagctcacacgcgtgtgtgnccgtgacgcgcgtgtatagcgtcagtccancttctcagacagtcgatatgacagatacgtagcacctctgtaccacacgctgcacacctactagaactcatgagtagcgcacgcatgcggtctcactaacgtagnacgtactcgagtg

SEQ ID NO: 3320 - DNA, 1482 bp, Glycine max
  misc_feature (1481)..(1482): n is a, c, g, or t
  Peptide Sequence Number=SeqID_6782
  Probeset Number=SeqID_13099
atgaaacttgcttttgttcccaattttctcaaattgctttcggttttcgttctgattctgcaaaatcatggagatggagcgcatcgttgaattccctcacacatacatggatcagacccccgagaaagagagcgcgtttgggctgggacatcgctgaggtccccaaggtaaacaatctccatcctaaaatgtcagatctcgtgtttttttgaggttgttttatgtctcttgttgtagatctggtggattttgtgtattttaggtttgtttggttcaggtaaccttgcttcttttttgtctcttatgcagatacaggtttcaggttttttctaatcaatttttgtttaattaattgatctgttaggttattgattttttttttgttaattttttatccgttttttttctaacgatttttctgtaatttttgttcctggtgcagattttttttataattaataattaataatacctgtttatcccgataaagattttgctgttatattatggttatattttatattttatgcctggtgtgatgatttgatgtttggtttagtgtactagaattcttcttatcttagcccttgttatttttctgtgatgatttgtgattggggcaagtgcataggttattttccttttaactttaagtggtgcatgtatgggtgactgtgtgtaggctcaggtaggattgttttgtggacaagaggttgagaatatttcaagctttgctccttcagaacatccccctagttctctgtttaagggagttgctcgaaatggttctcccccatggcgagacgatgacaaagatggccattacatgtttgagcttggagataatttaacttctcgctgtaaatacactttaccatcattaagaagtttacattcaaatgtcatggccgagtttgctttaatttttcttttagttgaaaacggatttaatggacaattttaccatttgaattcctacacaatatgcattatctctccctttactttcaaacaaggacttaattttaagtattggcaagttggcaacacctttaataatcctgtttcagctttagcaagcaatttagtaataatattgtacatgttctttgatgtagaaccattttgggcgttggatgctctaaaatggatcttgtggttggtttcattggctaggctggcattatttacactctgttgatgtgattacagataagatccatagtaaaatgggcgaaggaacttttgggcaggtcttggagtgctgggacagagaaagtgctgggtttcttttactagtttaattagtttcctttgaagattttgctctgatttcagttcttgaaactcaccggttgtaatgatcaatgtgttagacccgtagtttatcaagtatagcattagcaggagatgtttttctggtgtgctttgttttgtttgctaaaccaaattggtcgccataatttcaacggatttcttcnn

SEQ ID NO: 3321 - DNA, 361 bp, Glycine max
  Peptide Sequence Number=SeqID_6783
  Probeset Number=SeqID_13100
agattgttttgaagtaggtgattagtagcttggtcaattaagatttgtaatgtagaaaaaagacagcataggaaatgtaagtggtaggggcttaatggtaggcataaagttggtcactgaattagacaacaagacatccgaaaaggctgaaacggttgtcgtgtttgaaaaactcaaagagcttggtgtgctagttgggaaagtagaaattcatggcaatgttttcaggatcaagccaccaatgtgtttctccaaagatgatgcagattttcttgtgaatgccttggattattctctataaaagttgtgagctgattgtgcatagcatccaatgaaatattcgatattgggaccaaattaa

SEQ ID NO: 3322 - DNA, 613 bp, Glycine max
  misc_feature (31)..(31): n is a, c, g, or t
  misc_feature (364)..(364): n is a, c, g, or t
  misc_feature (613)..(613): n is a, c, g, or t
  Peptide Sequence Number=SeqID_6784
  Probeset Number=SeqID_13101
tcgagtcagctacgtagtgcccccccccccnagatatcagtctagatgtcaaggggtatccttaaggagaaaggtcaaaagcttctagcagctgtctaccttggaggtcaatattttgatattcaggactagtagcctaaatgcttgagatgggttgtgttattcgtctaatgcccattattttgctatttgtaacaagctgaagtgcttaagcttgagggagagtgtcagagtattaggattactaagtttcagtgttatttgcctgggcttgtagtagttttaccagtactagacacaatttctagtataaatagaagtattggattgtggtattgtatggcagctatatatcaatttcagnatattagttatctttctatctttttcttcttccttacctgaaccttatatttccaaacgatgaattgctaatagtttattcattgttccatatcatttactcccaatagtctggcatgaatccggcccttgcgtacgttgtgtcagtcatcactttgcatattaacgtcacttccgccatccccgccaccccccccgctcccttccgccgctccccatctttgcccttctatttccttctctctctatn

SEQ ID NO: 3323 - DNA, 1382 bp, Glycine max
  misc_feature (1)..(1): n is a, c, g, or t
  misc_feature (6)..(6): n is a, c, g, or t
  misc_feature (26)..(28): n is a, c, g, or t
  misc_feature (43)..(43): n is a, c, g, or t
  misc_feature (47)..(47): n is a, c, g, or t
  misc_feature (97)..(97): n is a, c, g, or t
  misc_feature (100)..(100): n is a, c, g, or t
  misc_feature (185)..(185): n is a, c, g, or t
  misc_feature (264)..(264): n is a, c, g, or t
  misc_feature (459)..(459): n is a, c, g, or t
  misc_feature (545)..(545): n is a, c, g, or t
  misc_feature (568)..(568): n is a, c, g, or t
  misc_feature (653)..(653): n is a, c, g, or t
  misc_feature (1063)..(1063): n is a, c, g, or t
  misc_feature (1189)..(1189): n is a, c, g, or t
  misc_feature (1231)..(1231): n is a, c, g, or t
  misc_feature (1331)..(1331): n is a, c, g, or t
  misc_feature (1334)..(1334): n is a, c, g, or t
  misc_feature (1347)..(1347): n is a, c, g, or t
  misc_feature (1370)..(1370): n is a, c, g, or t
  Probeset Number=SeqID_13102
naaaancccccccccttgtttctcgnnnatctttctcaatcantcgnggagaaaccgcgaactctgcggtaacatgagtgtcgtcgcgcccccacgntcnacggcgcccgcggtacagtcggctgttatttataaaacctctgcctcttgctctcctcatacatacctctcgcgcgaccaccaantcacacagccgcgcttgcgctaaatactaacacctcgcgcacaccccgccgccggagatgcgtgtgcgcgccaacgacngagcccccacctattccttcgcgtactcacacactccctcctccgtgcgctacacaaatacttaaaatataaacactagacgcgctgagagcatcacaactctgtctcgtgcgtgtccactctaccacgcaacacaccaatatatctctcgtacactacacacgcgtcctacctcaaccaccaccttgccccttngtcttctccgcacttcttctctgtctcttctctatctctatcacccactggttgccggtaccaatccacaccaacaaatatgcgangccactatcatagtgctccgccncagcgcgaccgcggccaaccaccactacacacaccccgcctgctactctatattggggtggtggagattatatcggtgatataanaatattatgggtggaatatataacaaacaccacacaagcggcaacactcacagcgcgcgtcgcttccctacatatcacactgcgactctcgacagccctgcgtgtcgcctcctacttaccctactcacacttctcgctgccttcctatcattctcatactactcatattctccctctgcctatatacaacttgtataactagctgcgctctcgatgctggcccaccccctcaccacccactccccaccactttcctcttctcctccgtattcaaatatacttggttgtgttgtctcaccacacatcctcgtgctgtgtcgttgtacatcctactgccatccctcttattcgtgcgcttcgcgtgcgaacggtcgcggctctaacaaccatgaatctctgcgcgctccctnggaccctctccttatcctctccactccctctaccgcgcactacatactgacgccatcccttctcgcgcgcgtgcgctgcgccacacacacatcataacatcatccataatgcgaggcgcggctccngtactctacacacaatacgcgggcgacgactagaaactgtancgacatctccgcacgcgtgcacacaacaattccgcctcctcgctgcgcgctctacttaccctcactccactctcgcgcgctcgcccatgcgcctacaaanacncactcctctccgngtgcgcgtccgctctctctacantctcatctactt

SEQ ID NO: 3324 - DNA, 753 bp, Glycine max
  misc_feature (1)..(152): n is a, c, g, or t
  misc_feature (753)..(753): n is a, c, g, or t
  Peptide Sequence Number=SeqID_6785
  Probeset Number=SeqID_13103
nnnnnnnnnnnnnnnnnnnnnnnnnnnnnnnnnnnnnnnnnnnnnnnnnnnnnnnnnnnnnnnnnnnnnnnnnnnnnnnnnnnnnnnnnnnnnnnnnnnnnnnnnnnnnnnnnnnnnnnnnnnnnnnnnnnnnnnnnnnnnnnnnnnnnnnnaaaaaaaaccccatgtttttaaaaaaaagggggggtgcctgggtttgccgttattaccccagagggaaaccccttttttgggaaaaaaaagccctttattttttaaaaaaaatttttgaaatttgtaaatccgaacaagggggggaaaaaaaaaaagggggtctttgtgcttagaaggttaaaacaaatgttttagccttggaaaaaggattatggtgcaagactacgtgaaacaaaggtcattttgcataaacttgggagtgaagatggatccatttagaaagtggggcgaccgccgtccggaagaaggaatagttccagaataaggtgatttatttaattaattattcttatttgggggttggctttggtttatgccctgttttaagggcattgccttctatatatccggaaatgaaggaaatattatagggaagataagattggagtagggcgaatgaattcctgggtactgtaattaggttagctgttgctaacccctcttattttatgagaaatttttgcccgagttgtggagttagatactgaaaactctccctttgttatttgttaaagaaaaggaggtttctggttgtttctn

SEQ ID NO: 3325 - DNA, 1789 bp, Glycine max
  misc_feature (1)..(1): n is a, c, g, or t
  misc_feature (27)..(27): n is a, c, g, or t
  misc_feature (82)..(82): n is a, c, g, or t
  misc_feature (129)..(129): n is a, c, g, or t
  misc_feature (138)..(138): n is a, c, g, or t
  misc_feature (184)..(184): n is a, c, g, or t
  misc_feature (186)..(186): n is a, c, g, or t
  misc_feature (188)..(188): n is a, c, g, or t
  misc_feature (372)..(372): n is a, c, g, or t
  misc_feature (429)..(429): n is a, c, g, or t
  misc_feature (431)..(431): n is a, c, g, or t
  misc_feature (441)..(441): n is a, c, g, or t
  misc_feature (494)..(494): n is a, c, g, or t
  misc_feature (506)..(506): n is a, c, g, or t
  misc_feature (510)..(510): n is a, c, g, or t
  misc_feature (531)..(531): n is a, c, g, or t
  misc_feature (547)..(547): n is a, c, g, or t
  misc_feature (552)..(552): n is a, c, g, or t
  misc_feature (578)..(578): n is a, c, g, or t
  misc_feature (583)..(583): n is a, c, g, or t
  misc_feature (595)..(595): n is a, c, g, or t
  misc_feature (662)..(662): n is a, c, g, or t
  misc_feature (684)..(684): n is a, c, g, or t
  misc_feature (727)..(727): n is a, c, g, or t
  misc_feature (821)..(821): n is a, c, g, or t
  misc_feature (823)..(824): n is a, c, g, or t
  misc_feature (871)..(871): n is a, c, g, or t
  misc_feature (1022)..(1022): n is a, c, g, or t
  misc_feature (1048)..(1048): n is a, c, g, or t
  misc_feature (1131)..(1131): n is a, c, g, or t
  misc_feature (1159)..(1159): n is a, c, g, or t
  misc_feature (1321)..(1321): n is a, c, g, or t
  misc_feature (1508)..(1508): n is a, c, g, or t
  misc_feature (1647)..(1647): n is a, c, g, or t
  misc_feature (1687)..(1687): n is a, c, g, or t
  misc_feature (1725)..(1725): n is a, c, g, or t
  misc_feature (1761)..(1762): n is a, c, g, or t
  misc_feature (1769)..(1769): n is a, c, g, or t
  Peptide Sequence Number=SeqID_6786
  Probeset Number=SeqID_13104
ntatacatgtctcgatgatatatcacntcaatgctgtgatcgcacgaggcgtaagtctgcacgatgttagtattgctcatcnagcgacactccgcgagtcagcagtatgagcgcgctcgtcgcggagangacgagctncaccgagagatctagcacacacagcgcgatatagcagtgcgtctgnananctaacgagtaaccagctgacgagcagtcgacactctcgagtagtgtccgtctcctactcctgtcacgtcacacacacagtcatgtgtgtgtcgccgcgtctagtctctcgcagacaccgtccgtatgtgatcattgaccgtgtactcccttcctcaccgtgattctcttaagctgagtgcaganctagcacattatagacacatcttacgataagctctgcgagtggtagcgcgatacatntncaatgcctgncgcatatcgtcgtaggtatgtatcacgtatgacatgcgatgcgacgacgacancacacgcatctntcgnatcactagttcaacgaatttngagcatctcgttcacnacctnatgatcgagtgtgtactgaaggtcgngctangcgaccgtcgtntgctgatagaagctatcatgtatcgtgtgaatgggccatgaggattatcatcattgagcagtcgtgntgagcaggcgcgggctggcgangcggtgtgctgagtgacactgcgtatagtcatgcctcgttgtntgtagtcgcaccgcgtcgacgagtgccacgtacgactcacaacgcacgcagatgctatcacagcgcgcatgagcgacggatcaaaagcgcgcancnnttcacggcgcgagtcagcgctgctaacgcactcatcgactcgtacgnccatcacagccacctgataaaccaacagcatcatcgtcgtgcgcctcgccgtagagctctccatattcaccgctcaatgactgagaggctcgtacctgtgtcagctcgtcatcgacgtcgaagagacggtcgtgatgagcggatcggtcanatccatatcattctactcctctctcnacttctatccacacctcggtgtcgctacagtcgacgcgcgaagttgtcgtatagatgtttcgtatgagaccgcggtgctatgntgctactcgattagcggaggcactacanttcatgtctgcagaccacatatactatattcgtctccgtccacacgcgtacgaaacactgcctcatgcctcctcatgcagatcgccactcatatgacgaatgtatatcaatgctgcgtacgcagtgtgaatattgctgtgattagtgaataaatatgctcgnagtatcctcatagccacgatctgcgcacatttgctcaagtccacgtatcacacgcacaataccctactctcattctctctctctcgaactcagtaacgtatcagcaagagcacgacctgcgtgtaggggttgaatagtgagatgtcgctcgtggcggaagaaagagcgatacatgaaggtgaaaganaagacgtatagtagagatcattcacgcgtaacttcttcgcggcgatactcagtctcgtagtagatgatatgactgttacactagtagtcgcacaacagataaagtaggagaggctagtccgggtcctgggacagaggcnggggtcgcgcggttatgatctatgacagatacgtgagaanccagcacctctcaaccactgcagagagaggcgagaggnagcgaagcacacgccctatagattcaatagaaaggnnagtgagngggggaagagaggggtaaaa

SEQ ID NO: 3326 - DNA, 1784 bp, Glycine max
  misc_feature (1)..(1): n is a, c, g, or t
  misc_feature (25)..(25): n is a, c, g, or t
  misc_feature (27)..(27): n is a, c, g, or t
  misc_feature (187)..(187): n is a, c, g, or t
  misc_feature (191)..(191): n is a, c, g, or t
  misc_feature (193)..(193): n is a, c, g, or t
  misc_feature (218)..(218): n is a, c, g, or t
  misc_feature (252)..(252): n is a, c, g, or t
  misc_feature (287)..(287): n is a, c, g, or t
  misc_feature (355)..(355): n is a, c, g, or t
  misc_feature (426)..(426): n is a, c, g, or t
  misc_feature (461)..(461): n is a, c, g, or t
  misc_feature (463)..(463): n is a, c, g, or t
  misc_feature (465)..(465): n is a, c, g, or t
  misc_feature (519)..(519): n is a, c, g, or t
  misc_feature (527)..(527): n is a, c, g, or t
  misc_feature (615)..(615): n is a, c, g, or t
  misc_feature (674)..(674): n is a, c, g, or t
  misc_feature (678)..(678): n is a, c, g, or t
  misc_feature (686)..(686): n is a, c, g, or t
  misc_feature (688)..(688): n is a, c, g, or t
  misc_feature (691)..(691): n is a, c, g, or t
  misc_feature (700)..(700): n is a, c, g, or t
  misc_feature (703)..(703): n is a, c, g, or t
  misc_feature (750)..(750): n is a, c, g, or t
  misc_feature (755)..(755): n is a, c, g, or t
  misc_feature (757)..(757): n is a, c, g, or t
  misc_feature (873)..(873): n is a, c, g, or t
  misc_feature (897)..(897): n is a, c, g, or t
  misc_feature (964)..(964): n is a, c, g, or t
  misc_feature (1132)..(1132): n is a, c, g, or t
  misc_feature (1157)..(1157): n is a, c, g, or t
  misc_feature (1469)..(1469): n is a, c, g, or t
  misc_feature (1528)..(1528): n is a, c, g, or t
  misc_feature (1630)..(1630): n is a, c, g, or t
  misc_feature (1665)..(1666): n is a, c, g, or t
  misc_feature (1668)..(1669): n is a, c, g, or t
  misc_feature (1671)..(1672): n is a, c, g, or t
  misc_feature (1680)..(1681): n is a, c, g, or t
  misc_feature (1684)..(1693): n is a, c, g, or t
  misc_feature (1695)..(1696): n is a, c, g, or t
  misc_feature (1704)..(1705): n is a, c, g, or t
  misc_feature (1737)..(1737): n is a, c, g, or t
  misc_feature (1758)..(1759): n is a, c, g, or t
  misc_feature (1770)..(1780): n is a, c, g, or t
  Probeset Number=SeqID_13105
ntagatgtatgaggttatatcgatnanttttagtgagattagtgttgcaatgtatagtgtgccatgtgtagtgaggtgctagtcacgcatggcgcagtagagagtcagttattgatcggcagagtcgcgtgggcagcgtgttgtgattgatgagtacggcagattgctgactgcgctagccgggtgntgtntnaatgtattcgctactttgatgatantttactatagagcaacgatagtcatagtaatctntacagtatcaatgtgtaatggaatatcagtgtctntctcgtaagtagtgtcgtgtgagacgtgtgtggatgagtcgcgttcacataacatgcacccgcgcgcnggtgctcgttcgcgtgctgacacagaagagtatatgagttggtcacatatgtccgcgagcgtgtgaggagngagagaggatgaaaacgccagagaggcaagtagcngnanatataaggtgcaggagggcgctggttagcgtatacagataatgcaagtatcgantgtagaangagagagactatttagtgtcatagtgtatctgcgcatccgtgtgtatgttgtgtggatgtgtatcggtcgtgtgtgtgagggtgtgtngagacacacatacatatatcatcgctcgcggcgtgatgtggagcagatagagcgtggtnggtnggtgcgcntnggngaggcgcgnaanacgcgctctatacgtattcatcgacatatgtatacacagatcgcgtnacacnanctgcatgtgcgcactcttgcgtcagtcgacgttcgcgctttctaccatgatagtcacgcactattgagtctcgctgtggtgctctcctgtctacggtcactctgtcgctgcgtctnctcatcagtgctcacaatactatnctgtgttatttactgcccattctctcgcctcatagagcatgagtgtgcagtgattattatagtgatncgtgacacgatgatagtatctatactgttatatactttgatgtgtagtctgcgttgatggtgttgctagtagacacttgtagatcagttgtgtgtatatacttcagttgatatgcatgcgcgcatccctcatcatacatacagactatctctctatatcatcttatcnatcactctctcttatcgaccacgcngtcgtgtgttgttctgtatggaccagactacacggacacgccttacagtgggcactccgcacgcgctctcgaacaccgtgcggatgcatcttgatggcaggcgagatgtctccgaccgctagaccgatcacagcgaacatagtgagaagaagatcatagagaatagagaaacataaactaatgacataacagatacatacatgatgttatcgtgtgtacagcacacacagagacccgaggagtcaatcacgtctcacacgagtaagtctagagtgcaggattgttcgttgataataggagagatgatgagantagtggtgtggcgtgacagagatataacctcagagacgatgccagatactaacacgagncactcacatctcttctataagtgtagtagaggagtgtgtgtgtgagtgtggaccacggtacactctaatcacttacaccttacgtaatatgttctcgtgatngatgcgtgtatatattattgttgtctgtgtgtgtnntnngnnggtgtttnnttnnnnnnnnnntnngggggggnngtgggtgcgtgaagacacctccgggcgcgcgngagacagacgagagaggaaanncaacacaaaannnnnnnnnnnaaaa

SEQ ID NO: 3327 - DNA, 1536 bp, Glycine max
  misc_feature (63)..(63): n is a, c, g, or t
  misc_feature (1011)..(1011): n is a, c, g, or t
  misc_feature (1288)..(1288): n is a, c, g, or t
  misc_feature (1442)..(1442): n is a, c, g, or t
  misc_feature (1501)..(1501): n is a, c, g, or t
  Peptide Sequence Number=SeqID_6787
  Probeset Number=SeqID_13106
tttattcccctctgtccccctcccttttcccccccctctcctccacccaaacctcaccacccncaactcaaccccaccgccctctcacctatcctctccgagaagaaagctgaataccaaggacctacaacgctatttccttccagcatactactaacatggattcaatataggcctcaaaacacaaaacaaacaaaccaacaaaaccaacaccccccaacaacatataaacaaaccaacaacaatatacccacaaataactcatacatactacaatcaccaacaatacatatcatctctatacaacacaatcatttatactccccacttcaccacactaccaaacacacaactctaccacatcacaacaacacgcaccacacacaccaaatcatccatatccaccactactcgacaaaacccaccaatcctacaccaaccctccacatcacacacacctcacacacacacacaccccacaccacatatccacccactaaccccccccaccccacatcatcccctccactaccttaccacccacccccattcactcccaacaccctacccccccccccccccaaccacaacacctatccctccaccccacttaatcaaccaatactcctcccccaccatacaaccactaccctcaatgtacaatcacacatacccacacatataaaaaacccacttctctatactcataacacctctcctgataccacatctcacacactcacttcctctcacaaaaacccccaaataaccaacaacttctccgacccacctactcctcacctcactcatcatcaaccctcacacccccgcctacactaccaaacaactactcacaccacaacattaccaccctaccactcctccctactatccgttcataatacacatatctacaccttaccacacatctcacccaccacacatctaatcaaacctctacacaccacctccacatacggagacatactatcatcgccatccaccctcacnaccactaatcacaccctcaccatacaccacaacacaacaaatccaccaaatacaacgacaccacacctcaccattcttctcactatcacattctctactctacacatctactcacctctctacgcacaccctctacataccactcccaactaacatcaaatatactctctctcctaccactaccatcttcattcactcccacacccgcactctacctactactccacaacgagtaatacatctacaaacacacaaacatccattcacataacagaantcacctatcactatcaccacttgacacctccattactccaccctacatcaactcacacacctaccgcactcgtactcacgatctacaacactccatctacacaccatctctgcacgattcactcacacaaatatacacttactcgctcgctctnctctatctaaataaaccttacctcacactcgactatttactaccagtccaacactctanacaactccacaccacatatatttacactcccctct

SEQ ID NO: 3328 - DNA, 1385 bp, Glycine max
  misc_feature (1)..(1): n is a, c, g, or t
  misc_feature (1370)..(1370): n is a, c, g, or t
  misc_feature (1372)..(1372): n is a, c, g, or t
  Probeset Number=SeqID_13107
ncccccggcaacatctcatcgcctcgtatcatactacgccatgggtgggtgagtggttgcgtagagtgagcacgtctacgcgaccgctagttctctgctacacagatgcacaacaggtcacacagtcacactgctatacgtggcacagatacgatttatatgagttcggtcgtgtacattatctgataccgaatgggggtggctgtggcagttccgtagtaaggatggtggtgttgtatacatgtcgacgccgtagtcctcgcagacccgccgcctctttccgcgccatcatcgcgatgacattctttactatcgtacgatgtacgtgctctctccatacggttttgtccggtgcggacgcatatctcgacctagatgtcaagacgcgacgctcgcatggaggaagtaggcggaagcggtgaaacctcatattggcggccgcgcctgcttcatacattcgtcactttctgtcatctgtctgccgtattcgtgttcaatactaatacacgtcttaatgttcggtgttgctagtatgctggctcattaatgatgtcagttacatatgccgctcctcgtacgctctatatatacactggtcaggtggtaacgtctgatctaatattatcactctacacgcctcctacacgtgtccaactccaacccgtgctaaaggcgcctatagcgcgtgggccgcggagtgcagctctcgcgctgatccgctgggctctgtaccgcatatctccgtcggccctatggttcgcccgtttcttcctattaatcttctgtcgctggtcacttcaggcagaattgctactcgatctttatccttctacttttctccctctcccacttaattgtttctacataacatatctcgatattgaattgttagttggggtctgtatgtctgtatataggggcggtggtacggagtagcggtgtggtacgggggagcttagtgtgatcgtgtttagactgatatcatcccatcattacccactgcgtcgttgaagtgaccgctctttttttccttattaactttatctaatttcttcctccggcaccgccgctccgtcatactagtataaatctgtatatacgaacaaaggaaagggagcatagtgataagttccgtatcgtgttgtgcggtcgcttgagtgcagcgggcgggttcgctcgacggcgcggtgtcgtagtgcatccaactcccaggaaaaatgattgttgagggagtgtaagtaggaggatctatacatatgtcgtctgtgcaaacggtgtagaaggaaagataagcggaggcaaatgacggggtggggtccgagcattaaatagcacacagcggcgcggtttgacggcgttgataatggatngngggtggggtggtg

SEQ ID NO: 3329 - DNA, 1577 bp, Glycine max
  misc_feature (267)..(267): n is a, c, g, or t
  misc_feature (402)..(402): n is a, c, g, or t
  misc_feature (457)..(457): n is a, c, g, or t
  misc_feature (794)..(794): n is a, c, g, or t
  misc_feature (850)..(850): n is a, c, g, or t
  misc_feature (971)..(971): n is a, c, g, or t
  misc_feature (984)..(984): n is a, c, g, or t
  misc_feature (1005)..(1005): n is a, c, g, or t
  misc_feature (1009)..(1009): n is a, c, g, or t
  misc_feature (1128)..(1128): n is a, c, g, or t
  misc_feature (1223)..(1223): n is a, c, g, or t
  misc_feature (1249)..(1249): n is a, c, g, or t
  misc_feature (1289)..(1289): n is a, c, g, or t
  misc_feature (1292)..(1292): n is a, c, g, or t
  misc_feature (1294)..(1294): n is a, c, g, or t
  misc_feature (1296)..(1296): n is a, c, g, or t
  misc_feature (1380)..(1380): n is a, c, g, or t
  misc_feature (1477)..(1477): n is a, c, g, or t
  misc_feature (1492)..(1492): n is a, c, g, or t
  misc_feature (1524)..(1524): n is a, c, g, or t
  misc_feature (1561)..(1561): n is a, c, g, or t
  Peptide Sequence Number=SeqID_6788
  Probeset Number=SeqID_13108
gtgtgggtcgggagcccgtcgcccgttgtctccgcgcgctaacccaggagtataacgaatttgcgcgcgacgcgtatgcgcccaattaccgaccaagcgctccgcatattcataccgagtacatatattacatgtgtatgtgcgctgtagctgtccgctcataggtgagtgcgtctcgcgtctgcgcgcgcgacgcgagagggttatcgtatagtaatgcgcggccgcggacgccgtacacacgcgtgccgccgcgtatgatattantggctgagtgacgagatgagcggatagtcgaatatcagcgctcgcattctcgctgacctcgtacttcgctccatcagttgtctgcgtaccatagacaagacggccatataatctgcgctatatgtaagactgtcncgatgtgaaattgtgtatatgcgacgcatacgttatatggattgtggttgtgcgnataggctcggaacacgctgtgacgagggccgtgtcctgagataaacatgactagtgttaatctgtccccatatcacgatactgtgataaagaacgcgacacacctcacgaccgttactcgtatattttcacgcggtcctatatgattctcgtgtgttcagacgcgccgccgccgtagtgagcttaatatagaatctatatagcacgctcacaacccactaatcttatcctgaagcgttgtgctgcttatggatgaccgtctatcataacggtagccgacaatcgtgccgatccctcgatcgcttatattcggagtgcgcatgatacgcgggcgtcangtcgcgatgtacgtataagatatatccccgcgtgtcgacgattgatcatacctcgnctctcttgatcgcagatcatcgtcgtgataatatgatagtgcacgtgtatgacgccacatcatctacgataccgccgatgtgctcggctaatgtagaattacgttactcattatagcgtgncagacgggttacntgttgttagtatatgagcggngcgntgatacacacgtaccgataatatacactatatatgcaggcgcgcgactatacgtggtgtagctcacatgatgtatgatgtatgacacgcgcacccgtgtgatcatcacgatctgtgctnaatatattgttcgtcgttgtttcctactacacatgcatcagcgtcgatatatacagagtctgtgtccgcatacgatgtacgcgtagacatgacantcgcggcccgacgtgctcgaagggancgataatagacgattatagagaagcatgatgataaatgancgngntncctcacgtcacgacagctgagacgccgcacgcctatattatataatgtactagacgcgggccacgagcgcgcgtatcacagaanagatatatcgcgtctgtttggatatgagtctattccatgtcgcggacagtcacatgcgagtagactatattaatcgtgtcatgtgcgctatgcgcgncgtcgcgcgtgctgnattgtacgcgccgtacatagtatgaagatacntgtatggcggtggttgcaactgcgcgacgacgccggngtgagagatgagagag

SEQ ID NO: 3330 - DNA, 1515 bp, Glycine max
  misc_feature (199)..(199): n is a, c, g, or t
  misc_feature (344)..(344): n is a, c, g, or t
  misc_feature (1028)..(1028): n is a, c, g, or t
  misc_feature (1034)..(1034): n is a, c, g, or t
  misc_feature (1123)..(1123): n is a, c, g, or t
  misc_feature (1140)..(1140): n is a, c, g, or t
  misc_feature (1370)..(1370): n is a, c, g, or t
  misc_feature (1385)..(1385): n is a, c, g, or t
  misc_feature (1445)..(1446): n is a, c, g, or t
  misc_feature (1449)..(1449): n is a, c, g, or t
  misc_feature (1473)..(1473): n is a, c, g, or t
  misc_feature (1505)..(1505): n is a, c, g, or t
  Probeset Number=SeqID_13109
caccgcccgcacgcgaggagcggcagcgcagttatacagacactacacgcaaatgagagagggcacaagtgatagtatgtatctcggagcgcgcgcgagagagagcagacgagaactgtgatcgagatagcgggagaggcacacagcgacgcgagggtaagggagcgcgagctgagcgttgagcgaagtagcgggtcgncgaggtgcatagagagctagaagtggagtgtgagcgcgcgagaggatgtggtggagcgcaggagagagagttagatcaagagagagagtgggggtgggtagatgagagatgggaggaggtgaggtgggtgagggagagtagatcnggacgtaggaagatggtagcaaataagtcatataccaccacaagacagacgagtatgaggaacagagacgacacgcaatatttgatggtgagcacggacgcacccagttttaattggtaacagacagatatatagataagaaagcaacaagaataaaggaggacgaggagagagcaggagggaatgcaacaaaaaaggagagaggggagagagggagcccggagagaggaagcagctagtgatgaggagaaggagaggaagagagacggacgaggagaggaggtggagaggaggggagggagaggtagaggagagagagcaccaaacaagtaagggaggagtggcgggaggcgaggtggtgtgggcggccgccctcatttattggccacgcagagaagtcagcgagaaagagggtgaggaggtgcagggcacagatcgtggtgcgtgcgctgtagcatgaggggagagacggagaggtagaacggacgggacgaacgaaacgaggagcgcagcaacagagagaagaccacccaccccaaccgagtgtgtagtgggtggcgcatgtgtgtgggcccgaggcccagcctgcgtcgtgcggaaagggatcgaagacgaaggagtagcgaagaagacaaaacaacaaagaagaattaaatgttagagtgagatgggaagagaagaagnggaacncgacacaccggtgtttattctgtgtataccccaaaacaaataaacaaactatgggcgaggagcacagtagaggacaagggcgccaaacntggaaaggcgcggaagngcacaggaagacaacacaggagggcgatatagaataagggctaagattcaagccgagccaccgtgttagcgcgccgcaccttttgtgtttttgtttatgtatttactagaccaaacaaagacacacagagagttgatacagacaaaaacacaactagaggcggagcaaggagggcactacaaacgacgtattggtagccgaccctttgaggcgcgaggaatgacggtttnccaccctctctgtcncattaacaatattgtgtatgtgggttgtacgcccagccccaccccggttgtggcgacggnnggngagaataaataaacgaaacagagngagagaaaggggacatgtttatcacacacccncacaaaccaa

SEQ ID NO: 3331 - DNA, 370 bp, Glycine max
  Peptide Sequence Number=SeqID_6789
  Probeset Number=SeqID_13110
taaggaactacctgccttcaatattaaacaagaagattctaataaagacgtacctgcattgtagagcagagtgtttttgaaaactttagctagtaacctacctgttgatactatataatattgatcataatgactgtggatagaaaacactctaaacggtgatacacttttggaacttgttgatgggtttcagctgtttgcaaagattgaaatttggtgcgatgggatatgatcaccacatactaagtggatggcgtttgctgagccaaagtatgttgatcatagtgctaagcgtgaactagcgtgttattcagatggacaaccttttggaccaagagtgaattacatctacggaagagggttgcacgcg

SEQ ID NO: 3332 - DNA, 287 bp, Glycine max
  Peptide Sequence Number=SeqID_6790
  Probeset Number=SeqID_13111
gacacccatctcggaggtgaagattttcatatcaggatggtggcacgctttgttcaagagttctagagtaagatcaagaaggacggtagtggatcgtccagagctcttgcaaggttgaggaccgctgttagaaggccgagataacactatcatcagctgctcagacctccgatgtgagtgcttctctatacgagcgtcatgatgttgtcgcctctgttactcgggtcatatcgtaggagctcatcaggcatctgttcaggaaatgatggagccggtgcagaaatggt

SEQ ID NO: 3333 - DNA, 623 bp, Glycine max
  Probeset Number=SeqID_13112
aaaaagtaacttcccttccttcgccgcgatgtctctccgtcgttccatcctcggcctccaccgccaaacccacaacctctctctctcaaagccttcacctttctcaatcaccaacatctcctccccttccgccgccgtgatcggaagagaaatctcctcgaccccattttcactaacccagagactcaaaccggactccgttaatctcgtcggcgatcgttctctctggcaatctcagctgtctcgtctcccggcttctcgaggctacagcaacgcgtctctcgtacggaagatccctgttctgttccacataaacgcggggatggaggaggttttggcggattacgttcaccaagagctgaccaggaatctgatggtgatctctctggggttgttccagatcatcgttatcaaagacgtcgtcgtgtttcttttcttctgagcaaaaaaaggaatcatcttttggggtctctctctatcacctgtttaatgaaatagtgagctaaagtctcttcctttttgtttttatctttcttctgttatgaataagaacattgatgcttgtgttgcttcagtttctcttgttttcaaagtttgattcagttcgtataaggcttaagtgg

SEQ ID NO: 3334 - DNA, 548 bp, Glycine max
  Peptide Sequence Number=SeqID_6791
  Probeset Number=SeqID_13113
atcagcagccagtcgcttcactcactcactcactgatcaccggcctgcagatcggtcgaagctagagacctctcaccaagaaatttgaagcaatggcggccggtctgcaggtgttcgggcagccggcgtcgactgacgtggcccgggtgctcacctgcctcttcgagaagaacctcgagttcgagctcgtccgcatcgacaccttcaagagggagcacaagctgcccgagttcatcaagctaagggatcctaccgggcaggtgaccttcaagcatggtgacaagacccttgttgattcaagggcgatatgccggtacctgtgcacccagttcccggaggacggcaaccgcgggatctacggcacggggtcgctggagcgcgcgtccatcgagcagtggctccaggcggaggcccagagcttcgacgccccgagctcggagctcgtcttccacctggccttcgcgccgcagctcaacatgctccccgacgaggcccgcatcgcggagaacgagcggaagctgcagcagatgctcggcgtctacgacgag

SEQ ID NO: 3335 - DNA, 643 bp, Glycine max
  misc_feature (601)..(643): n is a, c, g, or t
  Peptide Sequence Number=SeqID_6792
  Probeset Number=SeqID_13114
atcgacttcgatcctactttcgcttcaaccttaccaccttcgcttccagcgccagtcttgttcttcgttgtgcagtgcacctacattcttttgttcaaacaaactgttcttcacagactatttagcatcatacttccaaaccaactgttcaacaatatctcaagatgaagtactacgccgcccaagttttcgctcttgccagcattgcaaccgcattcccgcatccccagcttccctcgctaccatccttctcgctaccaaccggaggactaggctctggtctaggctcaggtcttggtggaggattgagtctaccaaccaaccttccatccctcggaggtggaggtggtctcccatccctcggaggtggaggtggcctcccatcactcggaggtggcctcccatcacttggaggtggaggtggaggcttctccctccccaccaacctcccttctctcggaggtggcctcccatcacttggagggggaggaggaagctttctcccctccaacaacctacccagcctgggtggaagcagcacccggacagggggttcaggcctgaacagctggctcaccggccaaagggaaggccccggcgnnnnnnnnnnnnnnnnnnnnnnnnnnnnnnnnnnnnnnnnnnn

SEQ ID NO: 3336 - DNA, 1763 bp, Glycine max
  misc_feature (1160)..(1160): n is a, c, g, or t
  misc_feature (1173)..(1173): n is a, c, g, or t
  misc_feature (1763)..(1763): n is a, c, g, or t
  Probeset Number=SeqID_13115
aatcaatagagggcaagatccttcgtctcaagcaacaatatactttatgttctgcttctcttcaagacatcattgctcgttttgagagaagatcagggacaaatgtgaattgggaagagtttcctgaaaaggttgcagtgcagatgaatgatacacacccaaccttgtgcatcccagaactgatgcgaatcttaatagatgttaagggcttaagttggaaggatgcttggaatattacacaaaggactgtagcatatacaaaccatactgttcttccggaggcattagagaaatggagcttggatcttatgcaaaaactgcttccacgccatattgagattatagaaatgattgatgaggagctgattcggaccataattgcagaatatggcacagagaattcagacttgctggagaaaaaattgaaggaaatgagaatactagaaaatgttgaattgcctgcagaatttgcagatatagtggttaagtccaaagaggccattgatattcctagtgaggagctgcaaagttctgaacaagcagaagtagaagaaagaaaagatgatgaagtggaagcagttgctaaaaagaatggaacagatgaaagttccattgaggatgagaaagaagagttgcctgagccagtaccagaaccaccaaaattggttcgtatggcaaatctgtgtgttgtaggtggtcatgcagtgaatggggttgcagagatacatagtgaaattgtaaaagatgaagttttcaatgcgttttataagttgtggcctgagaagttccaaaacaaaacaaatggtgtgacaccaaggagatggatcaggttctgcaatccagatctgagtaaaataataaccgagtggataggcactgaggattgggtcctaaatactggaaaattggcggagctacggaagtttgtagacaatgaggatctacaagtgcagtggagggaagcaaagaggagtaacaaagttaaagtggcagcattcatcagagaaaaaacagggtattctgtcagtcctgatgcaatgtttgacatccaggtgaagagaatccatgaatataagcgacaattattgaacatatttggaattgtttaccgatacaagaagatgaaagaaatgagtgctgcagaaaggaaagcaaatttngttcctagagttngtatatttgggggaaaagcatttgctacatatgtgcaagccaagagaattgtgaaatttattacagatgttggggcaacagtaaatcatgaccctgaaataggagatctacttaaggttgtttttgtccctgattataatgtcagtgttgccgagatgcttattccagcaagtgaattgtcacaacatatcaggtagttatatttcatatagttggtttgcattattctttggattgtacacttttacttaaatggtgatctacatgtactaattaacatgattctgccatttgcactgattgcaactgttcaaattttgacatgaatagctttaaatagaaaacattgagtcaatcacatcaaattgtctaatattcatatgttaatcaagatgtagttcatacgaccaactactgctacttttgtgcatggaaaattgagcatgttatcttgaagaaaatacttgaaaaattaaaaaaggtgtttctgttgtgtccaaacatattcttaaattctttaactccttgatactcaattcccttctgtcgtcttcttcgcagccgtacggacgcgtgggcggacgcgtggn

SEQ ID NO: 3337 - DNA, 574 bp, Glycine max
  misc_feature (84)..(84): n is a, c, g, or t
  misc_feature (90)..(90): n is a, c, g, or t
  misc_feature (92)..(92): n is a, c, g, or t
  misc_feature (201)..(201): n is a, c, g, or t
  misc_feature (207)..(207): n is a, c, g, or t
  Peptide Sequence Number=SeqID_6793
  Probeset Number=SeqID_13116
ccgatttggcctcaattccgccattcctttttttcttttcttttattcctcttttaatttctttttctttttcatggaccgcanatacananactatcaccatcatcctgctcatttggcacatgcttctccccctgaatactttatccacctgaagaacacaacttacaaagacgatctatatttaaagaaaaagacaangatacntcgatagctttattatacttatcaagtaaaagagtcttacccatcaaatgaaaataaacacctaaaaagcccaagaaattattaagataacaaccaaaaaagctcagaaatatcagctcctatcaaacctaaaacacaaagaacacctccacctattaaagctccagccttatctttagatgacctaaagaagaaaactaacaactgtatttcaagaacattaataagtaaaagatcgtgtggaagagtagattattcaaccttgaacagttagaagaccagtactttaagaaaactggatatttcgtcttagcgcgaatcagattatgagtttttggaccggattgtgcttgtcttcagagtgaga

SEQ ID NO: 3338 - DNA, 1967 bp, Glycine max
  misc_feature (9)..(9): n is a, c, g, or t
  misc_feature (33)..(33): n is a, c, g, or t
  misc_feature (44)..(44): n is a, c, g, or t
  misc_feature (75)..(75): n is a, c, g, or t
  misc_feature (134)..(134): n is a, c, g, or t
  misc_feature (161)..(161): n is a, c, g, or t
  misc_feature (180)..(180): n is a, c, g, or t
  misc_feature (186)..(186): n is a, c, g, or t
  misc_feature (206)..(206): n is a, c, g, or t
  misc_feature (212)..(212): n is a, c, g, or t
  misc_feature (263)..(263): n is a, c, g, or t
  misc_feature (277)..(277): n is a, c, g, or t
  misc_feature (315)..(315): n is a, c, g, or t
  misc_feature (337)..(337): n is a, c, g, or t
  misc_feature (352)..(352): n is a, c, g, or t
  misc_feature (364)..(364): n is a, c, g, or t
  misc_feature (522)..(522): n is a, c, g, or t
  misc_feature (563)..(563): n is a, c, g, or t
  misc_feature (578)..(578): n is a, c, g, or t
  misc_feature (762)..(762): n is a, c, g, or t
  misc_feature (782)..(782): n is a, c, g, or t
  misc_feature (799)..(799): n is a, c, g, or t
  misc_feature (810)..(810): n is a, c, g, or t
  misc_feature (822)..(822): n is a, c, g, or t
  misc_feature (841)..(841): n is a, c, g, or t
  misc_feature (847)..(847): n is a, c, g, or t
  misc_feature (1006)..(1006): n is a, c, g, or t
  misc_feature (1008)..(1008): n is a, c, g, or t
  misc_feature (1034)..(1034): n is a, c, g, or t
  misc_feature (1038)..(1038): n is a, c, g, or t
  misc_feature (1084)..(1084): n is a, c, g, or t
  misc_feature (1121)..(1121): n is a, c, g, or t
  misc_feature (1158)..(1158): n is a, c, g, or t
  misc_feature (1214)..(1214): n is a, c, g, or t
  misc_feature (1233)..(1233): n is a, c, g, or t
  misc_feature (1249)..(1249): n is a, c, g, or t
  misc_feature (1254)..(1254): n is a, c, g, or t
  misc_feature (1256)..(1256): n is a, c, g, or t
  misc_feature (1275)..(1275): n is a, c, g, or t
  misc_feature (1425)..(1425): n is a, c, g, or t
  misc_feature (1459)..(1459): n is a, c, g, or t
  misc_feature (1462)..(1462): n is a, c, g, or t
  misc_feature (1464)..(1464): n is a, c, g, or t
  misc_feature (1479)..(1479): n is a, c, g, or t
  misc_feature (1590)..(1590): n is a, c, g, or t
  misc_feature (1632)..(1632): n is a, c, g, or t
  misc_feature (1654)..(1654): n is a, c, g, or t
  misc_feature (1688)..(1688): n is a, c, g, or t
  misc_feature (1737)..(1737): n is a, c, g, or t
  misc_feature (1742)..(1742): n is a, c, g, or t
  misc_feature (1745)..(1745): n is a, c, g, or t
  misc_feature (1749)..(1749): n is a, c, g, or t
  misc_feature (1753)..(1753): n is a, c, g, or t
  misc_feature (1756)..(1758): n is a, c, g, or t
  misc_feature (1763)..(1763): n is a, c, g, or t
  misc_feature (1768)..(1768): n is a, c, g, or t
  misc_feature (1808)..(1808): n is a, c, g, or t
  misc_feature (1810)..(1810): n is a, c, g, or t
  misc_feature (1815)..(1815): n is a, c, g, or t
  misc_feature (1825)..(1826): n is a, c, g, or t
  misc_feature (1888)..(1888): n is a, c, g, or t
  misc_feature (1901)..(1903): n is a, c, g, or t
  misc_feature (1912)..(1912): n is a, c, g, or t
  misc_feature (1914)..(1914): n is a, c, g, or t
  misc_feature (1916)..(1916): n is a, c, g, or t
  misc_feature (1926)..(1926): n is a, c, g, or t
  misc_feature (1930)..(1934): n is a, c, g, or t
  misc_feature (1936)..(1936): n is a, c, g, or t
  misc_feature (1939)..(1942): n is a, c, g, or t
  misc_feature (1945)..(1946): n is a, c, g, or t
  misc_feature (1948)..(1948): n is a, c, g, or t
  Peptide Sequence Number=SeqID_6794
  Probeset Number=SeqID_13117
ccgcgtgtnccatcgtaccgattgcgctttacncgtcgtatacncgagctgtcagtagaatcggagtaatgatgncgtagcgtgtgagatgagagcacacatagacaaacgtctcgacgacgacgcacgacggngtcgcacggacacgcatgcgcatcganggcagccactggtctagangtcatnatggtctcacatcgctacgnactgcncagtgcgctcagaggcgcgcctgcgacccagctactacatcgtaaagcganagcgtaggtcgtgnctgcatatgcgcatgctgagctacgtgcaccagtgagngtgctgaggatgtgcatgagtngagtatgcagactgnggtcagcgacgncgacgcaagacacgctcacaaccgcacatacaacccagcacacagccaacacgccacgaggcgagctcgtgcgacagcgaagcatatgatcacgacactgataccagagagtataagtttcagttgatgatgagcgcagtgcgcgagagtatcacacnagccgagcatgtcgaataggtccatgaagcatcgaggacancgacagatgagaatnagagcagcgagaaggatgtgcgcacgatattcgataaggtagtgcgacgcacacatacaagcacgagtgcacgctagtatggaccacgtacgggcgcagcggtcatagctgccatcagtaactcgcaacgaacaactatcagcgcgcgcacatcaccgagatgagaggacagtggagcgcgtcnagcgtgttcgctgatgctangctgtagcgctcgactncgcagtcacanttgcgtatatgntgcgacgcatgttaccctncctatntatatatggctggtgctctctttctcaacagcacatgtctctagctcacacgtcgctcttgctgcgactctacacacagtgtctatacatcgagctctcgcatatacgtacatggcacactatcatactatagtagtgtagagtatatcatgtaagacngntcatctcactcgtcgatatatatctntagnggtgtgtatgcctgcatcgccatacatcctctctgcacagctctgncacacatacactacacatcgcagacaactctcgcctnacatgtcgtctacctacgaacttcatactataatacnagcacgcgacacatgagcagagacatcgccatcgccactccgttctgccccggtcntatgtcactgtcgatggtntatagtattgtcgttngtatnanatgattgactcacacccangcccgcagcatactgacgagctcgagcatcgtacaacgtcgcatacaaccacctgatcacacataatccgagacacgcacctcacaatcgcagcgataacacacggctgtgtacgcgccactgattgagctgatcgtgagacgatacgcncgcgaccatgcggccgggcacacgcctcgccccncananacacacaacaccganatcaggtacggagagagaagagagagagcagaggatcgacactggcacgagtctgggcagggccacgccacggcgggggacgagaagctgcgacgctgattgcttcctcanctctctctatctctacactctcattaaaacacctatttcttnttatctctatgcttgtactatnatagtaactgcagtgagattgtgaaaagagtttntacttacaccactctcacatacagcatcggcgagctctacggtctgacnatctngtnttcnaatnatnnnttatnctctncaacacatcacgaggccagcacatttagatcctgacagcncnctctncccctactcnnaatgtccgtcatacacgtatagattatattgagagtagagaaggatcgcgacctcacctcangctcggctctgtnnnataacctanananaaaactaggnaggnnnnncnacnnnnccnncnccccacaccaccaaccaca

SEQ ID NO: 3339 - DNA, 1492 bp, Glycine max
  misc_feature (372)..(372): n is a, c, g, or t
  misc_feature (447)..(447): n is a, c, g, or t
  misc_feature (535)..(535): n is a, c, g, or t
  misc_feature (569)..(569): n is a, c, g, or t
  misc_feature (628)..(628): n is a, c, g, or t
  misc_feature (964)..(964): n is a, c, g, or t
  misc_feature (1112)..(1112): n is a, c, g, or t
  misc_feature (1242)..(1242): n is a, c, g, or t
  misc_feature (1263)..(1263): n is a, c, g, or t
  misc_feature (1416)..(1416): n is a, c, g, or t
  misc_feature (1425)..(1425): n is a, c, g, or t
  misc_feature (1430)..(1430): n is a, c, g, or t
  Probeset Number=SeqID_13118
acagcgcgaagtatctctaccccggaatcagtagctgcctacgtccgagtagcggatcgtgcttcgcgcgagctgataatatatcattatattaccggcatgagggctgcattatgtcatggttaatattataggtctagtacacaggagacttaaagtagccgagcgtattttacgttgttacgatgtgatgttatgataatatatcattgactacacacataaactcatacacccgagtcaaccgtctacatattacagactgtggctatacacagcgtgtcgtcgttcgctacacgtgcaagtgcgaatgctcgcttatgcgtacgaccataagtatgtagcacgactatcgtttcatatctgttctantcattaatatcatccatacagttagtgtaacgtatcaatatgcgatcatcatatcatcgatagcgtatataactnttctcgtattgtagtagtgattaaacgtagttcttgttcagtctgtatgttgattacatacataaataccaaactctactacttcatnggagcgaggtgggggcggggtatgtattcgtggnttctcactgattatatttatattctcattcttcctcaaaatattacgcacctattgatnaaaacaatatataatatacttacttctagttctatactcgcgactctcagcagaactctctcaatcggttgtatacaagaatcatttagcgtgagtgcacattggctaacatgagtatatatgtgattaattgaggaatatatgtgacgtgctcgctcggggaaattccaccaagaggacggaagacacatgcagtataacagtgaaataacaatgagatatcgatgtgcgtgtctggtatattatggactggtccaaatcaacgcaccgtttactcgcagcatccattatagtgatgtgacgtgcaatgtcgcggaacgtctacgtagcgtcgangtgacagtgttgtaatattgaatagccgatatatttgaatcaattcctctcctctcaccacaccgctatatatgtcgccgtccttcaagatattctctaaagtaagcctacggcaatccatagagaggtgtcattatatgttagagtnaccaccattcgaggtgagtgtgggcgggcaaagagcgcgagggggactagcatatcttgttgtattacatgtaatgggtatgagagagggttcgtcgcgggacaagaaaagaacatacatcgctcactcntggcacgatcacagcgctccntaggcaaagcacctgctctgggaatgtgttgtctcatccctctgctcccgtatatgtaattgtgtggtatcgtctagaaattatacacaaccacgatcctccgtctctgtatatctgattgcctttgtgttaatattaaattgagttcccggncgtatcgtngtggncccgccctcctccaagcacaggggatttaatttttgtagtgtattttctaaatactctaaac

SEQ ID NO: 3340 - DNA, 1832 bp, Glycine max
  misc_feature (12)..(12): n is a, c, g, or t
  misc_feature (14)..(14): n is a, c, g, or t
  misc_feature (26)..(26): n is a, c, g, or t
  misc_feature (30)..(31): n is a, c, g, or t
  misc_feature (38)..(39): n is a, c, g, or t
  misc_feature (41)..(43): n is a, c, g, or t
  misc_feature (45)..(45): n is a, c, g, or t
  misc_feature (47)..(47): n is a, c, g, or t
  misc_feature (49)..(49): n is a, c, g, or t
  misc_feature (52)..(52): n is a, c, g, or t
  misc_feature (95)..(95): n is a, c, g, or t
  misc_feature (111)..(111): n is a, c, g, or t
  misc_feature (163)..(165): n is a, c, g, or t
  misc_feature (168)..(168): n is a, c, g, or t
  misc_feature (172)..(173): n is a, c, g, or t
  misc_feature (177)..(177): n is a, c, g, or t
  misc_feature (197)..(197): n is a, c, g, or t
  misc_feature (199)..(200): n is a, c, g, or t
  misc_feature (280)..(280): n is a, c, g, or t
  misc_feature (305)..(305): n is a, c, g, or t
  misc_feature (307)..(307): n is a, c, g, or t
  misc_feature (338)..(338): n is a, c, g, or t
  misc_feature (353)..(354): n is a, c, g, or t
  misc_feature (678)..(678): n is a, c, g, or t
  misc_feature (732)..(732): n is a, c, g, or t
  misc_feature (744)..(744): n is a, c, g, or t
  misc_feature (798)..(799): n is a, c, g, or t
  misc_feature (931)..(931): n is a, c, g, or t
  misc_feature (964)..(964): n is a, c, g, or t
  misc_feature (1082)..(1082): n is a, c, g, or t
  misc_feature (1206)..(1206): n is a, c, g, or t
  misc_feature (1243)..(1243): n is a, c, g, or t
  misc_feature (1278)..(1278): n is a, c, g, or t
  misc_feature (1308)..(1308): n is a, c, g, or t
  misc_feature (1310)..(1311): n is a, c, g, or t
  misc_feature (1376)..(1376): n is a, c, g, or t
  misc_feature (1466)..(1466): n is a, c, g, or t
  misc_feature (1487)..(1487): n is a, c, g, or t
  misc_feature (1553)..(1553): n is a, c, g, or t
  misc_feature (1557)..(1557): n is a, c, g, or t
  misc_feature (1582)..(1582): n is a, c, g, or t
  misc_feature (1642)..(1642): n is a, c, g, or t
  misc_feature (1708)..(1708): n is a, c, g, or t
  misc_feature (1723)..(1723): n is a, c, g, or t
  misc_feature (1832)..(1832): n is a, c, g, or t
  Peptide Sequence Number=SeqID_6795
  Probeset Number=SeqID_13119
aaatagtagaanangtagatagtatnaatnnaatttanntnnnanananaanaagagagtaaaccataaactactacacagacagagatcgtgtntgggtgagaggagtgnagagttgtgtgcgtaggagatgataggtgggggggggggccccccccccttnnnttntctnnttcnctcttactatactctatccnannctcgtctcagcaccgatatcactcacgagtaaagaacataccgagcacacgcacggcgacgtggtacaaagagacggaanagtcagagatcatgacatgatgcgngncgtcacgacgtcgcgagcagtcattatctanatggtataaatcagnntctatgtacacaaccactcaacaatatctgatgttatatgatgtaatgaatgctcaccgcgcataagccatctgctgctcgatctcaacacccttcgcgattcgactttatgtctcactacacgatatatgatacaatatcatctatcatatgcaagagcatattactgatttatgacttacgtataatcactgggaaattgagagaaatagacgagaacatgtcgggatgatattaatagtaccatgtgtgaacattgactagcatacctcatctagtctatacacgactagtatgtcgtgctctacttgtcttttatgacanaatgtgatgctacgcatgagagaggcgttcgagctgcgcccgtcttagatgtcntgctgttgtggntcggcttgtctctcctctcattgtctgactcataatatcacaaatatagtatanntgattactctacacataacacactaacttcgtatacacgaagtatccatacatgatggatagtaggacgttacatgtgctcatgttatgtgacgctatgatcagtgcttgaatataggctacactcatcaanacatcagtctaagtcatatatagcgaacacaancatttattatcacgatagtgacatgtgtacggcgctcagtgtgacatgactagatgcatcatcgtacacactcgcatccgcagtctcgagtatgtatgtagcagtatatctgactgcngaatcgctatatatacgacctgcgtagtatgtgtatgtgatgattactgagatactgacgagacaaactacaacatctatatatacaataaaacactaaacactacacacctacgtacagatcnagttgtctactacatctgatcaagtgctagtatatgntggttaagcatcgccttccatctacgcgaagctanattacattactcctatcagcgatactatcntnnctaatagagtgacgctcagatatagctgctcgtattgcaccgatgcatgctaccggctacactanatgcactcactcacactcagctcgctcgacgcgacgcctactcgcactataatgacgcatgtcgtagagagcgagtgatatatactatancgtactccacagagctctcgnacacactacccggtacatatgcgctagacgattgaatcgctgcatgatatgattcgatatcgatgnatcncagcgacgatattgtcgtgagtatngacggatgagttatgtagcacgacatgagactacacacatcacacacatactataattanacaagaccacactcagtacgagataacggatagcatcagaggcatgcacaatatattagatgatanatggcttggggacgntgccgtgatgtactcgcaggatagtactcacgtatgacatatagacactcgcatccatgtcatatatcatcctcctgcctgcagcatgcgatgcttcatcaccccacan

SEQ ID NO: 3341 - DNA, 2407 bp, Glycine max
  misc_feature (69)..(69): n is a, c, g, or t
  misc_feature (72)..(72): n is a, c, g, or t
  misc_feature (83)..(83): n is a, c, g, or t
  misc_feature (85)..(85): n is a, c, g, or t
  misc_feature (176)..(176): n is a, c, g, or t
  misc_feature (210)..(210): n is a, c, g, or t
  misc_feature (307)..(307): n is a, c, g, or t
  misc_feature (386)..(386): n is a, c, g, or t
  misc_feature (586)..(586): n is a, c, g, or t
  misc_feature (625)..(625): n is a, c, g, or t
  misc_feature (657)..(657): n is a, c, g, or t
  misc_feature (704)..(704): n is a, c, g, or t
  misc_feature (746)..(746): n is a, c, g, or t
  misc_feature (755)..(755): n is a, c, g, or t
  misc_feature (790)..(790): n is a, c, g, or t
  misc_feature (917)..(917): n is a, c, g, or t
  misc_feature (942)..(942): n is a, c, g, or t
  misc_feature (1142)..(1142): n is a, c, g, or t
  misc_feature (1357)..(1357): n is a, c, g, or t
  misc_feature (1448)..(1448): n is a, c, g, or t
  misc_feature (1457)..(1457): n is a, c, g, or t
  misc_feature (1505)..(1505): n is a, c, g, or t
  misc_feature (1538)..(1538): n is a, c, g, or t
  misc_feature (1576)..(1576): n is a, c, g, or t
  misc_feature (1585)..(1585): n is a, c, g, or t
  misc_feature (1593)..(1593): n is a, c, g, or t
  misc_feature (1599)..(1599): n is a, c, g, or t
  misc_feature (1635)..(1635): n is a, c, g, or t
  misc_feature (1642)..(1642): n is a, c, g, or t
  misc_feature (1711)..(1711): n is a, c, g, or t
  misc_feature (1764)..(1764): n is a, c, g, or t
  misc_feature (1813)..(1813): n is a, c, g, or t
  misc_feature (1841)..(1841): n is a, c, g, or t
  misc_feature (1845)..(1845): n is a, c, g, or t
  misc_feature (1854)..(1854): n is a, c, g, or t
  misc_feature (1856)..(1856): n is a, c, g, or t
  misc_feature (1863)..(1863): n is a, c, g, or t
  misc_feature (1929)..(1929): n is a, c, g, or t
  misc_feature (1979)..(1979): n is a, c, g, or t
  misc_feature (1982)..(1982): n is a, c, g, or t
  misc_feature (2001)..(2001): n is a, c, g, or t
  misc_feature (2004)..(2004): n is a, c, g, or t
  misc_feature (2009)..(2009): n is a, c, g, or t
  misc_feature (2014)..(2014): n is a, c, g, or t
  misc_feature (2019)..(2020): n is a, c, g, or t
  misc_feature (2063)..(2063): n is a, c, g, or t
  misc_feature (2068)..(2068): n is a, c, g, or t
  misc_feature (2096)..(2096): n is a, c, g, or t
  misc_feature (2168)..(2168): n is a, c, g, or t
  misc_feature (2246)..(2246): n is a, c, g, or t
  misc_feature (2334)..(2334): n is a, c, g, or t
  misc_feature (2387)..(2387): n is a, c, g, or t
  misc_feature (2407)..(2407): n is a, c, g, or t
  Probeset Number=SeqID_13120
aaatacatcttatctatgtaacatagatatggtatcacccactatactgttcacacagcgcgcatacgntanatcacatagangnagtctagtagaagaacatcacagataacttgtgtaatgatgagcgaggtcgagcgtagtgtagatcatcacttgctaaactatatctaganagatgagtaatatcttattcgctgttcccgcccngccgtcgacgattatcctcctcgtactgactctccctccactcatcttcactactgtttgtcgtgtgtgtgtgcgctggtccttcctcacgccctancttaaactgagtgagataggaatcgtcagtaccgtgtatgctgacgaggatgcgcgcatgcagataaacacgacgcatncagactcgtcgccctcgctcgattccgtggcgttagagtatataccgtccgtacgagatcagacgcgactggcggaacgcataatgattggtagattgtaatataatatgaagcatgcgatatactgcacaattgtatgttaatctatatagacggacacctggatatgtctccaacatatacgcgagctgagtcaggcngcgttgacgcgtgtctggttatgtatcatatatgtgaantgcgatcctagatactgtacagatagtgaagngtggtgagacaggagactgatacggtgctggtgtatgtgtagtaagnatatgtagtactataagtgcgagagaggtcgtgtatatgtgntgcgctgtncgtcgctcgtctctttcagtgtgtagctacatcgnctcgttctgtctccctgttactatagagtgatgtactcaactgtactatctaatatctgtatgactcgatatgactatatatatcgagacacactgtcatctacaccagatattcgctcgtatgtanacaagtatgtagagtctcgatatangtgcgtgtagaacgtgactatcgcatgagattcggaggagatgatgcgcgtagtgtgatgcgaccggtcaggatgacgtagtgtaccacatgatgacactgcaacgagtgcaatcatatatatgtaatcataaatgcagtgctatacggtgcgacggtgcgacgatatgtacactgttagtgcgagctaataatactacnctactgatatggtgactgagctctgtgcggtcctctacatcgcagtcgtacatcgatacttcatatggagctgtgcgcgtcgtgtgttacgcgtgatatatgtcggtaatgacacgatcatattcgctatgatctacgacgtgctgcgacctcatgtctgtcgacctcgtgatatcatatcgtgctccacgtcagatgcttgaagtatgagaacntctctctctagatgtgcgtgtcgtcagtcactgagtatgtatgtgcgtccacgtacttgtgtgctgggatgatatgtactgatcaatgctngtatatganatatacgctattgagtcgagaggctatgtgacacgggtatgcactctnacgtccatgcgtatcatttgcaggtactatagnagacagatcaccagcacgagaatcatcaggcgatctancgtctcagncgagcctnctagcntatctctatcttagcacatccatatatgatcgtcantcacgtnactgaggtctatgtcgggtcactggtgagtctcactatagcgatattgattatatactgtgtgtcgacntcgatcattgtgtatgataatactgcatcatgatgatgagatcagtacgtcgngtgagtgagagcgctgtatctgtcgatataccagaggatgtgataggantatgatattttcatacgatatatgtcantcgncagctgtcntnactacgntcatgttacgtacctatctactatgtacgttagacattatcgctaacgtctcgacacagtgacacncagcccacgtgtgatcgcgtaacaccatgcgacgattactaggacgacantcntgcacactcgacagctgtnacnacgtnctacntcctnnctcattaccgtggtagcgtcgcgtgcacatgttcacgagacgnactgngtgtgagagtacggaacggcagtacgtncgtacgctgacgtagtcggggcaagcgacgacgatgagagttgatcgtatcgtgtaacaacgatgtatgagnaggtagtattgggtaggttagtaaagattgctgatcgcgcatagtgctaatctaatatcggcctcgtcgatgtgtagnatgcatgtatcatactcgccgctacgtcgatgcatggagtatgacgcgcactcgctctatcgtgcagacgaaagctgatgacggagcnacttttgtactcatacatgataatcatcgtgctacaagcagtcatcacagcgntagacatggtactgcaatan

SEQ ID NO: 3342 - DNA, 554 bp, Glycine max
  Peptide Sequence Number=SeqID_6796
  Probeset Number=SeqID_13121
atcagtcgatacaaagtaacaaacaatggcgacgaacaaaatcgtccgtctgatcgcaccaagccgatccgcctcctctagattcatggagcctgtatcacgctttctaagctccggtactcctccgccgcagtcaccatcaccgtctccgaatgaggatcaggttgtgaagccagatcagaagcttcaagagaatctgcagatgcccaaggaagaggaagatgaagaagaaggaggaggaggaggaggtggagagtttttcaacaaagatacgggtgagatcggagggcctagaggtcctgagccgactcgttacggcgattgggaacaacgtggtcgatgctccgacttctgattgagacgtgatgatcccaagtaaatctcggtccttgttcatcattttgattccacaggaattaaattcactttctataagttgtttatgtattcgcaaataatggaagaacacagaagaaaaattaaggagaagctggaactatgatttgtctggattccttgtgttgcttatgttgaatgtttagttatttgaatac

SEQ ID NO: 3343 - DNA, 766 bp, Glycine max
  misc_feature (663)..(663): n is a, c, g, or t
  misc_feature (673)..(673): n is a, c, g, or t
  misc_feature (740)..(740): n is a, c, g, or t
  misc_feature (745)..(745): n is a, c, g, or t
  misc_feature (766)..(766): n is a, c, g, or t
  Peptide Sequence Number=SeqID_6797
  Probeset Number=SeqID_13122
tttttttttttttttttaacatttttttaacttttggaaattggaaacctttaaccggttttaccaaaaccggacctggaaccggcccctttttttccctccttttccctccccaatcccccaaaccttttgggcaaaggcaaaaaagggaaaaatggagggttggaacccttggccaaaccaaaaggtaccgaaaggtggaaccaccgaaaacctggaggaaacctaaccaccaaccggaccaaaggtaagggcctggggcccggcccctaaggtgggagggaaaatccttaaaaggggtcctccccaaacccccaggaggtaccttggggcccggttcctcctgggaatccaaaaaacctaaaaacccctccaaaaaaacccccgccggctccagaaccaaccgaaccgggaggcaaaccaccgacttcttggccttcaaacccgccgcctccgccgaaaaaggtccccccaccgggcggtgggttaacccggaagcctgggaacaaggccggggccgccccagtggcaaccttccggaaaaaaatcccccccctggggaaacccggcaagaaaggaaagaagggcggtaagggtcaagggtgaaccttcttcagaaaataagggccacctcctccaccttaatccacgggtttggatccntgtttttggnctggcccaccaaccattcaccaaaaaccactgggtacaggaaccaaatttatgaaccacctttcaancatcnaattacgctttttcgagaaan

SEQ ID NO: 3344 - DNA, 387 bp, Glycine max
  misc_feature (329)..(329): n is a, c, g, or t
  misc_feature (348)..(348): n is a, c, g, or t
  misc_feature (368)..(368): n is a, c, g, or t
  misc_feature (373)..(373): n is a, c, g, or t
  Probeset Number=SeqID_13123
ttttttttttttttttgtggtttgttgaaatcttaatttttaatagcatcacaaagaggacattttaaacaaataagtacaaggtgtctatgagaaatgtacaaatattgtacagcagggaaaacaccggcaatcaaatccagcatttctaatcacacgttttttgatttatgatgatatggaatgatgacaatcacgtaacagtctctgcgtggtgtttgagaacggtaaaaccattcatagccagtccccgaggctacgtttggtctccctctccggtactcgtaattggttattaacttttgttcgcgtcattttctacctggggngcggaagctttgtcatggngacagtagagagtgaagganagtcnatgtgtgtgtatgt

SEQ ID NO: 3345 - DNA, 2139 bp, Glycine max
  misc_feature (27)..(27): n is a, c, g, or t
  misc_feature (35)..(42): n is a, c, g, or t
  misc_feature (55)..(55): n is a, c, g, or t
  misc_feature (60)..(60): n is a, c, g, or t
  misc_feature (63)..(63): n is a, c, g, or t
  misc_feature (65)..(66): n is a, c, g, or t
  misc_feature (83)..(83): n is a, c, g, or t
  misc_feature (91)..(91): n is a, c, g, or t
  misc_feature (109)..(109): n is a, c, g, or t
  misc_feature (126)..(126): n is a, c, g, or t
  misc_feature (144)..(144): n is a, c, g, or t
  misc_feature (152)..(152): n is a, c, g, or t
  misc_feature (177)..(177): n is a, c, g, or t
  misc_feature (182)..(182): n is a, c, g, or t
  misc_feature (198)..(198): n is a, c, g, or t
  misc_feature (201)..(201): n is a, c, g, or t
  misc_feature (255)..(255): n is a, c, g, or t
  misc_feature (275)..(275): n is a, c, g, or t
  misc_feature (287)..(287): n is a, c, g, or t
  misc_feature (314)..(314): n is a, c, g, or t
  misc_feature (351)..(351): n is a, c, g, or t
  misc_feature (360)..(360): n is a, c, g, or t
  misc_feature (402)..(402): n is a, c, g, or t
  misc_feature (427)..(427): n is a, c, g, or t
  misc_feature (507)..(507): n is a, c, g, or t
  misc_feature (551)..(551): n is a, c, g, or t
  misc_feature (554)..(554): n is a, c, g, or t
  misc_feature (557)..(557): n is a, c, g, or t
  misc_feature (807)..(807): n is a, c, g, or t
  misc_feature (857)..(857): n is a, c, g, or t
  misc_feature (1078)..(1078): n is a, c, g, or t
  misc_feature (1090)..(1090): n is a, c, g, or t
  misc_feature (1117)..(1117): n is a, c, g, or t
  misc_feature (1146)..(1146): n is a, c, g, or t
  misc_feature (1229)..(1229): n is a, c, g, or t
  misc_feature (1356)..(1356): n is a, c, g, or t
  misc_feature (1388)..(1388): n is a, c, g, or t
  misc_feature (1437)..(1437): n is a, c, g, or t
  misc_feature (1674)..(1674): n is a, c, g, or t
  misc_feature (1676)..(1676): n is a, c, g, or t
  misc_feature (1683)..(1683): n is a, c, g, or t
  misc_feature (1705)..(1705): n is a, c, g, or t
  misc_feature (1844)..(1844): n is a, c, g, or t
  misc_feature (1857)..(1857): n is a, c, g, or t
  misc_feature (1861)..(1861): n is a, c, g, or t
  misc_feature (1863)..(1864): n is a, c, g, or t
  misc_feature (1949)..(1949): n is a, c, g, or t
  misc_feature (1987)..(1987): n is a, c, g, or t
  misc_feature (1998)..(1998): n is a, c, g, or t
  misc_feature (2041)..(2041): n is a, c, g, or t
  misc_feature (2084)..(2084): n is a, c, g, or t
  misc_feature (2106)..(2106): n is a, c, g, or t
  misc_feature (2115)..(2115): n is a, c, g, or t
  misc_feature (2139)..(2139): n is a, c, g, or t
  Peptide Sequence Number=SeqID_6798
  Probeset Number=SeqID_13124
ttttttataccatcgagcgtcgagggnaagaagannnnnnnnacgcggccccgcnacccnccncnnccgcgccgccgccgccncgccaatntgagaccccacgcctcgnaggaggccgcctcgtcngagcgccatagccaatcngataaaangaagatacccccacacacacgtcancgccnaccactctactctccnctngcatgacaatactgctcgcctccacaacatatctacaccttgactccattgatnattttactcttcatggtggnctcacgatgcgnttcgctgttctctataatctctactcnaaagattcaactatagcatatgattatggggtgtggngtggttttntccacgcattcgagagctcatagggtaagaaacacgtggaangtgatgtgccagcatggtgttctangatattataatagacatattgtgatgatttaagatagaagaatatatatatatacgacacaacagcgcaaaacaacaatnaccaaaactacacaacgtacgacacactctaatcgcgtccacgncantcncctccttgtcttgtccagcccatctctgcttctctatttcttctcctctccttctctcccctcgtctctacttactactacatgttctttcagccgtgtgcgcctattctatctaccttgtgcatgcgcatcctctctaatataagcttaatctaatagcataactatacatacaaatctatataatcatatacgctacatcacaaagtcccacacctcaccgcaccgagcagcggacacaacacaaacngagagacgagcttacattcaatggtaggtatatatatatataactgatcntgtactgagagaacgggcagtcggtcgagcgtctgagagcaatcacacgacatgaccatgagcgccactcctgcgcacctttctcatgacgagcgcgcaaccttcgtgggttctccgcatgatccgctaccctccacagccgactgtgcgagcccactatcgcctcccacactctcagactcgtgcgccgcaccgtatctctccatgcagagctctcctcnctcacgcctctngcacacccgcgcgctctacggattganttcatatgctttctatattactctctctntcttatctctcctctctctcactataatccagggttcacacttatgcgttattatatcgtgtgcgtgctactcttgtgtacangcgcacgctctcgggcgggtcgcgcctcagcgctcggctcaggtgccacccctcaactcacgctgtctgcgtgtgcgacagatagtcttcactacctctcttctcaacgcgaggatgactacacctngtaacacgacagtacatcgtcatttctggcanctctcgcggtcgccatgctagcgtcgctctctaccacgtactcgtccgncgtgtggacatcgcctctcacgtctcacagcggcacgccgacgcactctctctcactcacctcacgtcacatatcttcgagtatatatcagccccctctactcacacgcactacgtccttgtgcgatctacaaccggacactctcgacgtcactctctctagttacctacctatgttcatcgctctacaccgcgcgcatatcgatcctctcactcttcatgctcatgcggtggtatntngtcagtnaactttatcttttgtcgacagnatatgtgcgtcatcgtagatcttactccggtcatcatactgtacctcggtactgactctcgctactctcacactccatactcatacttactcgtcactgcactacacgctcaccgtcagtcgcaaccgactgtttatcntcggccactcgantcangnnatccaacatatctcatgtctcagctgcatctgataccgccccgctctctgctcagtggcgtcatatattcctcatagccctcctncgtcctcatccttacgtcctcatcacactgctcactanatgcatcctcnctcatccgtcgtgcatacgctgtctccttagtaccctccttcnactaccgttcgctaccagatgcatgcgacgatactgtccaccnctcacccctcacaacgagagangctaacatncatacactcactgtcctcgagcgn

SEQ ID NO: 3346 - DNA, 1916 bp, Glycine max
  misc_feature (1)..(1): n is a, c, g, or t
  misc_feature (26)..(26): n is a, c, g, or t
  misc_feature (79)..(79): n is a, c, g, or t
  misc_feature (153)..(153): n is a, c, g, or t
  misc_feature (176)..(176): n is a, c, g, or t
  misc_feature (227)..(227): n is a, c, g, or t
  misc_feature (229)..(229): n is a, c, g, or t
  misc_feature (244)..(244): n is a, c, g, or t
  misc_feature (260)..(260): n is a, c, g, or t
  misc_feature (269)..(269): n is a, c, g, or t
  misc_feature (318)..(318): n is a, c, g, or t
  misc_feature (331)..(331): n is a, c, g, or t
  misc_feature (392)..(392): n is a, c, g, or t
  misc_feature (409)..(409): n is a, c, g, or t
  misc_feature (427)..(427): n is a, c, g, or t
  misc_feature (441)..(441): n is a, c, g, or t
  misc_feature (446)..(446): n is a, c, g, or t
  misc_feature (509)..(509): n is a, c, g, or t
  misc_feature (519)..(519): n is a, c, g, or t
  misc_feature (526)..(526): n is a, c, g, or t
  misc_feature (596)..(596): n is a, c, g, or t
  misc_feature (630)..(630): n is a, c, g, or t
  misc_feature (636)..(636): n is a, c, g, or t
  misc_feature (1360)..(1360): n is a, c, g, or t
  misc_feature (1530)..(1530): n is a, c, g, or t
  misc_feature (1754)..(1754): n is a, c, g, or t
  misc_feature (1776)..(1776): n is a, c, g, or t
  misc_feature (1818)..(1818): n is a, c, g, or t
  misc_feature (1840)..(1840): n is a, c, g, or t
  misc_feature (1885)..(1885): n is a, c, g, or t
  misc_feature (1899)..(1899): n is a, c, g, or t
  Probeset Number=SeqID_13125
nccatggcatgatagcagatccaatncatagtacgacgatgaagcccgtgcccagtagccgttatctgagacgcgttgntagagcactatcgtcgatcagtcgatagttcatcattgttgattcgagacttctactgcattatgtgcgtatcngcatatcatctgcttcgtttctntaacgttagcatcaatagtctatatacgtatgtcatcacgcacagctatantntataagttgcgcttntatcgtatagcgtcangatataagntatggactatatgtacgcagcacacatgtgtatctacatgctaccgtanacagatctgttcntcgatctttgactcacatgtatctgcgtgtcgtcgctcatctatgtgttctatcttgggcntcgcatacatcttgacnaccattgagagtgtatanctatcggacatgantttcnattctacttcctacatctcgtcagttctgcgtctatgtctatgcgtaacgcagtgcagtaagntactgacgtntgctgtntacagtacatcactcattgatagctctactcagatctcattacacgcgtcgtgtgcacgctactgctcancgtctgtgacgtttattatcagttacatctgtgncattantctgtcgtacagatcattagattctcatacatcatgacatacatgaacagacgtgcatgtgatgtcgatgctgtgcagatgtctcgattagttataactcgttatcgtatataatacacctgcatgcacatagagagggtcgctgcagtactattatagcagtagtgttcgtgcgtctgcacctcgctctgttgtttctcctctcactccagtatgtgtctttgcttttcaatataatgttaatactagtatctccgcgtgttcagtagtcggtcttatccagcgatttcagaagtctcttacgtctgtgggtccagtcgtaccggtgtgattgtaataatgacttagtgtgcggtattcgacttatgtatgtcatatgtgaatatatgagaagatgtgcatgtctgtcattgcgtgagatcgatgtatataatcggacatgagaacacctttctactcgcatcacttcctcgccacgcgctctgtgctcttacccctcttagttattgctcgctcgttagcgtttcgcgcaatcgattgtgcgttgtactaatgtccttttgtgcgacgtctcgattgatcataatgacatgtagtgtatagtgagtttcagagtgtgccatctactagcatgacacttgattcacgctcgtcgcgctcacgctcctgatctataccagaatatatatgtatagcctccgctattcattgttagtatcgcagnatcgatagtgtcgagacactccgcatacgcatccccctagagtaagcgcatcccacacctgcctgctatccaacattcaccacttcacgttcgcggactgatctcatggcacagagactagatcttcggccgcgatcgcggtgctgttctctgcttataatgtctaagtnagagtcttagtcgttattcgtaggttggtgatgcgatgtcatgtattgcatttgtctcctctttctccttatgttgtcccttctctcgcattatttatttgcggttgacattttgtcatgcctcagatatgttggactcaggtctcccatcgtgccactaggtatgactagtattactcggtcgcgtggccggtggcggtatgaatgatagaatgagaggtatntttgctgtaccgccctggccgncgtcagaattacgcgagctttccagcttaatcaatgtgtagnatcgcgtcccgcaccgcacagncacctgccaacatataaacacacaagctcatcgccacagcactgntgtcgtcagtgatncggctcactccaccact

SEQ ID NO: 3347 - DNA, 1574 bp, Glycine max
  misc_feature (14)..(15): n is a, c, g, or t
  misc_feature (20)..(21): n is a, c, g, or t
  misc_feature (28)..(28): n is a, c, g, or t
  misc_feature (33)..(33): n is a, c, g, or t
  misc_feature (75)..(75): n is a, c, g, or t
  misc_feature (125)..(125): n is a, c, g, or t
  misc_feature (189)..(189): n is a, c, g, or t
  misc_feature (207)..(207): n is a, c, g, or t
  misc_feature (265)..(265): n is a, c, g, or t
  misc_feature (508)..(508): n is a, c, g, or t
  misc_feature (840)..(840): n is a, c, g, or t
  misc_feature (865)..(865): n is a, c, g, or t
  misc_feature (913)..(913): n is a, c, g, or t
  misc_feature (1072)..(1072): n is a, c, g, or t
  misc_feature (1125)..(1125): n is a, c, g, or t
  misc_feature (1134)..(1134): n is a, c, g, or t
  misc_feature (1170)..(1170): n is a, c, g, or t
  misc_feature (1189)..(1189): n is a, c, g, or t
  misc_feature (1207)..(1207): n is a, c, g, or t
  misc_feature (1209)..(1209): n is a, c, g, or t
  misc_feature (1233)..(1233): n is a, c, g, or t
  misc_feature (1332)..(1332): n is a, c, g, or t
  misc_feature (1341)..(1341): n is a, c, g, or t
  misc_feature (1384)..(1384): n is a, c, g, or t
  misc_feature (1390)..(1390): n is a, c, g, or t
  misc_feature (1440)..(1440): n is a, c, g, or t
  misc_feature (1460)..(1460): n is a, c, g, or t
  misc_feature (1512)..(1512): n is a, c, g, or t
  misc_feature (1525)..(1525): n is a, c, g, or t
  misc_feature (1554)..(1554): n is a, c, g, or t
  misc_feature (1569)..(1569): n is a, c, g, or t
  misc_feature (1571)..(1571): n is a, c, g, or t
  misc_feature (1574)..(1574): n is a, c, g, or t
  Peptide Sequence Number=SeqID_6799
  Probeset Number=SeqID_13126
aaaggggcctcgcnnccccnncctggtncgctnggcggtcatattctctctgtgttgtgttattatattttatanctatgaagacaagaaagacacgagaggggcggtaggcgtgtgctggctgngttgtgtgtggtgtactcatgctcgtttgtttgctgcaatacaagggactacactttctactcncttgtattgtttgtgtcnagcggtttgaaaggggtgtgtctgtgtagttggtattttgttggtgtcttacatctgncgtgtactatattaatctggtgcggggtgttacatcttgttgtgtcggtgtaaaccactcttctctacgtgcgggcactcgcgcgtcgtgaatatcactcgtggcgcgtgcggccgttatgaacattttatgtcgtgcgtgtgcatactcttctggcgcgtatagataagatgcgtctagctaacatcatctatatatggctatatgtcggtgtgtgtacagtctcatataatatctgcatantaatgtatctatcatataagtttggtggtagtgataatttctgatatttggttcttagaatagcctgtcttgattcagtctacccatctttcctactttcatattcactgtttctgtcttcatgtccctgtctccttcatacatacatctcgtgtgttattctatttcttctctcatctatatgtatcaatatctgtcattcttgcgctctgtcgatcatgtatcgtgtctatactatcatttctcacactgtaatgttcgcgtgtttgtgtgtcggtatgtgtggatacattcctgctgtagattaacactactcgtgatgtatgtgatgnatcaacccgcgtcgatattgttcgnatcgctatcgtcactatctcgtagcttgtgataattgatttggtatgncagcgagaatgagagacacagaccacacgacaccgtcgtgtcatagactcttcatacaccatagtataccgtatatacaccaatctcactacgatatatagaacgatatacacacatcacgtcgtcgcaataacaacatacatttaatatcgaacgcanatcgatatgaataagtataatatacagtgtatcactcatatatatcatattanctcatattnactatgtctgacgtatatcgtaacaatgatgacatnacatacgtatctagtactnatcgaatagaatattacntnacaacatatcgttcgacgtactanacgtgagaatgagttaacctgctggacatattaatatatacttgctaattaactaagcactgatagtgtatacatctcgactagcatactaactcttcntatagtatntatcacctacacctagctgtcgtctctgactgtagtaatgttnatattnacactgtcgcgacagacgcgtcgatctcttccctcgactcgcattccacnctacatcgtgctgtatcatnaccctgtcgtcctacgcgttcgcgcgctaccgacctgacagatcgtcgtatntgtagacgcatcnctatctcatagtctcgtctctacgctctnctatgaccgactcantncgn

SEQ ID NO: 3348 - DNA, 315 bp, Glycine max
  Probeset Number=SeqID_13127
ccgtgtttagttatccgagcctgcccggaatgagtctcccttaatggcaagtgaagctggtcaacggtctgatgggcgtatatggtgcatgcgtaccgccttgcggggtcggtcgctgtccgctttactttattatatgcgataagcgagcagaatgtttattcatacccctaggccgtggatgttatatgggcctatggttggagacgagtcctgtaggctagcactgacttcgtctctcagatcttcctcctttccatatccctctccccttgttatgagcttactcacgaaccggccatcagttctgtatcc

SEQ ID NO: 3349 - DNA, 356 bp, Glycine max
  Peptide Sequence Number=SeqID_6815
  Probeset Number=SeqID_13128
aaaccatagagatggcaaagaacaaagatgacataaagtatgcaaccgctcaaacgaagcaatcggaagacgaggcgattcgagtgagatacaaacacgggacaccactggaaggaggaaagatcgcagagtctgagcctgtagagttgttctcaagcgctcaaggcatcgaaaagggaaaggatcaggcagcgtctgagatcactggagatcagaaacagatgcaccgtgacgttaaagataatcccggaagacgtacgaatgatagccctcgttaaacttatgtagcttaagtcagttctatatgcacttttctaaataaagtactttttgatcaaaaaaaaaaaaaaaaaacc

SEQ ID NO: 3350 - DNA, 1656 bp, Glycine max
  misc_feature (1)..(1): n is a, c, g, or t
  misc_feature (121)..(121): n is a, c, g, or t
  misc_feature (127)..(127): n is a, c, g, or t
  misc_feature (200)..(200): n is a, c, g, or t
  misc_feature (210)..(210): n is a, c, g, or t
  misc_feature (260)..(260): n is a, c, g, or t
  misc_feature (299)..(299): n is a, c, g, or t
  misc_feature (469)..(469): n is a, c, g, or t
  misc_feature (552)..(552): n is a, c, g, or t
  misc_feature (578)..(578): n is a, c, g, or t
  misc_feature (607)..(607): n is a, c, g, or t
  misc_feature (626)..(626): n is a, c, g, or t
  misc_feature (680)..(680): n is a, c, g, or t
  misc_feature (720)..(720): n is a, c, g, or t
  misc_feature (729)..(729): n is a, c, g, or t
  misc_feature (766)..(766): n is a, c, g, or t
  misc_feature (774)..(774): n is a, c, g, or t
  misc_feature (785)..(785): n is a, c, g, or t
  misc_feature (787)..(787): n is a, c, g, or t
  misc_feature (805)..(805): n is a, c, g, or t
  misc_feature (808)..(808): n is a, c, g, or t
  misc_feature (865)..(865): n is a, c, g, or t
  misc_feature (891)..(891): n is a, c, g, or t
  misc_feature (1088)..(1088): n is a, c, g, or t
  misc_feature (1091)..(1092): n is a, c, g, or t
  misc_feature (1127)..(1127): n is a, c, g, or t
  misc_feature (1230)..(1230): n is a, c, g, or t
  misc_feature (1254)..(1254): n is a, c, g, or t
  misc_feature (1393)..(1394): n is a, c, g, or t
  misc_feature (1456)..(1456): n is a, c, g, or t
  misc_feature (1471)..(1471): n is a, c, g, or t
  misc_feature (1512)..(1512): n is a, c, g, or t
  misc_feature (1548)..(1548): n is a, c, g, or t
  misc_feature (1559)..(1560): n is a, c, g, or t
  misc_feature (1564)..(1564): n is a, c, g, or t
  misc_feature (1573)..(1573): n is a, c, g, or t
  misc_feature (1581)..(1581): n is a, c, g, or t
  misc_feature (1584)..(1584): n is a, c, g, or t
  misc_feature (1589)..(1589): n is a, c, g, or t
  misc_feature (1595)..(1597): n is a, c, g, or t
  misc_feature (1610)..(1611): n is a, c, g, or t
  Peptide Sequence Number=SeqID_6816
  Probeset Number=SeqID_13129
natttacagtgcgcttgctcgtgcgtctgcttcgcgttttcttagtgttcatcttgctagtcgtgtactatatatatgtttgctctcagtagaatatgtcagtgtagtctcgtataacgcngtacanaataagtgacgggacgtcgacacacatcatcattcaacttctcacatatatacagtgtgagagagcatggtgntagtataganataggcacactcgtcacgatgttagttgctcagataggcgtagacgcgtnggacgcgatcatataatactgcactgcatgcgagtgtgncacatatgtcgggagagcgctagcagacaaaacgtacgagccacagctcactgccatagacaagaagcaatgagattgatgaataggttctcagtcagagagatagagacacgtggtagagacacgtgagtctgcgcttctgatatagaatgagtttcgtagcatggtgnctgtgcagtaagaatgttactacggcaagtgtgagtggtagacagacggacacagtctaatttcatatcttcatagcaatgtnttctggctgttggctaccattacgancatcgtcatgttactagattttttttttnctattttggatcatatagntcggcatacatctacatatctacctccgtcatgagatcgtgcatcagcgtgtcngcgtatgtgtgtgtgttagtgtttttccacgtgggggggntctctacanactacaattcttctacatatcaatagacgtggtagangcgtgagngggatgatctntncatgcgtctatcatcgtnatnatgatatagaagtgaggcacgtgacagcgaagagaggtagttgttgaagtgtggtgntgcgcatcttcacgtggtgttttaanatagtgttgtagtatacgtattatattctccatacttaatacatcaccgcgtcgtgtgtagggtatatgtgtgtctacatgtgatatatctaataatagcgatgtgtgatgttgtctgtgataacacgtataatatgaatcatatatatgagataatatcggtgtgtttgacacatatcttatcgcacgaaacacgncannaggactcgcgcggcagagcagccggattcattcanccacgcgccgtgcgccgcgcaggtgacagtacagaactacttcacctcgacatcgtccatatacatcgccagtacactcccgcaggcgcgatgactgtgatgnagaagtctcacgttttctgcgacngcttggctatagtggtcatctttgtgttgtggtagacgttgtttgacgcggctagagacctctagagcgttcttgcgcggagtcgcgcagacgcgtctccatcagggcgctcgcggcgtcgcttgtgtagcgtctacanngtggcagagccgtcgatgttctcaccaccactacgaaagaaggatgagatgatcttttatgncgttttcttctcggngcgcgcgcgggtccgctagacgtcatagcctatacatccgnatgcgcgcgccgcgcccgcctgcatgcaggagtggntggtgtggggnncgcncgcgcgccncaaccggncanaaganaaaaannnagagggcaagggnngaagagggagggagagggggggacaaaacaaccaaaacaacaaaa

SEQ ID NO: 3351 - DNA, 700 bp, Glycine max
  misc_feature (150)..(150): n is a, c, g, or t
  misc_feature (260)..(260): n is a, c, g, or t
  Probeset Number=SeqID_13130
atcggttgaacataactgctccgtatcttgttgggtgtcattcgttttcttattttcttcttagcatacatgaatcagaatgcacagaatttttatctggggatggatgtgaagagatcatggatggtgatagagttgggacactaattnggtaattaagaaagatgtgtagagatagcaacgattcatcatccattggattcactcagaagatctatttgctcttcttctcatcagagttggccgaggacgcttcatcntcaacatcttctaattcacaacacatccaaatggaccttttgttgattatcagacctcatgagccacctccctattaaaagaggttatctatggtctatcaaggaaaggccagtctttcccttctttacagggtggaagacataaaaacttccaaaaaaggcccccttatagaaggaaaatgaatcttgcaaagttttgggggaagtttaaaaatcaaaaactttggggctcccaaatttacattaaaaaaaaatttcagaggggtttttttctttttcaaaaaaaaaaaaaattttcccaagggggttaaattttcccttggttcaaaaaaaaaatttttaatttcaaatgtgaaagggtttttttttttttttgaaaaaaacccaaaattttttggccccccctctcttttttttgggaccacccatttttttttttt

SEQ ID NO: 3352 - DNA, 811 bp, Glycine max
  misc_feature (1)..(1): n is a, c, g, or t
  misc_feature (604)..(811): n is a, c, g, or t
  Peptide Sequence Number=SeqID_6817
  Probeset Number=SeqID_13131
nccttaaaggctctctcttgcagtcgcagaggaaaaccctagctagtagtctcagttcgtttgagagagaatatatggtatagggtcctcactttctgcgtaattatgcgcgtttacacaagatcccaagacagttattggcactcccatcgagaactccgacatgatcgtgacggcatcgcgcgacaaatccatcattctctggtacctcaccaaggaggacatgacctatggtgtcacccggcgccgcctcaccggacattctcacttcgtccaggacgtcgtcctctcatccgaagtgcaccatcgtgctctccggatcctgggacggcgagctccgcctctgggacctcgggggtgtgacctctgcccgccgcttcgttgaacataccaagtacgtgctctcagtgtcgttctccatcgaacaccgtcagatcgggtcggcctctcgtgaccgcacgatcatgctgaggaacaccctgtgtgagtgacagcacgcgataccagatggagatgcgcattcagtattgagtaagattgcgccgtttctgacctagtactcttcagccaaaacattgtttctgttatctggtaccggtacgannnnnnnnnnnnnnnnnnnnnnnnnnnnnnnnnnnnnnnnnnnnnnnnnnnnnnnnnnnnnnnnnnnnnnnnnnnnnnnnnnnnnnnnnnnnnnnnnnnnnnnnnnnnnnnnnnnnnnnnnnnnnnnnnnnnnnnnnnnnnnnnnnnnnnnnnnnnnnnnnnnnnnnnnnnnnnnnnnnnnnnnnnnnnnnnnnnnnnnnnnnnnnnn

SEQ ID NO: 3353 - DNA, 960 bp, Glycine max
  misc_feature (960)..(960): n is a, c, g, or t
  Peptide Sequence Number=SeqID_6818
  Probeset Number=SeqID_13132
tcgagtcagctacgtaggcccccccccccccctctgtgtgttgtgtttattgctgcgcacgtggacttcgtaaaattgtcttcccatagttttcacataatccttcaagatgggtaaaagtttacgtagtaagcgcatgaggcgcaaccggagtgtcaagagagtcaagacctacaaccccaaagttgaagctaaactgaaagaagcacttgctttcgagtacaacgatcagacagaaaaggctcatctatccatctttcacgatgttatgaatggcccaccaccagctgtcccagggttggagcctggtagtaaattagctcgagctcatcttacagagggtcatgtgtctgttgaaagaatagccaactttaatgtcgggaaactgggtaggctttgggagtcagctacccgagctgtaactaaaggtgcccgtcaaattcccgacccaccatcagacccagaggatgaagacaaaatggatgataaggaaccaagaatatatgatcccaaaacaatgaaggatcagtatggtaactatcctccctggatgaacaagaagaaggtgaaggcaaagtctcacgctgccaaagttcaaaaggccaaggataagcgagtagccaggaggaagtcaggaagggtgctccgtaaagacactgatggacaaggaaagaaaccctcatcaaagaaaaatgatgatagtgatgagagcgatatggaggttaattattataaataacaaatttattgtaagatcacatgtgggctaggtgtccagtatttcttactggttgcctgacaagaaactacttgttcatcagtgatagataagaaatgtaatttcttcatagtatttactgttactgactgaccttgagcatttgtatataccttgtttttattgaatataaacaattccaataaattgattacctattttgcaaaaaaaaaaaaaaaaan

SEQ ID NO: 3354 - DNA, 692 bp, Glycine max
  misc_feature (1)..(19): n is a, c, g, or t
  misc_feature (250)..(250): n is a, c, g, or t
  misc_feature (392)..(392): n is a, c, g, or t
  misc_feature (630)..(692): n is a, c, g, or t
  Probeset Number=SeqID_13133
nnnnnnnnnnnnnnnnnnnaaaaatcccttggtactcctttattacaataaaccaggtcaacaaataaggatttttagcgagctaaagacaataatatacttaggaaattaagctctctctaccttggggtaaaacctgatccaataaaaagtaacatcaaagacaaaaacagcaacagaaatctaaactattaagaatagcatgataatcatcatcatatcaggaggatggattggggggggggggggnaattccctctgaaagacccacagcaacttcaacatccctaaaggaagttcgagatagggctttttaatttattatttttctttaaccctttgttggctgggccttgccccctgactatatttgtttgccagtgggggaactnatgaaaacaacttccagcggcttgctaaaatcccctatgtcgcagctcatcgaaataaaatgcaggattctgcatgttgtcctaaacttttctggaaatccaggtgcctggaactaaacactttgtgtcttaggggaaatgccatgcggcttccttatctgaacaaaaaatcttacccagaatcaacaaaacccccgctcctttggcaagtgacatctcattgggttgcataaaaaannnnnnnnnnnnnnnnnnnnnnnnnnnnnnnnnnnnnnnnnnnnnnnnnnnnnnnnnnnnnnn

SEQ ID NO: 3355 - DNA, 1622 bp, Glycine max
  misc_feature (166)..(166): n is a, c, g, or t
  misc_feature (337)..(337): n is a, c, g, or t
  misc_feature (942)..(942): n is a, c, g, or t
  misc_feature (1017)..(1017): n is a, c, g, or t
  misc_feature (1422)..(1422): n is a, c, g, or t
  Peptide Sequence Number=SeqID_6819
  Probeset Number=SeqID_13134
ccgctgcgccgtccgcggcatatacggtctttgtaatgcgtgcaagtagaacacagagtgtgagtctacgtatcgacggcacagcgacgcagccgtggttcactgtatagctatacttgatcctgcgcgcgcgtggggactgaagaatactgtagctcgctatatntctccgcgcgtcgtctgcgcggcgcgagatcagatattacgtctcgctaattgacgttatctcgcgagacacacggcgtccgtattatttgtttgaatgagagtatgcgaggtaccaagacgtgcgccgttgttatacacaacacatatatattttatacatatgtaggcngcggcgggcgggtcttcgagacggattatattattctcaatcattttacgtggcgacgagccgcactatatattgttcggcccgcgcgtatatttatattccaccgcaatacggcgtgcagcgcggactgcggtgctgggcataaatgaagggtgcgcgaggaatctcgcagagcaattgacgcagaaatatatattgtggaggagttgtccgcaacttacaatgatttctacttatataacataagtaaataaataatataatatatgtacaggcacggtgtgtgggcgaataaaaccacgtgttctgtggaagactgcgagacagggccttaatgtgctcacacaactagcgtgaatgagaggactgaacacacgtggtgcttctatataaattcgcgtcgtgtgtgccacgcccgggcccgttttatcgtatttattacggtcgcggaggcggttatagcttcagacgacgtttggtaatgtgcgtttacaaggccgcgttatttattatctagcgcgacgcgcgagggggttgtttttatcatccgcgggcggcgggcgctgtttattccactatagcgggcgaaatatataatatggcgngcgggagaaaaacaacgagaaggatacgtatagtgcggcgacctctatgcggtctgtttatacgcaagagttctnatatatcatttacttcacgcggcgggcgcgggcaggattagcggggttgaaaattaccaccgcgtgaggatacttgtaatttccatttgttcgtcttttgttcaaggggggcggaggcggcggcgtgccgaacacgccggcattataaaaaagggcgcgagttacagatatattaaaatataataaagcgcgtcgggaatatatatagagagatacggggcgtggattgtgtgatattaataaataatgtgaatggagtaataaatagatgtatccgttcggtggttcgctattttattattatagcgttgcggtgttagagttattgtacgccgcgaatttatggtggatgacacggtgtgggggaataataagagggaaaagatgcgggtggtgcggggcttnacgcgtcccacataatctctctaatacaaaagaggcgggggagcggcggaaacaagtaagagatgatggagataaagatagggcgaataggggcactaaaaaaggtcaagtaacaaggcgagagagagggatacacgggtggtcaaaaatatgccaacggtcgctaacacgtttcgaccgtatctatggtggggcatata

SEQ ID NO: 3356 - DNA, 1466 bp, Glycine max
  misc_feature (38)..(38): n is a, c, g, or t
  misc_feature (51)..(52): n is a, c, g, or t
  misc_feature (55)..(56): n is a, c, g, or t
  misc_feature (62)..(65): n is a, c, g, or t
  misc_feature (78)..(78): n is a, c, g, or t
  misc_feature (103)..(103): n is a, c, g, or t
  misc_feature (108)..(108): n is a, c, g, or t
  misc_feature (110)..(111): n is a, c, g, or t
  misc_feature (133)..(133): n is a, c, g, or t
  misc_feature (145)..(145): n is a, c, g, or t
  misc_feature (162)..(162): n is a, c, g, or t
  misc_feature (178)..(179): n is a, c, g, or t
  misc_feature (181)..(181): n is a, c, g, or t
  misc_feature (291)..(291): n is a, c, g, or t
  misc_feature (297)..(297): n is a, c, g, or t
  misc_feature (347)..(347): n is a, c, g, or t
  misc_feature (442)..(442): n is a, c, g, or t
  misc_feature (532)..(532): n is a, c, g, or t
  misc_feature (544)..(544): n is a, c, g, or t
  misc_feature (706)..(706): n is a, c, g, or t
  misc_feature (720)..(720): n is a, c, g, or t
  misc_feature (750)..(750): n is a, c, g, or t
  misc_feature (826)..(826): n is a, c, g, or t
  misc_feature (838)..(838): n is a, c, g, or t
  misc_feature (886)..(887): n is a, c, g, or t
  misc_feature (896)..(896): n is a, c, g, or t
  misc_feature (987)..(987): n is a, c, g, or t
  misc_feature (1027)..(1027): n is a, c, g, or t
  misc_feature (1074)..(1074): n is a, c, g, or t
  misc_feature (1253)..(1253): n is a, c, g, or t
  misc_feature (1261)..(1261): n is a, c, g, or t
  misc_feature (1347)..(1347): n is a, c, g, or t
  misc_feature (1415)..(1415): n is a, c, g, or t
  misc_feature (1425)..(1425): n is a, c, g, or t
  misc_feature (1466)..(1466): n is a, c, g, or t
  Probeset Number=SeqID_13135
tgctgctccgtcttctgtgtgtcgctggctcgcccccntgcccggctcccnnccnncccccnnnnccccccccgcccncaccacgcgcgacgtgtgctcgagngcggngnnggtgcgttgggtgttgttggtngtatattgggcngcgcgagcgagagagcnaccgcgggactgacanngncggggctcgtggcgcgtaactctaccgcgctaccgctaccctccccactatcatattcgtctccggcttcgaggcatctcatacacaccctgtagctgccattgcgatgnacaatncatgcactcatatccctacggtgtactgaatatcatacatatcatgcganacagtcgttcttatccagcacaccgtcttgatcttgatcgctctcgcatccgacatctcacactcatcacacaacacctccacctcataataacnaatagacaaccacaacaacacacgcagacacagagacgacatacaacacgacgacaagaagcgcacacttctcacatgtccacaggtgcnacatcggtatgntgcgtattacacacaacagacagcagcatatctatatataatacagcagaacagtacacacacaacgtctcctgcgaccgtcgagacttacacgacgcgagcagtataacgctctccactatctacatatcacacactacaacaccacacaccacacacgcntacaacagtgctcncaacacacacactctaacccgcatatatanacatcacactctataacctgcgacattgcagtccactgactagctactgcctcgccgtcactacatacaactatancacaccaacaanactaaccactacacactaatcgaacacatgactatgcaatatcacacnnccaccaacncccacaacacagacaccctactctcatatcactgatacatactcacgtgccacgtcgaccgccagcgcccgacgcatcgctcggcgcagcncgcgaccacctcgcactaaaacgacgtgcgcgatcgcgantactggctcgacgatcacattcagtgaagctctagtcatcatataanacattattgtgtgtctgccgtagtccctccacacatcacgccgcatgacactctgacgatgactatctgattattctactcgcgtctctgtattaatatatacagagaaacgacacacaaactctcacacacacaacaaccaacacacacacacaccaataagtacatcacaaacgcanacaacacngcgacactcacaccacacataacgacgtgcgctataacgtcttctactcgacacgtgttgattactgatagataatacaaaaccanatcgtcgccgctgttcataatacagacgcgtcgtcgtcagcacgactcccacgtatagatctcctccnaatctctccnatcggaccttgcggactactctgcgcatcaagacgcaactn

SEQ ID NO: 3357 - DNA, 2094 bp, Glycine max
  misc_feature (15)..(16): n is a, c, g, or t
  misc_feature (19)..(21): n is a, c, g, or t
  misc_feature (92)..(92): n is a, c, g, or t
  misc_feature (180)..(180): n is a, c, g, or t
  misc_feature (286)..(286): n is a, c, g, or t
  misc_feature (290)..(290): n is a, c, g, or t
  misc_feature (309)..(309): n is a, c, g, or t
  misc_feature (451)..(451): n is a, c, g, or t
  misc_feature (476)..(476): n is a, c, g, or t
  misc_feature (542)..(542): n is a, c, g, or t
  misc_feature (574)..(574): n is a, c, g, or t
  misc_feature (579)..(579): n is a, c, g, or t
  misc_feature (592)..(592): n is a, c, g, or t
  misc_feature (628)..(628): n is a, c, g, or t
  misc_feature (630)..(630): n is a, c, g, or t
  misc_feature (675)..(675): n is a, c, g, or t
  misc_feature (693)..(693): n is a, c, g, or t
  misc_feature (717)..(717): n is a, c, g, or t
  misc_feature (754)..(754): n is a, c, g, or t
  misc_feature (769)..(769): n is a, c, g, or t
  misc_feature (815)..(815): n is a, c, g, or t
  misc_feature (833)..(833): n is a, c, g, or t
  misc_feature (898)..(898): n is a, c, g, or t
  misc_feature (902)..(902): n is a, c, g, or t
  misc_feature (934)..(934): n is a, c, g, or t
  misc_feature (939)..(939): n is a, c, g, or t
  misc_feature (951)..(951): n is a, c, g, or t
  misc_feature (1082)..(1082): n is a, c, g, or t
  misc_feature (1239)..(1239): n is a, c, g, or t
  misc_feature (1277)..(1277): n is a, c, g, or t
  misc_feature (1296)..(1296): n is a, c, g, or t
  misc_feature (1336)..(1336): n is a, c, g, or t
  misc_feature (1414)..(1414): n is a, c, g, or t
  misc_feature (1441)..(1441): n is a, c, g, or t
  misc_feature (1510)..(1510): n is a, c, g, or t
  misc_feature (1581)..(1581): n is a, c, g, or t
  misc_feature (1587)..(1587): n is a, c, g, or t
  misc_feature (1608)..(1608): n is a, c, g, or t
  misc_feature (1623)..(1623): n is a, c, g, or t
  misc_feature (1661)..(1661): n is a, c, g, or t
  misc_feature (1721)..(1721): n is a, c, g, or t
  misc_feature (1803)..(1803): n is a, c, g, or t
  misc_feature (1820)..(1820): n is a, c, g, or t
  misc_feature (1863)..(1863): n is a, c, g, or t
  misc_feature (1866)..(1866): n is a, c, g, or t
  misc_feature (1872)..(1872): n is a, c, g, or t
  misc_feature (1880)..(1880): n is a, c, g, or t
  misc_feature (1933)..(1933): n is a, c, g, or t
  misc_feature (1938)..(1938): n is a, c, g, or t
  misc_feature (1943)..(1943): n is a, c, g, or t
  misc_feature (1971)..(1971): n is a, c, g, or t
  misc_feature (1976)..(1976): n is a, c, g, or t
  misc_feature (2002)..(2002): n is a, c, g, or t
  misc_feature (2094)..(2094): n is a, c, g, or t
  Peptide Sequence Number=SeqID_6820
  Probeset Number=SeqID_13136
ctattttttctgaannctnnnaaacacaacacggcggagacagagcccgtagtagtagcgcgcgcatgacgcatcacacacgccacaccaancacggagacaccacgtctggtatatcatagcgcgcgcgtctcgcgctagtctatctagcattacacctcagtatcgtgctcagcctgntacgttgtttatgctgtcgcgctagagatacgctgatgtgattttattgatatattggtgtaatatgattatagcgtgcagtagtttggaataggtgctgtgtcantgtntctattacagatagttgantgctggctgtatgtgtgacactgagacgtcactgcttggcgagcaatagcctacatcgtggtcagaatgactgacgaggcgcacaccgcagctcgtactatccgagagtgcggctagcatgctgcagtagacgctgtactcnatcgacattatctacgaagatgcanacgcgataagacgatacgtgatagagtgatcgtcacacaccgtacacgaagtaggcatacgtcganctagagagatatgacacctatcatgatacacnacatncaactcctgcacncatgtcgaagatatagcagctgctgagataatagananccgagacataattgagtatgtgacgtagaagcaatatttgacaancgacgaagcagtcactcnacgatcagacatcatgttaacgangactgaccgacgcagacgactgatcagatgctcactncatacgtgcctcgcnatcatacgatcttcatactgtcatctatgcgctagcgcacgccagncgatcatgcctgcagctnctgtcgtgctgactacagagcgcgaatcgggtcgagtggacgacgatgtgtaatgatggagcatnctgntctgtcgtgtgctatgcgtcgagtgtctgtantgtgnatgagagacgangaatagtagacatcctacgatgcacgtgagtctggatgagacgagtgttgcttgacgcatgatcatacgagtgatcacatggtgctcgcacgatccgagaccaccatgtacatcatcatactctctcgcgnctcactgcatcgtcagatgagtatctctgcggtcagtactgctcagcgctggacgatcacagatagaagtgagatatgctccgctgatttatactgatactggctctgttgtacacgctctgatagcgactacattgatagtatactgacgaccgcntgtgagcacgtatatacgtctagtgatgtacgtgacancgtatgatcagagccagtnagtctatgagtcttcgtcgagtcgactgacactatagtantgacaatgtctgtggacgctgatctgatcggctagctatgactcgagcagacgcacgcacgctgatgattattacgcngaagagtagctcgactgacgatatgantgagtgactgaacctctcgacttgtgtagtcttatactctgcatcatctgcactgcgtccgattaactngacatcatagatgtactgcatatagtacgcactgcattctacgacagtcatctatcataatgtgctagttnatgtanattcgtacacggtctgacgcnactcagtatagacantagagaaatgacatatctctactatgtatcaacgtgcntctaacgtcatgactcgcgcgacagctcatctctacacgattgattactgtgcagtcatntactacccgagtcgcacacgcagtgatgatagtatacatgtatgataccttgtcatcgcgatatcactatggtcgtacattncactctgatgatggcangatgtgatatatgactgtgagcaccggcagcgtgtctgctgantancaaagnatgtgagncgtcgagtcgtactgctagagcgatctcatgctcactctcgtgaccatgtctntacangtctnctaacacagcagatgatgaacatatatnagttngtactgacgcacgatgagtagatgantagtgtgacgactatgatctcacgacgtcacgcatgcgcgacgagcaacatgctgtaacgtgacagatcgtgcaatcgacacgatatctcgn

SEQ ID NO: 3358 - DNA, 1366 bp, Glycine max
  misc_feature (1)..(1): n is a, c, g, or t
  misc_feature (114)..(114): n is a, c, g, or t
  Probeset Number=SeqID_13137
ntgtggtcgagttctgcgcggtagactatcgtgtggagatagacgtataatcacatgtgtgtagacacatagtggtatgtatgagggagtgtgagggttcttggcgtactatgnatacagtgagattagagatcatgtgtgtgcgtcgcgagtgcggaggagggcgttctttgaccggagcgtaatatagttatctaggtgggtctggcgttggcgaacataagctagaaaagtggcggcgggaggcgtgataataataaatagtgttagggtaggattatgatatggcgcgggatatagaatggtgcgggctgcgtgtaactggtcagatatatgcgcgcaaatataatatatgcgtagatcgaagatgtagccacccccgcgattaccgatgtaactatggggcggaggggagagataggagaagggatgaattaagtggttataggtgaaagaacataaagtgcgatacagaagggtgtgtggaaggatagccaggtggatgtctaaggcggcgatagagcgaataaagtgaacgacgtaagtataaagcggacatagatgagtgttttattatgattatatggtaaaggcatatagtggtggagcgggcggaaaaacacgaataaaaaacaaatggagacgagtaatatggggagcggcgcacatgagcaaatagtggggtgttatatagcgattcgatcggatagaggggaggcgaaatattgtcgcggggggcgactcgtgagtctgtgaggagatataccacaatatatactcgcgcgggcgcgacatacaaaataacaaaaaataataggggataaggaaatacccataaagagaaagcaggaggtagtgcggggtagacgactacctaaaaatgccagatccatttgcgagtgagcatcggggtgctctctagattacataaactatcggcgcgattatgaaggaagaataggtggcgggagggggggagaatataagtataaatgaaataaggagaaatcaccggtataatagaccactagacgcgccgctacaataaattgtaaagaaatacaggggcggggggcggggtgggggggggggataaaatatatatatgtagaccaagatgctttgtggacggtgcgtggatggggattattaggatagcgaggacgtaaagcaaacctaaacccgatgttagggcggcggggcacgcccgcccatcccacaggttcatttcagcagagtttggggcgatgagaagggcgagacaaagaaagggcgggggggttgtggtgtaaataaaataagaaatataagctgtttgttgcaacacgtataagggggaggaggtcacgagaaacggcggaaaata

SEQ ID NO: 3359 - DNA, 4110 bp, Glycine max
  misc_feature (1)..(1): n is a, c, g, or t
  misc_feature (4064)..(4110): n is a, c, g, or t
  Peptide Sequence Number=SeqID_6821
  Probeset Number=SeqID_13138
ntataacctcattggacaagaaaaggcaatagttgaagacagacttcatcgtctttttggtgtttgggcaaaagatggtattgacatgttgcttcataaatctcttgtaaagattgatgagcaaggtcaggtgacaatgcaccacttgacacataacatggtaaaagatatggagtatggcaaaaaagaagaccaacctgcatcaaattatgggagcatgtgtgatttgatggaattggacaaaaacggatatgtcatggaagaaatccaaccttcgtctaatgattactaaccactggaatatgaatatcacaaatgctgtacctcctctattttgctgcctgctgcgacggatagcacccaaatccgtacccagctcgcggaaaatttggatttggattttgctctaaatcacattctttgcttcttttttcttactttcttgttccttcttcagcttggatttttggcgtaacgaggaaggggttattgttgagaaaccctagcctaaacctaaaccatggcgcataggttgctgagagaccacgaggccgacggttgggagcgctccgatttccccatcatctgcgaatcctgcctcggcgacagcccctacgttcgaatgacaaaagcagagtatgacaaggagtgcaagatttgtacacggccattcactgtttttagatggagacctggtcgagatgcaagatataagaaaactgagatctgtcagacatgtagtaaattgaaaaatgtctgtcaagtgtgccttctggatcttgaatatggactaccagttcaagttcgagacacggctctcagtattgattccaatgatgccattccaaagagtgatgttaatcgggagtattttgctgaagagcatgaccgtagggctagagctggtatagattatgaatcctcttatggtaaagtacgcccaaatgatactatcctgaagcttccatttgcgacggatagcacccaaatccgtacccaacggaagttttggatttggattgttgtgctctaaaccataatctctgcttgttctactttcttgttccttctttggcttagattttttgtgaaaccaaaaagggttattgttgagaaaccctaaacctatccaaaaccatgacgtttaggttgctgagataccacgattcagacggttgggtgcgctccgttctccccatcatctgccaatcctgtctcggcgacataccctacgttcgaatgtcaatagagtaggatgacagggagtggaggatttgttcacgtccattctctgtgtttagacggagacctggtcgagatgctagatataagaaaaccgagatctgttcgacatgtagtaaattgaaaaaggtctttcaagtgtgccttgtggatcttgaaaaccgactaacgtttcaagttcgagacacggctctcagtatcgattccaatgatgccattccaaagagtgatgttaacggggagaattttgctgaagagcatgaccgtagggctagagctggtatagattatgaatccttttatggtaaagttcccccaaatgatactatcattaagcttcaaaagaacaacaccatattacaaaagaaaccgagcgcatattttgcagtttctactataaggggtgaatgtactagaggagctgagtgcccttatagacatgagatgccagaaactggggaattgtctcaacaaaatattaaagatcgttactatggggtgaatgatccagtggctttgaagctacttggcaaggcaggagagatgtccaccctggaggctcctgaggatgagagcattaaaacgctttatgttggtggacttgatgctagggtcactgaacaagattttgcgggatcacttctatgcccatggtgaaattgaatctatcaaattgatctgaacctgagtttgagctctttgaacatgaacagccagaggatttggtggaaaggcagcaatagaactctcgaactagttggataatatgggcagaaccctgaccaagcactgggaaaggtctactatatcaatccaccaagcaactccacctcatcagcaggagagcaggctatagcgtatcaaaggatcataccaagaaacgggtgatcatattgcacctcaagatcgtccacctggtgggccttatgggtcagtggataaaactcctatgtcgcaggcctcagacatccaaactggtatcagttgactctgaacaagtaaagcagcaggattctttccatcaatgttcattgttgtctgggtcagtggtatcaggggagcacaaccaggacttagcgaagtgaatgctgtaatattatgccccaccacctcttccgcagcaaagaggctactaccctgcatagtatccaccaagtgtgtgtacgcccgttccatccccttatcataagtacaccgcacctccatacaaagctgaagtggcaccctcccagccacaagaggcaattcatccttattagcattctatgcagccagcttcttctgagccaggatattacccaggctgtctttgcgacagctgaatctggcaaatcaacatctgggtaataccagcaatacgattcgcccatttactgattatatttctagtaatgtttatttattgtcctaagcttttccccatgaggcgaccgtgctgacagggaagatattttcacgcagggtgtctatttactatctctgctagattgatatcgatcgcgttgtagctagaaccatttattttttgacctggttctgtgcatacccaataggtgggttgctccttaaattaacgtcaatgtcagcgtgaaaggtgacacatctgttgcaccctgattttctctttggcttgaagccataggttctgatagtagtcatgtacgtggtatttggtgttctcctcgtatctctccactgtctagtgcctcgtgcgagtcttataactccttctgacgtgcctaggtcagagttggagcctccattccttttgggtgcctcaggatgtttcggctcatgtctggtagagctttgaggttcgtcaagtgatttgtaattgttgtatgtaacacccatgctggatcatcacatgatgctgctgttcggctttatgcgtctaccgtgccctgacccatgttgccgcctccgccatttcaatactacaccgatcccatctgtgacccctcatggttctcttccccggcctcttgcgtcacagaagcacagccaccatctgaaacacctcctgatccaatatcacgcacatccaactcttccgcaggcccctgatcacacccaaccattgcctccaccatcactgcaacatccgcttccgtcgcataccaccacttcctcctcacctgcattactggttacagtcgttcattcctcgtaccgtgctgcccctcatgcccccccccgaccagccagtcacacctcctgtcactgttcgcagcaacctctatcttcagccggattgataaagccttcatcctctgccctttaaccaccccccacatcatcattggcattgacgctatcacccccatcgtctactgcttcgccccgatccctatccgcattgccatctgctccatctcatcatcaggctggctcttcctcaccgacaccctctgcccctatacctgccccacgctacaaaccgccatcatcctcataatcagaacctaaatacgcttcatctgggatcgatgctcccggcgctttgtagctacctagctgatgtgggtagtggcttgaactagttattatattttgtgcttttgtaactcttgacttcctggttagatcagagtgatgctcagctttagtatattactttgcactgaattctaatgttacaacttgtgttttggtatatagcattgggtaaagatgttcaattaattttatatgccatcaagtagttcgtggagtatgtatatagattgttttagtgcgttctaattgctatttctaagggatgtattgtggaaaggcttcaattggctcttcattgcctgtaatattagtcggtttttcgnnnnnnnnnnnnnnnnnnnnnnnnnnnnnnnnnnnnnnnnnnnnnnn

SEQ ID NO: 3360 - DNA, 1509 bp, Glycine max
  misc_feature (11)..(12): n is a, c, g, or t
  misc_feature (64)..(64): n is a, c, g, or t
  misc_feature (88)..(88): n is a, c, g, or t
  misc_feature (1264)..(1264): n is a, c, g, or t
  misc_feature (1313)..(1313): n is a, c, g, or t
  misc_feature (1387)..(1387): n is a, c, g, or t
  misc_feature (1487)..(1487): n is a, c, g, or t
  Peptide Sequence Number=SeqID_6822
  Probeset Number=SeqID_13139
ttgcctttctnntcttccctcctcctctttcttcatcttcttctactctatcaccatctagtanatgacactgtatattagttaaccntaattcacacacatataatcccacgctcaatcacacaccacatgcgcggtctctactataatccctcaacctactacatcattctactccgccacacaagattccactcgtatctacagatcaaccgcataatcacctaactacaacagcatccacaacacatattatcttacataccacattgcatatcatcatcctaatcatcctctctacgcacctctctgcgcatcgtaataagaagacacatcatataacaacgtaacaacatcatcgaacgcacatagcattagagcatgacttcgtagctctcacttagctacccacacacttcttcccactgctcgcaccttcgtagcacgactcctcttaacacgtctgccctgccgccacatgcacttccaactccctagagacttatacgtcctactccctccactcctctcgttgtaccacttctcgccttcacaaccgcatctctctacacaccacttccattaaacataaatatatagattttaccataattaacatcactacccgtgtacatcccaaccacacaactctgctctacccgagaatctcctccctccccataatcatcaaaactctctacccccgagcgcttaccctctctccactacgcctctcttctgtctactcactacattcacacactctcgtcaccatacactctacactactcacaattcttgacagcctccgcgccctcctggtcgctcgcatgcaacacaccgattatctccaccctctcccattattctccctccacaatattctgtctctcacaactactaaatcctgttatacactcctgtctctattttcactcccacctctaactcccataacacaaaacaaacctcctttacgccactccatcctctccgtctatctcttcatagctcacacgctctctcacgctcttctctaacctctccgtctctcctcgcaaacacacataacacctcgataacttatgcaacatatcacacacccatactcatccgcattacaatacagtcttccacacactctccctgctggatactctcacttctctcctattaccctattctcttcaaacactcctatacttcactacaatacgagtatgcatttctcgctctctctcttccatctgctcttcagtccccnctcacgccccgaccatacatatccctctctcatcttgcgataacaccanaacctcgttaattcatgtcttatcatagtaccaccctgtcttcctctacacaataccacacttatcacacacantatcgtatctccatcacactgtatctccactatagacatctactcaaatatatagatcgtactatatttaggatcactcatcctaacactatccatcagntacgatcactatctgaatctct

SEQ ID NO: 3361 - DNA, 622 bp, Glycine max
  misc_feature (622)..(622): n is a, c, g, or t
  Peptide Sequence Number=SeqID_6823
  Probeset Number=SeqID_13140
tcagctacgtaggcccccccccccggtaaaatcataattccacttatctaaagagaaattattataaaatgcaaattttcgttaagaccctcacaggaaaactatcacacttgatgttgagccttcagactcaattgaaaacgtcaaggccaagatccaagacaaggagggaatcccaccagaccagcaaagacttatcttcgcaggcaagcagctcgaagacggcagaaccctttcggactacaatatccagaaagaatcaacactccatctcgtcttgagactgcgtggtggtatgcagattttcgtcaagaccctcactggcaagactatcactctcgatgtcgaaccctctgattcaattgaaaacgtcaaggccaagatccaagacaaggagggaatcccaccagaccagcaaagactgatcttcgcaggcaagcagctcgaagacggcagaacgctttctgactacaatattcagaaagaatcaacacttcatctcgtgttgagactgcgtggtggtatgcagattttcgtcaagaccctcactggcaagactattaccctcgatgttgaaccttcagactccattgagaatgtgaaggccaagatccaagacaan

SEQ ID NO: 3362 - DNA, 472 bp, Glycine max
  Peptide Sequence Number=SeqID_6824
  Probeset Number=SeqID_13141
aacatttgttctagacagatctccatatctgttcccaaaagcttgtttgtaagaatggcttccggtgaacagaattccctcctcaacaacaacaaacacagcctgggaaggagcatgctatgactccagtaccccaattcactagccctgactacagccttcaataacttcagggagatgcatagtcactggggtgattctggattgacgagcgtgtgtaactgtttgcctagaggtgtacgtggcctcactatgtaaaggcatgagacaagacgcaggaccttggaatgtcaaaaagcagacttcgtgcaagatcaatgcaaacatctgatttgttacaatgaactcaaaagtggttaaaaagccagaagcttagggtgattggattctggaaaaaagggtttaaaaaacaagggggaaccgggggaaataaaagaccaagtttgaaaggttttctaaaaaattttccatt

SEQ ID NO: 3363 - DNA, 412 bp, Glycine max
  Probeset Number=SeqID_13142
ttggaagcaaaagtacaccctatacttattcaagctggaagctcttagggtggtcaaaaatgtgggatcagcagccgtcgacgagactacagaggtaccagcaaaagtggaggctgcgccgagagggatcatgccacgacagctggagccaaacaacagttgcctgatcttatggggcagtaccggtgggctcctgcgcaaggcacaggtggaggagttatatgtattgactggtgactcatccaaagaacagatctttgaaatgcccactggtggagccgttatcatgagggagggtgctaaccttcttaagttggccaggaaggagcactgcttggctcttgggactaggcttaggtcctagtacaaaatcaagtactatttctacagggtctttcataatggcgaggtt

SEQ ID NO: 3364 - DNA, 1400 bp, Glycine max
  misc_feature (124)..(124): n is a, c, g, or t
  misc_feature (259)..(259): n is a, c, g, or t
  misc_feature (261)..(261): n is a, c, g, or t
  misc_feature (343)..(343): n is a, c, g, or t
  misc_feature (598)..(598): n is a, c, g, or t
  misc_feature (628)..(628): n is a, c, g, or t
  misc_feature (925)..(925): n is a, c, g, or t
  misc_feature (938)..(938): n is a, c, g, or t
  misc_feature (947)..(947): n is a, c, g, or t
  misc_feature (1058)..(1058): n is a, c, g, or t
  misc_feature (1226)..(1226): n is a, c, g, or t
  misc_feature (1312)..(1312): n is a, c, g, or t
  misc_feature (1334)..(1334): n is a, c, g, or t
  misc_feature (1400)..(1400): n is a, c, g, or t
  Peptide Sequence Number=SeqID_6825
  Probeset Number=SeqID_13143
gggcgttgagtggagggttattcatctttcttacaccacacacacaccacgcgaatatggcgtcgctatatggtagttcgatattcttagttacgtgatttttatatatgccctctccctctcncacgctaaaagtatacatggtagaggtcgccacccgctgacgggcgcagcgggaatggtaggataagtggggttcctcttcacttgctaaggatctggccgtacgagtaggaggagcacgcgtgtcgtcattgcntntgtatctatacgggcgcccggcggggacggatccaccagcggagaatggtagcacacacgcgcacttctctcgcctaccagnaacacacacacaccagagagaggagagcagatcagtgcaagactgtcacgaatgcgcactaatagcagagtaaaaatgacgtatatcaataaagagatagaaagatcgtacagacacagatttatatattatcacacaccaataactcactctagagtaaagaactatctacatcgtcttagtgtttataagttttagcatattctcgatccgcggtgcttggtacgcgagtcgcgtgtccgccggtagcgtagngatttaacgaagtattatattatataatanagaatcacatattactcagaaacatcataacaaataccataacacccagaatattagacgaacggaaacacttacccaacgacttcgttaatggtgtctgctcctctctcttcagcattaggaggcgcgtagcgtcttgagtagctggtcggagagacaacgatcgtatcaaatctctcatatacatagttgcgaaccacgcgtcgcctgtgactacgacaccctacgtcaacgcaggcgatcgcatctccacgcgccagacgtccgctcttttataatgatatctatatcgtgatnatacaacgctatnttcagctanattgtgaatattgcgtatccagtctggagtaataatctactgcttaactccacacatacactatctatacgtttgcgccacacatgcaccgcacatccacgacgcccacgngctcagtagacgtacgtatctgatactaagcatcgaacggaaccataactacacatactctcaatattgaatgtaatatagattacacaacgcagatcaatcgaccattaatatcgccatactcatgctactgtatgtgtcttaacatatagagacatagagatatgnatatacaacagctatatgagactgatagagatgcatacagtgcacgcagagaagcgtatagtgatcagaacatacgtcacgtgtcnagcggcatcgtcctgggtactnacgcgcagactactcacactaacgagatagcgcagtagcatatatatatatgatctacgacactgn

SEQ ID NO: 3365 - DNA, 631 bp, Glycine max
  misc_feature (556)..(556): n is a, c, g, or t
  misc_feature (631)..(631): n is a, c, g, or t
  Probeset Number=SeqID_13144
tcgagtcagctacgtaggccccccccccttatctattcaaaacacaatcttaaatacaactatcaaatcttttaactttctacaatgcccggaactattactttcagacctattgaagctaatcttactcacaacactgacattctcaccaagatgaatccttattgcgctttcatcgttggcaacaagagaatcaacagtgaaatctgcaagcacggtggcaagcactctcaatggcatgatgccgtcactgtccccttcgccaacgaagccaagatcatggtcgaagtcatggacaaggacagactcaccaaggatgaccatatcggctctttcatgatcgatgtctctgagctccaagctaagggtcaatccagcaagtggtaccctttgttctacaagaacaagcccgctggtgagatcttgatggaagccaacatccaaggtggagacatgatcggacaaactgacttcatccaaagagaagaagccatcatcaccgaacccgccatcatcgaaaaagaagaaatcatcgtcaaccaaaagcccatcgtcnaagaaggtgtcaagactttcgtcgaacaaagacaaactgtcgaacctcacactttcttgaaggaagtcgatatcn

SEQ ID NO: 3366 - DNA, 816 bp, Glycine max
  misc_feature (816)..(816): n is a, c, g, or t
  Peptide Sequence Number=SeqID_6826
  Probeset Number=SeqID_13145
tgtttacctgtcatgtttgtttctgttgaatgatgaacttgttaatcctcgttgatcccattacttggtaaacaggattgccattccccatacgctccattcatcaccctttctttcattctgttgcgaattggaactcacactttcagcgtggaagtcacacttttcgccttctgttccgttagctagctttatttgcccgtcgagcgtttgtttgcgggtcgcaaaggaattaagagctcgcaatgcagtttcttagcgggagcgagcaaagtgagctttcctaggccggtaggtcaagttagccaccttcgcaaacagcgccaaacgcgtcactgcggtgctgaccacgcgacttgcaccggtgacaagatcctgatcgcgaacagaggcgagattgccgtccgcgttattcgaaccgctcatgaattggggattccttgtgtggctgtgtactccaccatcgacaaggacgcgcttcatgtcaaattggctgatgaagccgattgcatcggggaagcgccgagtatccagtcctacttgctgatcccgaatgttctgtcagctgctattagccggagatgcaccatgtagcatcctggctatggttgtctatggggagatgcagggtctgttgaactgtgcagagaagctggaatcaactgtatttgggctgacactgaccgtattatggttataggggacggatgcactggcagacagaccatgaagtaaagaaggtatttccgctgttctcggagtgaaggacgtatgctaggcacagtagggacggtacgcatgctacgggagataggn

SEQ ID NO: 3367 - DNA, 1655 bp, Glycine max
  misc_feature (1)..(1): n is a, c, g, or t
  misc_feature (11)..(11): n is a, c, g, or t
  misc_feature (26)..(26): n is a, c, g, or t
  misc_feature (40)..(40): n is a, c, g, or t
  misc_feature (97)..(97): n is a, c, g, or t
  misc_feature (110)..(110): n is a, c, g, or t
  misc_feature (112)..(112): n is a, c, g, or t
  misc_feature (121)..(121): n is a, c, g, or t
  misc_feature (142)..(142): n is a, c, g, or t
  misc_feature (176)..(176): n is a, c, g, or t
  misc_feature (235)..(235): n is a, c, g, or t
  misc_feature (292)..(292): n is a, c, g, or t
  misc_feature (304)..(304): n is a, c, g, or t
  misc_feature (308)..(308): n is a, c, g, or t
  misc_feature (419)..(419): n is a, c, g, or t
  misc_feature (1311)..(1311): n is a, c, g, or t
  misc_feature (1328)..(1328): n is a, c, g, or t
  misc_feature (1335)..(1335): n is a, c, g, or t
  misc_feature (1434)..(1434): n is a, c, g, or t
  misc_feature (1590)..(1590): n is a, c, g, or t
  misc_feature (1598)..(1598): n is a, c, g, or t
  misc_feature (1621)..(1623): n is a, c, g, or t
  misc_feature (1625)..(1626): n is a, c, g, or t
  misc_feature (1628)..(1633): n is a, c, g, or t
  misc_feature (1638)..(1638): n is a, c, g, or t
  misc_feature (1642)..(1642): n is a, c, g, or t
  Peptide Sequence Number=SeqID_6827
  Probeset Number=SeqID_13146
ncatacgaatnacattagtagcaatntacaactacgcatnaggccacagatcagagacaacacatagatacttcataagacaacacactacctcatnatacactacacancngtagactangattctcacagatcgcatagnagatctctatagagtagatttaagtgacgaggcnaagtagattagattagtcgtcgcatatgaagtaacgacgtcgtatttgatgatgactancggttcgcgacgagagcggatgcagagacatgcacaagacatgacagcgagcgcgantatcagagcganatantatatatactctatcaaacgcttctactctgtagacacaacagacacgtgatgtattatagtattcacatgtacgtcggcctcttgctaccacgtgccacacagtcagacncagagcgacccatgcgcctatatagaacattcttactaatctttcttcatcgcgtaactatagctatatgcgacgtcacctagagcctgccattcaatatatgtcgatcgcgcacatcgcatgtcgcgacgcctccacgtagtacgccgcacattaggttccgcgctcaacagcactgacacgcgattcgctgttcgagtttcgggatcagttctatcgcagagcacagtgatatatattaattagtgtcgagagtacgtatatgatagtgtaggatgcatgcgggtccacaacagcgcgctattgttcgatggtgtgtgagtatcagattcgtgtttgtcgctctaactgtgaatatagcagttcgtcaatttccgtgtgctgtctactgcataagtcctcttactgtgtcacggcgctgcggcgccgccgcgacaccctcacgagcacaccgcccgtcagtgaacgacaacacaactcgaacaacctccgacagcggagtcggcttatgatgcgactactcatctccgatcctccgtcaatgcagaccactccactcactgtgagcgttgtccccttcagacgcgtagtgggatgatgaatgtactatcttgtgttactatgtaggagcgtatatctcaccacccgtaccagcactctcctacggtagccgttatctgggtatcggccgaccgtcgcactcattatcagtgcatctactacatccctacgccttacgtgtgtcgcgcactaacgctctcatgccctctatgacacgcattctatccccagtatgcagtctgcggatgcatagagactcgaccgccctctatctgctcgttctacacgccttcttgcaagattatcggtcacatgcgagtctgtgttgtcntcgttagggcacacgangcgatgntccaaccatcactcttctctatttagcctcatactcgatatattcgcactctctgccgcgctcgcgcgtcttcactctagtatcacgagtatctctatnataaatatatgtgagattcgttgacggtactaaacaatgccgcgacgtgccggcgaggggatacggtgatggagcatcttcttcaaaatacaggcgacgcctacacctaattcaccatgcgattgctccgtgtatctgatgagtaatatgagtagngagggagntataaaacaaatcgaaaaaattnnnannannnnnnaattnaaanaaattttaattta

SEQ ID NO: 3368 - DNA, 1351 bp, Glycine max
  misc_feature (836)..(836): n is a, c, g, or t
  Probeset Number=SeqID_13147
ccatactatagagctacaattttattttcgtctatcagcatataagcgattggtcagacagatatcttaacggatgatgttaaggagtgatgacatattataaagcgagtattaatgtgagaaggtgtaagtgttctgttgcagcgtcgcggacggcccgacgtgtgtattgtcccttctcaattaatcgattgactctcggtcgccgtttatcagaattacagatacttcgcgtacatattactatatctcgaattactacctctcacacttctataatagtaggttcgacggacccaggcacaggtttgatagaatacgtgattcgtccacgagaggatcttatatgtttaagttttgtattattatatgttcggtggcgtgggtacgctgtggggctgttctcatgcagcaagcaactacttaaactaaatatacaatatacaacaagcaataatacggagaatgttaccatttgactggagaatgagtggaattattagcgtgttatgtagccgccggggcgacaaacggacagtatgaaagggagctcacataatggaatcgtcagtttgtggagcgcgagagtgagtcactatacgtcgcctaattcgtagtgcatggttcttatgttggtatgatctgtcacttttgagatcgatttcttacgagtcatatatcattcgatagtaatatggctgtagacgagagatatgtgtaatctggtctcttactatttatacatcttaggccgtgtgtcgcacgctatcgccgtgttagaacgataccacagtagagatagacggttactactatttctatgcaatctgacgttntagatattgatggctgttacatctcccgctactcgcgggcgatcaaatctggtataattagattacaggagaggacgaggcaaagatgcgctgaggcagtacgtggtgcaacatgaaacgcttaggtgtgacgctgtagtactgagatatgagatgtcaattacgatgtcacagacggatccgagtaagtgaagcatagagagagaagcagcagaatgtgtaatagacaccgtgtcgacattaatactgttctctcgcgtcggcctacacgatgctcagctttctcacctatttgattcacagatagcagattctaatgtagtcaagtcggatatggtagtggctgttgtcactacttgtcctgactgagataaacttctgtatcgacatcatactatgaacaattagtcactagagagatatatagctattatagaactaatatcatgagtacgaatatgagatcgagagtactgtatagtcgtattcacagcacgacgcacacgtcgccacag

SEQ ID NO: 3369 - DNA, 614 bp, Glycine max
  Peptide Sequence Number=SeqID_6828
  Probeset Number=SeqID_13148
agaagaactcgcctcttccctaacaaagcgacgaggttgccgctgggccgacgcgatgtgggatccgtcgcttcgctcggtacgtcaccacactcgcccaacaaaagcccgcgagagcgagaggagaagggcgggaaccaggcgcaggaagggggaggagaagggcgggaaccagacgcgggaaggggagaagggaaggcgtgaatcaggggaaggggcgaagtagagtagaaggccgcgctccctcgtcctcagcccgtcgtcgacgccgtcttgcctgatctgaggcgcgaactagaggagaagccggagcaccctcatcctcagcccgccgtcggcgtcgtcctgctcgatctgatctgggtttgttctccctgtaatgtatgagattacttcttcccccatctcttactgttctcatggccagatgatttttggttcaataaactaggctagggtttgctgtttctggagatttgtggtgatacgatcagtagctatgttccaagaacggtattgatttccctatgctgcgattcaggctcaatctatgtggatcgggttgtaatgctcccatgtcttttctcttaagcaatgtctctggatgcatgttt

SEQ ID NO: 3370 - DNA, 1703 bp, Glycine max
  misc_feature (1)..(48): n is a, c, g, or t
  misc_feature (1643)..(1643): n is a, c, g, or t
  misc_feature (1703)..(1703): n is a, c, g, or t
  Probeset Number=SeqID_13149
nnnnnnnnnnnnnnnnnnnnnnnnnnnnnnnnnnnnnnnnnnnnnnnncgtcgagcgacggagcggtaggcggacccagaaagggggggggacgagaccgtttgggcccccccgggcgggcagtggagaggctccccgctttgggccgcggcaggggcggggggcgtggggggtagggacgcgcggggggtttttgccccgtgttgccccagggggggcgagggaggcagcgggggggggggggagaggggggcgccgggggggggatgttgtcgggggcgacgcagggccgggggggggggttgcttctccggtcagataaatggaactacaggctatgaagaagctgcggcccagggtattatttctggtatcaatgctgctagacatgcagacggtaagccagttattgttcttgagagggagagcagttatataggaacattaattgatgatctagtaaccaaggacctgcgagagccttaccgcgtgttaaccagccgctcagagcatcggttactcttgagatctgacaatgctgatagccgtctcacacctttaggtcgtgaaattggattgattgatgatagacgctggaaactgtaccaggataagcaagctcggatttctgaggaaaagaagcgactgaaaagtgtcaggatatcaggaggggatttggctgctgaagtcactaatctgtctggtcagccagtgaaggacttttcaacattagaaagtcttcttaagaaaccacacatacaatatgaaattctagacaagcatgatttcggtgacaaaagcttatcaagaatggagaaagaatgtgtcgagattgatataaagtatgaaggtttcatcttgcgtcagcaaagccaacttcaacaggtggttgctcaacaacatagaccacttcctgaagacttagattactatgcaatgacaacattgtctcttgaagctcgcgaaaaactttccaaggttaggcctcaaaccattggtcaggcaagcagagtagggggggtgagccccgctgatatcactgctctactcatcgtgatcgaagccagacggaggaaagctcaagaactaaggaggtacaaaatgatgaatgccattcgagcaaattcccaagatgaggtgcctgaagtttctttgactgagaaagtcagctctggatgaagcttccatgtcactttgatgcccgactattctatcaattttggtatttagtgtgtcatattatgtatactagagagtcgtccgtaccatgctcatactaatatttgaaatttcataaatataaattattactacatatacatacttaaataattttgtttatttaaataataataatgtttaaatattgacagaaaaaaaaacattaaaaaaaaaaaaaaacagcttatcgaactggcaaccctccatgggggggcacgcctggcccatacgcgcctcataaggaccggtaacttacgcgcaatcccccagacatcgtcgtttatgaagccggggcggggaacaggtctcccacacccccacatcgtcccttctttgagcctcaatccccctccaccttcacccggccactaaaaaaaaaaaaaaaagagccccccccttctatccccctctccctcaaaaanttttccctctttgatcgggctattatattcatctcacattctctctctttttcttatctn

SEQ ID NO: 3371 - DNA, 268 bp, Glycine max
  misc_feature (82)..(82): n is a, c, g, or t
  Peptide Sequence Number=SeqID_6829
  Probeset Number=SeqID_13150
aagaaaatggatgggcttagccatatcggtctccctgttctgggaatactcgcagtctccgttgtcacgttctacgccgtcngcttcgctgagatcagagagaaatcgtttaaagatttgtacgactcggagaatggagagggagcagggttcaagacttcactaagttccagagagaggagattgaaaagagaagcaaataaaaaacgtcctcgttcttgaaacccagggtgatggatggttgatgattcgtggttttttttttttt

SEQ ID NO: 3372 - DNA, 476 bp, Glycine max
  Peptide Sequence Number=SeqID_6830
  Probeset Number=SeqID_13151
acaccaaagaaaagcccccctcccatcaacccgcccatctcccaccacacccgcccgacacctcaagctccatcccgatcgatagcggccaacgccgagccgaagcccgcggagaagaagcgggccgcagaggaagccgggaaggccgagaagacccccgccggcaagaagcaagagccggagaagggggcggcggcgtccgagtccgccgacgagggcggcgaccggaggggaggcaaggagaacaagaagagcgaggagacctacaagatctacatcttcaaagtggtcaagcagctgcacccggacgtcgccatcgcctccaaacccaggcccatcatgaactccctcatcaacgacatcttcgtgaagctcgccggcgaggcggccaagctgacgagggacagcaagaagcccaccctcacgtccagggacatccagacctccgtccgcctcgtcctccccggcgagctcgc

SEQ ID NO: 3373 - DNA, 1533 bp, Glycine max
  misc_feature (16)..(16): n is a, c, g, or t
  misc_feature (27)..(27): n is a, c, g, or t
  misc_feature (79)..(79): n is a, c, g, or t
  misc_feature (85)..(85): n is a, c, g, or t
  misc_feature (175)..(175): n is a, c, g, or t
  misc_feature (179)..(179): n is a, c, g, or t
  misc_feature (220)..(220): n is a, c, g, or t
  misc_feature (292)..(292): n is a, c, g, or t
  misc_feature (559)..(559): n is a, c, g, or t
  misc_feature (561)..(561): n is a, c, g, or t
  misc_feature (615)..(615): n is a, c, g, or t
  misc_feature (639)..(639): n is a, c, g, or t
  misc_feature (713)..(713): n is a, c, g, or t
  misc_feature (875)..(876): n is a, c, g, or t
  misc_feature (911)..(911): n is a, c, g, or t
  misc_feature (934)..(934): n is a, c, g, or t
  misc_feature (943)..(943): n is a, c, g, or t
  misc_feature (983)..(983): n is a, c, g, or t
  misc_feature (985)..(985): n is a, c, g, or t
  misc_feature (1069)..(1069): n is a, c, g, or t
  misc_feature (1098)..(1098): n is a, c, g, or t
  misc_feature (1101)..(1101): n is a, c, g, or t
  misc_feature (1105)..(1105): n is a, c, g, or t
  misc_feature (1175)..(1175): n is a, c, g, or t
  misc_feature (1208)..(1208): n is a, c, g, or t
  misc_feature (1225)..(1225): n is a, c, g, or t
  misc_feature (1260)..(1260): n is a, c, g, or t
  misc_feature (1268)..(1268): n is a, c, g, or t
  misc_feature (1274)..(1274): n is a, c, g, or t
  misc_feature (1295)..(1295): n is a, c, g, or t
  misc_feature (1297)..(1297): n is a, c, g, or t
  misc_feature (1302)..(1303): n is a, c, g, or t
  misc_feature (1318)..(1318): n is a, c, g, or t
  misc_feature (1336)..(1336): n is a, c, g, or t
  misc_feature (1451)..(1451): n is a, c, g, or t
  misc_feature (1494)..(1494): n is a, c, g, or t
  misc_feature (1499)..(1499): n is a, c, g, or t
  misc_feature (1505)..(1505): n is a, c, g, or t
  Peptide Sequence Number=SeqID_6831
  Probeset Number=SeqID_13152
acaaaaacaaccaganctcacaacaanagagaacatactctccctatatatagcactcgtcttttacatgcgcgctccnctctcnttcacagccgtaacgaactctctctcatatatcatgtatcgtcaccaaactaacactacatactaacagtactgtatagtctgtgatacnacanaattaactgctagatgtgaatataccaatgtgggtgtacancatgcacgtcatatctccgtgtgatcatcattatattggggtctccctcatctcgtgtcacacgctattcgntctgtttattatgttctgtctatgagttctttatgtctaatattgttgtctcgtatctgtgtatctctcttctctctactgctagtccgtgagctatcctagcgaggctctgcgcgtctcttctgctaacacgcgctctcgctcctcttcgattaacgacatcactatgtgttttcactctgtgctcgactctcttctataagacctaattacaattatacaatatcataccatatgtaagacacacatcagatactagcattacantngatattatataatgtatatctatgatggtatttacactctcactactgctactntcctttattcttgctgtatcatcntaataactattcgcacatacagaactcatctctatccttctgcgcacaccaaccatctctctacgcgtttcgtnaaccccactcgctgctgctcacccgtccaacgcacaacctcagccgactacacacataccatgatactctctgttctcgtgtatagacagtcacatttattatgtacgatgcgatcgctagcacacaccaacacgactacaacgacatgccaaatatgattnngcagtgctggatccaacacacaacaactagccacngcttcaacatcttcgctgctcgntgcgttatnacacatagaccgactagacagacgatcatgatggatgtanantgacgagctactgcatctgtcgcgcgtgctgtgctgctcatgatctcacgttctctataattagacacatgctgacgcagcganacacagcacacatggcgtgcatgctgacnacngatnatcatctaccactgagccagagatgtgacagctgctatgacctagatgccagtatacctgtattggagantgtcgaatcactatgctagcggtagtgcgagangacaagtatacatcaantctctgcgtacatgacgcacgacatcagtactccngcatcctngcgcgnctgtctgctgtctctctgtcnangtaanntatattaccagtcanatcactacactgtctctntaacatacatatctatcactcatatctctctgtactctctcatccaacgctgttcactactcatataatatgacactagcgagtgtgctgcgagtgttgtagatgtgacgaaaanatcaatacacaatcatactgtagtctatatctgcactagtacnactanaagagnatatcactagatgatactgctgctgtgg

SEQ ID NO: 3374 - DNA, 630 bp, Glycine max
  misc_feature (1)..(2): n is a, c, g, or t
  Probeset Number=SeqID_13153
nncaatttctcacaggaatcagctatggtcatgattcgtcaagctggaaattaaccgtcactaaagggcacaaaacctggagcttctccccggtggcgacgggtgtaagcatagtggatccgccggaatgcagcaaatgagggaatgaggatgtctcgcaaatgttgtatgttggtcaagttcacaagcatatggcatgaaagcaatggaccgtgttatagtattaggataggcaacgtgtttagatgtcaatagcgtggaaatcttaatcgcgatccactccacgtatcatgagcaagacaactatctcatatctcctgttcaggttcagcaagagtgtgcgagatgtatattacacgcatgctcatggagtaagcagtcattagttatattccattacccccttccccttgtctttcagcttcggtaactctcttaaagcttcaacggggagacttgcaacttgcggtctcccgaatgtcaggtaagttaaccctcatagaacgggttggtttccaattcctcgacaagggtggagggaaccgtagaggggccacctcgctatagattgattagcccacgttaatgtttaaacacaataaagttggaacgggaggggggaaaggagtt

SEQ ID NO: 3375 - DNA, 1339 bp, Glycine max
  misc_feature (160)..(160): n is a, c, g, or t
  misc_feature (202)..(202): n is a, c, g, or t
  misc_feature (306)..(306): n is a, c, g, or t
  misc_feature (367)..(367): n is a, c, g, or t
  misc_feature (374)..(374): n is a, c, g, or t
  misc_feature (577)..(577): n is a, c, g, or t
  misc_feature (580)..(580): n is a, c, g, or t
  misc_feature (645)..(645): n is a, c, g, or t
  misc_feature (1210)..(1210): n is a, c, g, or t
  misc_feature (1283)..(1283): n is a, c, g, or t
  misc_feature (1285)..(1285): n is a, c, g, or t
  misc_feature (1306)..(1306): n is a, c, g, or t
  misc_feature (1308)..(1308): n is a, c, g, or t
  misc_feature (1311)..(1312): n is a, c, g, or t
  misc_feature (1316)..(1316): n is a, c, g, or t
  misc_feature (1319)..(1319): n is a, c, g, or t
  misc_feature (1322)..(1323): n is a, c, g, or t
  Peptide Sequence Number=SeqID_6832
  Probeset Number=SeqID_13154
gtatatcgatgtggtaggagggaccccaacacgtagtagacgacaggcgacacacgccagtaccatgcgcagcatcaacgtagtgaggcagtgtcgtcgcgctgtgatataatgtgacaagcagcgcgcgtgcgctgcgtgtacaatatcattgtgaatntagagctagcagtgaggcaggcgtttaggcgatcgtagagcnagtgccgaggcagtagagtgggcgcggcagcgcacgtgaggaagagtgagcctcctcgagaacagaagagcataagctagtagacaggcgagctgtgtgtgacnctgagagagatagatgcaatattagaagggggaagactctaagagagagacaacatgagtntgtagcntcgggcgtggtgtgagagtgagcgcacgtgtgcgtatcataagcgcaaaatagttgtgtgcggtctaaagttgatgttagtggtggtgtggagagttcataggaagaggggcagtagagctcgtgtgtctgtagtagtaggagaggaggatatctgagaatattatcgaacgtggggtgtggtgggggtggtggcggggggcncgnctggggtggttgcaatttcagcacagttgtaatgagtagttttttgatctctcgccctcatatanaaaaacaacacatataagaaagaattaaaagaacataaataataagataggagggtgcagggaggagagggagctgggtgacagcagataaggggggtggagaggggggagtgggctgcgatattttctgcttaggagtcagaggggagctatcagtgcactattgcggcagagagccggagccggggtgtgcgcaggcgagaggggagatgaaagcgtgtatataacgaatggtgtgttgtaatgagggatctaagagagggtcggtagtgagagtgtggggtgcgcagtgggaggcaaggagaacaaaggtagcggtctgcatgtggggtgggagagaggacgtgccgagcactctatgtgtgatgcgtataaggaggtgaaattaaagggtgtggtgtgctgtcggtgatgtctccgtcctcgtacttaatatatgcgaaagtcgaaatagatgggatggctgtgatcggagtgagcagccggagaagcaaggcgagggagtctctctcaactaggttcgtgggtgaggaggtaggaacaagtttgtataggtgggcgcgcnccccctctccatctggaggaggcttgcccgatagtttgtggtgtggagaggttgagtgagtttttattgtgtntnttcacatatccgacgttgtcntncgnnaagntgnaannacccacacccaccggg

SEQ ID NO: 3376 - DNA, 1737 bp, Glycine max
  misc_feature (1)..(1): n is a, c, g, or t
  misc_feature (60)..(60): n is a, c, g, or t
  misc_feature (87)..(87): n is a, c, g, or t
  misc_feature (108)..(108): n is a, c, g, or t
  misc_feature (155)..(155): n is a, c, g, or t
  misc_feature (198)..(198): n is a, c, g, or t
  misc_feature (205)..(205): n is a, c, g, or t
  misc_feature (255)..(255): n is a, c, g, or t
  misc_feature (263)..(263): n is a, c, g, or t
  misc_feature (326)..(326): n is a, c, g, or t
  misc_feature (356)..(356): n is a, c, g, or t
  misc_feature (405)..(405): n is a, c, g, or t
  misc_feature (455)..(455): n is a, c, g, or t
  misc_feature (469)..(469): n is a, c, g, or t
  misc_feature (557)..(557): n is a, c, g, or t
  misc_feature (563)..(563): n is a, c, g, or t
  misc_feature (668)..(668): n is a, c, g, or t
  misc_feature (826)..(826): n is a, c, g, or t
  misc_feature (847)..(847): n is a, c, g, or t
  misc_feature (862)..(862): n is a, c, g, or t
  misc_feature (954)..(954): n is a, c, g, or t
  misc_feature (1006)..(1006): n is a, c, g, or t
  misc_feature (1177)..(1177): n is a, c, g, or t
  misc_feature (1230)..(1230): n is a, c, g, or t
  misc_feature (1310)..(1310): n is a, c, g, or t
  misc_feature (1428)..(1428): n is a, c, g, or t
  misc_feature (1430)..(1430): n is a, c, g, or t
  misc_feature (1464)..(1464): n is a, c, g, or t
  misc_feature (1481)..(1481): n is a, c, g, or t
  misc_feature (1510)..(1510): n is a, c, g, or t
  misc_feature (1540)..(1540): n is a, c, g, or t
  misc_feature (1632)..(1632): n is a, c, g, or t
  misc_feature (1634)..(1634): n is a, c, g, or t
  misc_feature (1658)..(1658): n is a, c, g, or t
  misc_feature (1710)..(1710): n is a, c, g, or t
  misc_feature (1712)..(1712): n is a, c, g, or t
  misc_feature (1714)..(1716): n is a, c, g, or t
  misc_feature (1718)..(1718): n is a, c, g, or t
  misc_feature (1720)..(1720): n is a, c, g, or t
  misc_feature (1724)..(1724): n is a, c, g, or t
  misc_feature (1735)..(1737): n is a, c, g, or t
  Probeset Number=SeqID_13155
natacaccccatcacacgtgggggcgatattgagtcagactacacacgcaccgagatcgnttcgcgtcgacatgtctcgacctgacntcgaacacaaaacaccaccgnccggtgggtatactgatgatcatcatatatctatctgcgtgcgttgntgtagaacatcgcatcgtatgcattgtagtcgtatatatatanattatantgatatcatgtgcgtggcgtgtggtgactatagtcagtcgtggtgagtgngtggcgcnggctatgactgtgacgcgcagcgcagagtgtgttcgtcattctccgtgcgctaacatacgagnaggtaggcgtgagagttagctagcttgatngagattgcgagctcggcgtcgtcacgcacggcggcggcagcgaccgatnagcacacacatatgacaactctgcgtgtgtctgcgagcgcgtgtttatcnacctaatattatgnttagatatgtatagcagcgtgtacgatggtcgtaagatgcacatcgtgtgacgcgctcgagcctagatagagaagatagtgtacgatnggctcnatcactaatattcacccatgtgcgcgagtgcgcagaagaatcaacacgcgcgtgaccgtatgatgtgcatcatatacacgaccacaaacacacatcatcacgaanaatatatgtatataacatacagaagctcaagatatatatatagtagtcggtcgttcgctgtgtgcgaacgttgtcggatgatttgtgtatgtgtagagtagtgggtgtgtatgtgacagaaatgatagtatggtttgatattgtctgatacgtgagcntgatatgtcttctaagtatcntctagcccgccactntgtgggcgcgtcgatgagtgtgaactgtttatgcgcgtgtccacgtcgcgtccttcgcacgcgctctcgtcgcgtcgcgggtccgaacatangcgcgacggggcggacgcggtgaggtctatcgctacattagcgtacgtgcanatcatcaatgggcgccggcagcctagatatgtattgttatgtgtgtacaatacgccagataatgagtatgtagatatgttatgcgcgcatactgacgcgaatcacaatacatcgcagaccgacgtcacagttcctaactcgcggctgcttccacacactcctcgagcgacnctgaagctgctgctcgcttagtgcgctgtgtcgtcgttgtatcaggccgcgcncagccctttttcttctgtgtctcttcatatctttcctactcagcgcctcctcacatccctatcatacacacaccctcagngttgatatctattcatatataactacgcatcgatatttctagtgtgtgttgtagctgtatacagatggctaatcgcacatatcatacgtatagtgtcatgttcatacacacacagacnanacatcacgcgccacgtatccttctatcggtcttncgtcgccgtccatctcntgcacacacctcacatcttgcgtagcgtngcgtatgtgcctggcgggggtggagtgaanatattatatatagttattattggtttaaattgttactagatggtgagtgtttaggaagagggtaggaaagagaaggtgaagagagagagagnangagagagagagagagagggcgcgngtgagctaatgtggagatgtgtagagtgttgatagagtgatgtatgtgtgtntntnnnangnttgngtgtgggtttnnn

SEQ ID NO: 3377 - DNA, 230 bp, Glycine max
  Peptide Sequence Number=SeqID_6833
  Probeset Number=SeqID_13156
aagaacggtgaaggatttagcaaacagtcattattaaacagagtatgacactgctggattcgcagtcccttttctccatatcaggtcgcttggactgcagcgggtattgggtgaaggtgatgcttatgctagtaacaatatgaatgcaagctctgctcatgtcagtcgtatatacttcaccaccattggtctcaatcgccactttagctcagtcaccagttgcaggtcga

SEQ ID NO: 3378 - DNA, 1548 bp, Glycine max
  misc_feature (9)..(9): n is a, c, g, or t
  misc_feature (124)..(124): n is a, c, g, or t
  misc_feature (141)..(141): n is a, c, g, or t
  misc_feature (300)..(300): n is a, c, g, or t
  misc_feature (522)..(522): n is a, c, g, or t
  misc_feature (818)..(818): n is a, c, g, or t
  misc_feature (891)..(891): n is a, c, g, or t
  misc_feature (917)..(917): n is a, c, g, or t
  misc_feature (1020)..(1020): n is a, c, g, or t
  misc_feature (1103)..(1103): n is a, c, g, or t
  misc_feature (1137)..(1137): n is a, c, g, or t
  misc_feature (1268)..(1268): n is a, c, g, or t
  misc_feature (1299)..(1299): n is a, c, g, or t
  misc_feature (1303)..(1303): n is a, c, g, or t
  misc_feature (1305)..(1306): n is a, c, g, or t
  misc_feature (1314)..(1314): n is a, c, g, or t
  misc_feature (1429)..(1430): n is a, c, g, or t
  misc_feature (1434)..(1434): n is a, c, g, or t
  misc_feature (1446)..(1446): n is a, c, g, or t
  misc_feature (1491)..(1491): n is a, c, g, or t
  misc_feature (1495)..(1496): n is a, c, g, or t
  misc_feature (1509)..(1511): n is a, c, g, or t
  misc_feature (1525)..(1525): n is a, c, g, or t
  misc_feature (1548)..(1548): n is a, c, g, or t
  Probeset Number=SeqID_13157
ttgttctanacttttctgcatttacttattacgcagcactggtgtatgactagtgtcgatgaggagtccttagctctgttgtgtgttgctgtatctagagagtgtgtagtgaaatgtcggtgtntatagtcagtccatagngtattatataaataattcgagagttcggcattgttagtgtgtggattgaggtgatgcaatgcatctctggtacacagttccttgcttcgtggcatatgttagtgtgatgatacgtcatctcctctcggctcggtagtgtctcgtgtcagactgcgtgantctattaccgtgagcgtcgtgacgaacgtgcttacggacagcgagcaggcgcgctgagagcgacgtcgggtgatggagtaggtggagtatagatataagtactagatagggtgatgagatgtatgagagaggaggatggtatagcatgtgctcgagcttgtgggtggactctaacacagcacgcattggcgcgccggtcggcggtagggactctattgttgnacatcacccaacacacacttacataatgtagggcagtaggtcggtatagtcgactgtattgtgtagttgttactactacaggtagagttctaatcgtagatacggtcattcatcataatctaagtcgaataatctgacctgtgtagacgtagtatagcggctggttatccgttttgcgggcgagtcaattgtggcgtctattaagtgtcattattataattaataaatccaaatattgagttgagtatgtggtgttggtatttgtatgtctgcagcgtgcgtgagtaaccactacngagatgttgattgtatagtcttcatatttctatatcaagctgtttgtggttatattcgacataactattcatntagttgcgtctgcatccacgtcctanacatgataagaggaggcgcggagatcgatatgcgggatgattaaaggagagaatgaagagagagataggagttagccgggcgggaggtaggtggggttacganatgtgagatatacatgattctagagtattgaggttatacaatagagcgggcgcgcgcggccgtggacactactgcatactctncacatcgtcggtgttgtgttatttctgatgaganatatgtgatgatagtttaatgttgctgggatgatagtcgctctatacagctagaactctttcgccgggtctggttgctctcagtctacacatacgacgcagcgatctaggcgtcgggtgttggtgtgattnatgtgtatcataacattctcttatgggctanaganannaagtaagnaagtagatgtgtgatgagacacgcagtgccgtgtctgtagtaattcatcatctcttatattcgtggctgtgtctgttgaatgtatgagatgtgcggcgaatttcggtcctaaatnntaanaatataaaagantaaacatacaagagagtataagagcgaagataataccgaagaatnatannagattatcaaaannnaaccaaccaccccncacacacaccaaaccccccaaan

SEQ ID NO: 3379 - DNA, 787 bp, Glycine max
  Peptide Sequence Number=SeqID_6834
  Probeset Number=SeqID_13158
attaataaatttaactcatcaaatggttagtactgaaacctcagtacgtgaagaggctgaaaaagatttaaagaagtttctttccctgaaattttcactccctatgcccgagcttcaagaggaaattgaacaagaaatatggagaactaaattcattaaatatagaagcattatacaggagcttttagtagagcttgataatgaagagcctggcctctataaagtacatgttagatgggataaagatcctacaagtataaaggaagatgatgaatggctcagaggccttaaagcagcggcttatttccctccgatgtttgaaataaatggagatccttctttttgttcacatccttgttatcctacagtgcagcagcaaatagcaatttctgcatcctatggtagcgaagatgcttatcagcttcttgttattcatgctagttcaggagatgttcgtgtaactcatcctatttttcaagattatccgaaatacacaggaacttcaataggctataggatagcttttcccaaaccagaaagatggatagcaactgacgaagaacttattacctttgaagatatgagtaaaaagcaaattgatcaaaactttaagaagttatataatttgctttggtctatgcaaccaaaaaaagaagagaattcctagtgatagtcatctttatcctaaatatgcgtgaatgccgagttatgtttattatgatattcagtatagatgaaaatttatctaacaaacaatttttgtgcctttttaaagaagagtggcaat

SEQ ID NO: 3380 - DNA, 625 bp, Glycine max
  Probeset Number=SeqID_13159
gccacgcgtacggcacatggtaactacaaacctctctctaaacctcaaactctgattgttcaacggaaagcccgtcacatattcttcccgcgtcgagcccaccaccaaattatactgatcacaaacaagggacaatatccatgtccctataccaaccccactactacctacagtacttcaaattacaatccatcaaagaatgcatagtgacacgggaaatgacgagccgctacatgaccgacatgataacctacgccgacaccgacgtagtaatcgtcggagccgtctcgggcgggctctactgcacgtacaagctcagcaagaaccccgccgtgagcgaggacatagtgaagcactcagtgagccccggcggcggcgcgtggctcttctggcagatcttgtccgcgatggtggtgcacaagctggtgcacctgttcctcgacgagctcgacgaggcgtacgactagcaagaggactacgttgccataaagcacacggctatgatcacgagcacgatcatgagcaggctcctcgcgaagcccaacgagaagctcttcaacgcggaggtggtggaggactagatcgtgaatgaagggaaggttgccgagggtgcgaccaattgggc

SEQ ID NO: 3381 - DNA, 1632 bp, Glycine max
  misc_feature (16)..(16): n is a, c, g, or t
  misc_feature (52)..(52): n is a, c, g, or t
  misc_feature (72)..(72): n is a, c, g, or t
  misc_feature (74)..(74): n is a, c, g, or t
  misc_feature (259)..(259): n is a, c, g, or t
  misc_feature (304)..(304): n is a, c, g, or t
  misc_feature (375)..(375): n is a, c, g, or t
  misc_feature (1442)..(1442): n is a, c, g, or t
  misc_feature (1597)..(1597): n is a, c, g, or t
  misc_feature (1606)..(1608): n is a, c, g, or t
  misc_feature (1613)..(1613): n is a, c, g, or t
  misc_feature (1625)..(1625): n is a, c, g, or t
  Peptide Sequence Number=SeqID_6835
  Probeset Number=SeqID_13160
cgctgcgacagatganagcgtcatgtcgcggtgtaacatgagagtatcgtgnacggtagaggtgagcatagnantatgagtgatagttagcagtatgaatatgagtacgtgtagctgtcggtgtgtgtctaaacagttcattcgctcagttctccaccgttcagctctctatacgtcgctaagatctcggtcgtcagtctgatacgaagccacgtctcgcgctactagtatagatctactcatttatctgctatattangtagaagtactcacctgtgtcgtgatgcagcattttattagatgnaagcatcgatcgagcacagcatgattgcgagcgcacgacaataatcaatagctgagtgttcacaaccgtancatcacgcgctctactatactatgcagattaggacactatagatgtgctgcagttggttcccgccgtcccgtgcgaccgctgcgatctctccactgcgtacacactcgtcacaatacatacgcggcaccacgcgcatcctacgactccgcccgatccacactatgaaccctactcgtacacatgatatatcacggagtgtacatgcccagctcggcgtaatcactctccgaacttacaatcatcacagaaccgagagacatcacatgtacatctcgctcgctactctctatcatcatttctcatcatctagcgatacgtcaaccaccatcttcatccattacagtactgtacatgctacatcgctcgcatctacctgcgacacccgactcgtcatatccgcctctcgtcgtgtacgtcatccagctttatgtatgtagttatagttaagcagacactagcgactagatgactcctctacctcgcataccacaatatcatactcacctcttgtcgtgcttcaatatccaatgccaccgcgccgcggttccacagccagcacacatcctaccttatattcatcatcgacagcactctattacatacatcggctcgcgttgttagacgacgtgcatgtggctatatgaccagttttccgtgcttcatcttaatcctatcctacactcctctcgtctactacactcaccattctatatttatatatagcacgtctaattcataatatttatatattataaaatatataagtatactatctatcatggtttatttgtttacgtcagtttgtgttttctgagttctatgtctcttagtcgagtgttatgaatataactcttttctagtcgaataattatagaatggcgcagagtacatgtcgcgaaccgactgcgcacggacgcgcgagcggcgcgcgcacgatatcggccggcagcacacttatctctcattatcctccagtagatatgataaatgtgcttcagctttcgtcggccgcggttatcactgattgatttctctaagacaattaatctaaatcttattcaatatnaagcgcgcacgagcagccgctcacaacgctgcaactatcttatcttcgaacataccacgttcgccggcttcatgcctgagccgcatgccatccgaggacgcgttgacgtggtgctagtccgatttcactgacacgtcacggccaacatacggacnacggtcacnnncaaanacaaagacaagnaaaaaaa

SEQ ID NO: 3382 - DNA, 1692 bp, Glycine max
  misc_feature (11)..(12): n is a, c, g, or t
  misc_feature (30)..(30): n is a, c, g, or t
  misc_feature (60)..(60): n is a, c, g, or t
  misc_feature (156)..(156): n is a, c, g, or t
  misc_feature (171)..(171): n is a, c, g, or t
  misc_feature (179)..(179): n is a, c, g, or t
  misc_feature (282)..(282): n is a, c, g, or t
  misc_feature (330)..(330): n is a, c, g, or t
  misc_feature (340)..(340): n is a, c, g, or t
  misc_feature (342)..(342): n is a, c, g, or t
  misc_feature (346)..(346): n is a, c, g, or t
  misc_feature (459)..(459): n is a, c, g, or t
  misc_feature (662)..(662): n is a, c, g, or t
  misc_feature (739)..(739): n is a, c, g, or t
  misc_feature (804)..(804): n is a, c, g, or t
  misc_feature (847)..(847): n is a, c, g, or t
  misc_feature (869)..(869): n is a, c, g, or t
  misc_feature (890)..(890): n is a, c, g, or t
  misc_feature (914)..(914): n is a, c, g, or t
  misc_feature (987)..(987): n is a, c, g, or t
  misc_feature (1021)..(1021): n is a, c, g, or t
  misc_feature (1024)..(1024): n is a, c, g, or t
  misc_feature (1059)..(1059): n is a, c, g, or t
  misc_feature (1155)..(1155): n is a, c, g, or t
  misc_feature (1192)..(1192): n is a, c, g, or t
  misc_feature (1367)..(1367): n is a, c, g, or t
  misc_feature (1677)..(1677): n is a, c, g, or t
  Probeset Number=SeqID_13161
ggtagaattgnntataatatattatttatnatatattagctaaactatatacagaagagnagagaggtggagatcgtactaacactcttactcattacgatatgcgtgcacccacactatcaattactatcacctaacttttagagctgtgtcgcncttgttgtatactanaatctatngagacaatattattatctctaatatagtcatttgttctattatctaacgtgatcgggctcttctactccctataggctgacactcatctcgcttattgtgtcnttcagctagtgcgggcgcgttgagcgtggccagcgactcgcaatacancatcaatggngntgangaacattcgcttacactctcattgtcttcgcctgctttactctacttttctgtttatctcttcttatcgttttataatgttatatttaatcatgattctacatcaatgatcangaagcagatgcgcgcgcttggcgtatgtcatcatatatctatgacggcggtttgataatctgagattctactctggatagtctactatatatgtgtggtgatgagtagatatattcacgcgttgtcactatatgtattagtgtcgcagactacttacatatatcgtatatataacatctcatacttccactctctgtcgtttnctgctgtacactatatatattatcatgtgcgctgtgtgctgtctctgagtatttatagtttagtactgtgtgtctantctgggtgttgtagtcgctatgtaatatgtgtgtacatacatacatagaataatgtagatagtangtataatatcataattactataaactaaatatgtatattatantagaattcatctactatctatnctattactagcgatcgcatangtgcaatctacatgatcatcgtantatatgatattatgtcgtaatactgtcaggcaattacgttaatcgtcctctcgccgttgtagagatatatggncgcgtgcgctgacgctggagagatacacaacccnccncagccacggttgtgtggaggtgtgtatgatctatntcgtcgtttatgtctatctatagcacgctcacgtcacatatttgcagttgataccacacattatctctgtgactgcgcgcgctagtgtcttaatcntacatcataacattctactctgctcttctcttgctgntactaatcgaatgtttacgatatgtatgcattgttagactgcgtctgttgtgttaccatcatgtatgtatcacaccacacgtcttgatcgatgtctacatgcatatactatcgtcagtcacgactagctcctctgagctcttgcgatctcgcgttgatactatactcgatactgntgcgacggtatcgatctctgccgtcctcgaagacactagctatcgccgcatctcatgacagtatagtgtgagagcatattattatatatactctcatcatctcgtatctaatatagctgtttatattgtctgtcgtgcgcggtcgatttaatcctctactagatcgacactatacttgctctctctcttctcatttcatcgctctgctgctgtcgtatcgtgtcttatcacgtctctgcatatatatatgtatgcacaacgtcgtctatgcatacatctcagtccgtcaaaatctaacctattatcttcncagcagcgccgacaa

SEQ ID NO: 3383 - DNA, 1650 bp, Glycine max
  misc_feature (21)..(25): n is a, c, g, or t
  misc_feature (27)..(29): n is a, c, g, or t
  misc_feature (36)..(36): n is a, c, g, or t
  misc_feature (38)..(40): n is a, c, g, or t
  misc_feature (51)..(52): n is a, c, g, or t
  misc_feature (69)..(69): n is a, c, g, or t
  misc_feature (85)..(85): n is a, c, g, or t
  misc_feature (89)..(90): n is a, c, g, or t
  misc_feature (100)..(101): n is a, c, g, or t
  misc_feature (104)..(105): n is a, c, g, or t
  misc_feature (117)..(118): n is a, c, g, or t
  misc_feature (120)..(120): n is a, c, g, or t
  misc_feature (122)..(122): n is a, c, g, or t
  misc_feature (131)..(131): n is a, c, g, or t
  misc_feature (148)..(148): n is a, c, g, or t
  misc_feature (170)..(171): n is a, c, g, or t
  misc_feature (174)..(175): n is a, c, g, or t
  misc_feature (178)..(178): n is a, c, g, or t
  misc_feature (181)..(182): n is a, c, g, or t
  misc_feature (185)..(186): n is a, c, g, or t
  misc_feature (210)..(210): n is a, c, g, or t
  misc_feature (214)..(214): n is a, c, g, or t
  misc_feature (221)..(221): n is a, c, g, or t
  misc_feature (225)..(231): n is a, c, g, or t
  misc_feature (282)..(282): n is a, c, g, or t
  misc_feature (290)..(290): n is a, c, g, or t
  misc_feature (384)..(384): n is a, c, g, or t
  misc_feature (465)..(465): n is a, c, g, or t
  misc_feature (503)..(503): n is a, c, g, or t
  misc_feature (522)..(522): n is a, c, g, or t
  misc_feature (540)..(540): n is a, c, g, or t
  misc_feature (545)..(545): n is a, c, g, or t
  misc_feature (566)..(566): n is a, c, g, or t
  misc_feature (578)..(578): n is a, c, g, or t
  misc_feature (612)..(612): n is a, c, g, or t
  misc_feature (639)..(639): n is a, c, g, or t
  misc_feature (664)..(664): n is a, c, g, or t
  misc_feature (1120)..(1120): n is a, c, g, or t
  misc_feature (1172)..(1172): n is a, c, g, or t
  misc_feature (1174)..(1174): n is a, c, g, or t
  misc_feature (1178)..(1178): n is a, c, g, or t
  misc_feature (1181)..(1181): n is a, c, g, or t
  misc_feature (1273)..(1273): n is a, c, g, or t
  misc_feature (1275)..(1275): n is a, c, g, or t
  misc_feature (1346)..(1346): n is a, c, g, or t
  misc_feature (1378)..(1378): n is a, c, g, or t
  misc_feature (1392)..(1392): n is a, c, g, or t
  misc_feature (1441)..(1441): n is a, c, g, or t
  misc_feature (1451)..(1451): n is a, c, g, or t
  misc_feature (1468)..(1468): n is a, c, g, or t
  misc_feature (1470)..(1470): n is a, c, g, or t
  misc_feature (1513)..(1513): n is a, c, g, or t
  misc_feature (1539)..(1539): n is a, c, g, or t
  misc_feature (1546)..(1546): n is a, c, g, or t
  misc_feature (1596)..(1596): n is a, c, g, or t
  misc_feature (1650)..(1650): n is a, c, g, or t
  Peptide Sequence Number=SeqID_6836
  Probeset Number=SeqID_13162
tttgtggtggtgtgcctcccnnnnncnnncgcgccncnnncccccccacgnncgcgtcgtctcgcgtcncccacacccccacctntctnnctctctcctnnccnnccctccggcctnntnanattttttcntttttatctcatatgcnttagtcatgtgtgttgtgaganngtnntgnagnnggnnctccgactggtggtgggagggggngggnggggggncgcnnnnnnnctcgtattcctcgcttgcttactctgtctactttctgcaacgcacgccacngcagaatnttatatgtgacgcaaggagaactgacgcccgcgcgagcgcgtcgaccacggagatctctaaggactgtggacgagagacgcgagaacatcgagntactgtgtgagatggaggcggtagtgtgacactcagatctcactcggattatatatgcatctactatactaatatgctcgngtacgcagacgagctcacgacgacgaatggtcgcgtgnataaagttttatgtgttanatatgagagaagtgaggnggcgnggagtgagggagagatgttanataaaatcatancccaaacatactgatgagcgatcccctctcttangcacactctcgtctctctcctactccntactctctgtgtgagtattttgttngcaccgcccatatgtgtaatgttgtggtgatgctcgtacatgcgctggccaggagtgtgcggacgacaaactaatatttctttatacactatctaatctcttcctcacacgacacacacaccgacatctctctgacactccaataacagatatactaacactgaaatgtatacagcatgacggatgtattgatggaatacacaacgtcacgcagaatgtgaataagtatgtaatacatgtgtatgaatgttacgaagctatgccccgcgctacgctactgtcgaggatactacagaccgaccattctcgcttgtcgactgtctctgctcacgtgacgccgacgtctatatatcaatcattatagtatagatgcacgcacgtcattggattgctctgatgagaatgcgacatgacagtgtgagtcgtgagtacagagaataccgacatgttacacgntggatctataggctatagttacttaatacgtccacatagttctcgtttactnantatnganatcagtactaatggtgacaccctccccacccgcaactcaactccgaacgtactgtgatagaagagtgagttcctggagatacagaggatgananaagatgtcttgcgaagagcaaccaacaactcctgatgtacactgacgcgtagcgtggtgatcgactccggncggcactcgtgcggcgcctcagccgccgcgtncagtcgcggcgcgngctagacgacacctgacttggtgagtacatgtatgtcataatctatgtnctattttctnatttatattgtgttcantnctcttctgcacctgtactcctacattcagtcatacacgatccntctttgtcctgatacgctctgcactntggtccntatatctctacatattgcgtgacatccacaacacacacatgatagtaaantgagatcatgtcacgtaactgtgcaacacatatattatatgcacgccgcatctn

SEQ ID NO: 3384 - DNA, 500 bp, Glycine max
  Probeset Number=SeqID_13163
aagaaaggattcttattcgttctctctcttttgcacgccattacataaagaaagaaaagctcatcggtttctcagatccacttcttctttggttaatctctagggattttctgatcgctttgtttggtccgagccatggcttcgaagaggattttgaaagagcttaaggatttgcagaaggatcctccttctaactgcagcgcaggtccggtggctgaggacatgttccattggcaagcaactatcatgggacctcctgacagtccttatgctggaggagtctttttggtttccattcactttcctccggattaccctttcaagccaccaaaggtgtcttttaagacaagggtgtaccacccgaacatcaacagcaacggaagcatttgccttgatatcctgaaagaacagtggagtcctgctcttaccatatccaaggttttgctgtcgatctgctcattgctgactgacccgaacccagatgatcctcttgtgccaga

SEQ ID NO: 3385 - DNA, 1651 bp, Glycine max
  misc_feature (25)..(25): n is a, c, g, or t
  misc_feature (28)..(30): n is a, c, g, or t
  misc_feature (35)..(36): n is a, c, g, or t
  misc_feature (38)..(39): n is a, c, g, or t
  misc_feature (41)..(41): n is a, c, g, or t
  misc_feature (111)..(111): n is a, c, g, or t
  misc_feature (144)..(144): n is a, c, g, or t
  misc_feature (148)..(148): n is a, c, g, or t
  misc_feature (161)..(161): n is a, c, g, or t
  misc_feature (171)..(171): n is a, c, g, or t
  misc_feature (185)..(185): n is a, c, g, or t
  misc_feature (192)..(192): n is a, c, g, or t
  misc_feature (205)..(205): n is a, c, g, or t
  misc_feature (211)..(211): n is a, c, g, or t
  misc_feature (213)..(213): n is a, c, g, or t
  misc_feature (215)..(215): n is a, c, g, or t
  misc_feature (217)..(217): n is a, c, g, or t
  misc_feature (224)..(224): n is a, c, g, or t
  misc_feature (256)..(256): n is a, c, g, or t
  misc_feature (258)..(258): n is a, c, g, or t
  misc_feature (326)..(326): n is a, c, g, or t
  misc_feature (469)..(469): n is a, c, g, or t
  misc_feature (474)..(474): n is a, c, g, or t
  misc_feature (481)..(481): n is a, c, g, or t
  misc_feature (500)..(500): n is a, c, g, or t
  misc_feature (502)..(502): n is a, c, g, or t
  misc_feature (505)..(505): n is a, c, g, or t
  misc_feature (508)..(509): n is a, c, g, or t
  misc_feature (631)..(631): n is a, c, g, or t
  misc_feature (673)..(673): n is a, c, g, or t
  misc_feature (969)..(969): n is a, c, g, or t
  misc_feature (1034)..(1034): n is a, c, g, or t
  misc_feature (1047)..(1047): n is a, c, g, or t
  misc_feature (1059)..(1059): n is a, c, g, or t
  misc_feature (1233)..(1233): n is a, c, g, or t
  misc_feature (1244)..(1244): n is a, c, g, or t
  misc_feature (1290)..(1290): n is a, c, g, or t
  misc_feature (1316)..(1316): n is a, c, g, or t
  misc_feature (1376)..(1376): n is a, c, g, or t
  misc_feature (1387)..(1387): n is a, c, g, or t
  misc_feature (1396)..(1396): n is a, c, g, or t
  misc_feature (1488)..(1488): n is a, c, g, or t
  misc_feature (1532)..(1532): n is a, c, g, or t
  misc_feature (1540)..(1540): n is a, c, g, or t
  misc_feature (1549)..(1549): n is a, c, g, or t
  misc_feature (1559)..(1559): n is a, c, g, or t
  misc_feature (1564)..(1564): n is a, c, g, or t
  misc_feature (1574)..(1575): n is a, c, g, or t
  misc_feature (1577)..(1577): n is a, c, g, or t
  misc_feature (1619)..(1619): n is a, c, g, or t
  Peptide Sequence Number=SeqID_6837
  Probeset Number=SeqID_13164
gtgttttttgtgccgcgcttgtttnttnnntctcnntnntntgttgttgttgcggctgtcttgtggtgtgctgatcgctcaccaaataacttaagcacacgacagtggggntaccctacgatataactacacccgcccagctantaanagcaggacaacgngggggggcgntgtttaggttgtgntgtgtgncgaggacgaggcncgcctnantntnctgctcnggttttctctgctgatatgagggtgagtcgtntncgtcagactgtcgtatcgtaagtgtgagtatgtacgatgtacgaaggccacacacaccccacgcagcntgagtagctggcagggtgggagtgactctctccctcatcgttagttgcgatcactctctgctcactatgtctttgtattgattcgatcatctcttataggataaatatagtatagatatatatatcaatactctcttaacacncactncacaccncgcctccttcggcgagccnanctnagnngagggtcacacatgagcgtctccatccgctggtcgcctactaatattattatataagagagtgagagattgaaatgtaatgcgcggggtgcagagaaggactctccgtgccgagcttagtantgaggtggtgtcggtcgcgtgctctcctatctgacgctcctngaccccgccacgacgtctcgcagagagacgtgcgagatgtatatgttgtagtctcgctcgtatatcgtttctaatatccatatatagtattgtagtatgtatatcacgtcacacatattcctcatctcgtcatgtagagcgcacagtccacacaggagaccgtatatgtcacgccgagatgaggacagagagtgaacgaagatcattatagtgttgtctatttataaccacatccagatatatgataatgtcaaaatcagacaagggaaagagagaagagacaatcaagccggacnaacgaacagagactacgactatatactgatcacatcatcgtctatatgctgtcccgcattctatncatcatactcacnagagtgtatatnactcctcactatggcagtgagtgatgatatagacatatgtatgttatgtatcgcacgctgagagtgagagatactaaaccagccaactactgctacgagtactatatatctgttacttcatcgcctatctagtgcgcgcgcgacatccatccggcacgtaactcattctctgtngcagtgtgctngatgcactcaccagtaacacacacatcaacgttactgatgtctcanaacaatgacctcgagacgtggcgatncgcgcacgatcgctgcgcagcgaatgacatacgcatatcttacacgcgcactcgcatctnaccttctcgcncagcgcagngacatacaagcacacaagtatcccgatcatatgaacatatgcataactcagaagcacgattcacttatccgcgctcgagccttgtcgacacntcacatacactagcaacagtacatgtgctcatgatggcgcacgnccgccgancaacgacgncggcgcaccnagtangtgcgctgtnngnacgacgcgtagctcgagatgtcagttcgcgcagtgagcgtgngtatgatagtctctctccgccggctgtcctcg

SEQ ID NO: 3386 - DNA, 288 bp, Glycine max
  misc_feature (165)..(169): n is a, c, g, or t
  Probeset Number=SeqID_13165
gctattggactcaatggagattgttgctgacaatattgattaccagggttgggatgatccttatataccacgtacccatgaaggactcttgaagtggaaatatgcttatctgaattcagttgattttcttttcgaggtacaggttgatggtgatcgtgagctacnnnnnctcaatgagcggggaaagaagaaacttttggaagggaatagggttgaattcacagacctatataaacccgaaaattataacacacgcatatcatgatatcaaccatagaacaactgcag

SEQ ID NO: 3387 - DNA, 452 bp, Glycine max
  Peptide Sequence Number=SeqID_6838
  Probeset Number=SeqID_13166
cacacagaaacacaaacctgagcatcgctcgttggttgagattggtgtggcttccaatggagagctatgcactccactctctctcaacctctttctctcgcttttctcagctccatcaccctcctccccctgtcatctccagatccccattcaaccaatctcactctctctctctccgatcaccgcatcacaatctcccaacgtttctccttcccctcctccaccttcaaattccacccctttcccacagcgcccattaccctaattcaacgcttctccttcatcactttcacccttcaccaccattaccccctattctcgggtccaatccccattccttttatattctacctatccatcggcctcatcgatcgaatttttggtccgcacccccgaacaccaattttcaccgcctgccaccccccttcctatctctctcccccccccgtcct

SEQ ID NO: 3388 - DNA, 415 bp, Glycine max
  Probeset Number=SeqID_13167
aagccatctcacactaagcctctccctcagtccatcggagaacctaagggacagctcccgtcttagcagcccaatggcagcggccaccatgtccctctcctccccggccttcgccggcaaggcggtgaagaatgtgtcgttgtcggccctcttcggtgaggcacgcgtcaccatgcgcaagactgcggcaaaggcaaagcaagttgcttcgagcagcccgtggtatggtgccgaacgcgtgctctaccttggcccactatcaggtgagccgccgagctatttgaccggtgagttccccggtgactacgggtgggacaccgctggactatcggctgaccccgagaccttcgcaaagaaccgtgagctggaggtgatccattgccgatgggccatgcttggtgccttggctgtgtct

SEQ ID NO: 3389 - DNA, 651 bp, Glycine max
  misc_feature (650)..(651): n is a, c, g, or t
  Peptide Sequence Number=SeqID_6839
  Probeset Number=SeqID_13168
ccccgcatatcggccagttaccagttgaatgaacggcgttccatcaaagcttcttatacgcgcaatgtgcagaacctgcattttttaagcaataccaccaccagcagtcctaccgacctctggttgcccagcaccaacaatgttcaacccgaaacagccgatcagtttgccattggttattatcaaacctcagcgaacgatcaatacgaactgacggttgaaacttattacaaatggatgcagcaccagatcgactataaaagcggagccttactcagggccaatgataatgttgaaaaccagttattgtacggtgtgggcagggcttatggtattgaatggttgctccgaaaaaaatatggcaggctgagtggctgggtgggctataccctctccaaaacggaacgccgcttcgaccagatcaacaacggacaatatttcccggccaggcaggatattacccatgatatttcgttggtgggtatttataaattatctgaccgatggacactctctggcacctgggtatacaacaccggcaacgccgttacttttccttccggcaaataccatgtaaaacggacaaaccgtttttcgtatacaccgaacgcaacggatatcgcatgccgccctatcaccggctggatatnn

SEQ ID NO: 3390 - DNA, 258 bp, Glycine max
  misc_feature (63)..(63): n is a, c, g, or t
  Peptide Sequence Number=SeqID_6840
  Probeset Number=SeqID_13169
tcaaataatgatatgaaaatggtcacgaaccttggggatatttcttatattaatcgtaacctntgtgtttgtgaattggaggttgctaacttgtcagattggctgcatggtggaaattggttggcacgtgacagaatgaagacaggatgtgtagctctagtattatgtttaaacattagtgtcgatccaccagatgtaataaagatatccccttgtgccagaatggagtgctggataggtctctcgttacctttaatc

SEQ ID NO: 3391 - DNA, 1609 bp, Glycine max
  misc_feature (72)..(72): n is a, c, g, or t
  misc_feature (195)..(195): n is a, c, g, or t
  misc_feature (238)..(238): n is a, c, g, or t
  misc_feature (269)..(269): n is a, c, g, or t
  misc_feature (319)..(319): n is a, c, g, or t
  misc_feature (327)..(327): n is a, c, g, or t
  misc_feature (330)..(330): n is a, c, g, or t
  misc_feature (375)..(375): n is a, c, g, or t
  misc_feature (404)..(404): n is a, c, g, or t
  misc_feature (428)..(428): n is a, c, g, or t
  misc_feature (451)..(451): n is a, c, g, or t
  misc_feature (485)..(485): n is a, c, g, or t
  misc_feature (499)..(499): n is a, c, g, or t
  misc_feature (535)..(535): n is a, c, g, or t
  misc_feature (570)..(570): n is a, c, g, or t
  misc_feature (594)..(594): n is a, c, g, or t
  misc_feature (614)..(614): n is a, c, g, or t
  misc_feature (671)..(671): n is a, c, g, or t
  misc_feature (683)..(683): n is a, c, g, or t
  misc_feature (711)..(712): n is a, c, g, or t
  misc_feature (717)..(717): n is a, c, g, or t
  misc_feature (727)..(727): n is a, c, g, or t
  misc_feature (775)..(775): n is a, c, g, or t
  misc_feature (800)..(800): n is a, c, g, or t
  misc_feature (863)..(863): n is a, c, g, or t
  misc_feature (902)..(902): n is a, c, g, or t
  misc_feature (910)..(910): n is a, c, g, or t
  misc_feature (981)..(981): n is a, c, g, or t
  misc_feature (1042)..(1042): n is a, c, g, or t
  misc_feature (1086)..(1086): n is a, c, g, or t
  misc_feature (1137)..(1137): n is a, c, g, or t
  misc_feature (1220)..(1220): n is a, c, g, or t
  misc_feature (1375)..(1375): n is a, c, g, or t
  misc_feature (1520)..(1520): n is a, c, g, or t
  misc_feature (1541)..(1541): n is a, c, g, or t
  misc_feature (1548)..(1548): n is a, c, g, or t
  misc_feature (1550)..(1550): n is a, c, g, or t
  misc_feature (1553)..(1553): n is a, c, g, or t
  misc_feature (1555)..(1555): n is a, c, g, or t
  misc_feature (1557)..(1558): n is a, c, g, or t
  misc_feature (1560)..(1560): n is a, c, g, or t
  misc_feature (1566)..(1567): n is a, c, g, or t
  misc_feature (1569)..(1569): n is a, c, g, or t
  Peptide Sequence Number=SeqID_6841
  Probeset Number=SeqID_13170
ttggtgtgcgagaactgcgcgcgtagttcgcctcagccgaattagatcgatatagatcacgccgacgcgacntaggggatgtgaacttgctcgtgtatagttatatttgcctatgtcgtgttgtgtaatagaaggaagacactatcgatatcaacggctcgtcgatggtggcgtcatagaaggcgacgagcgtantacgagagctagtgcctgttggagacgcgcgataaatggacantttacgtcatatctcgcgtgagatgcgttgnctcatgcacagataagacaaaggcactagaagcagcgatacgtatagtgnacgacggnacngaggagagagtgtcgtagtagtgtgagcgctcggctccacacacnatctatctctgcagaaagagttgacgtgnagaaagcatcgtgtcttacctacnctatgaggagacgacgcaacgcnactatacgatcgagaacatgccgatacgtatgangatagtcgcctgcngtgccttcctagacgcctgtgtagatgagtgagtgngcatcgagtgacgcgcatgagccgtctgagagcangcgtctcgtagtagtggcacgtgnagagaggtatctgacacagngctcatactacacagcgacgtaccattcataccctcctatgatagagtatcgtattngcagagacgagnggtgggggtgagtgtgacacgacatatnntggtnatattatatntctaactaatatgacataaatagtgcaatacggagcaggcagtcgtanccgtgtgagagtgaggaattaatanactctacacgactgtgtactgtctccacagagaagaggcgcacgtatccagccagcttcagtnagaggctcaagagcagaaggagtgctactcggagctganatatatancacgcagtctcatattgcgacctacggtggagatgatgcgctagagatgaaatatccacgagcgtacgtgngtaggcgacgactgtagcttccggtgctcactcatagggtatcgagtgtttaaggagcctntagctatcgagggcgtgcttgattttgagatgaggctgctgtgngccctagaccaacgataatagcttgctcacgctatctgaggtatgtctagntgcttacattatagcatcttcgtggtgttgcgtaatataaggtatagagatagagcgcgaggttgatgttgagtgtatggcgntctacaggacgatgcgtcttatttattatttagcatagtcaggagagagacgggtcttgtctctgggcgagtgtgtgatacagagcagatgatactatactaattaaggataagatgagagatggggtagtagcacgtttgttttcgtagatagncgagaagagagagagaagataaaaatgagcagcagctagctcctcttcactagacccctcggagaggtgatcgtcttcttttgtttatttagataggcggacctgtccctccctcggagtgtgggggccatcctccgcctcttgnggggccgctactcgcacggangaacgananaanantnncnggttgnngnggctttctttcctaacaggaaaaaagaaggataccactca

SEQ ID NO: 3392 - DNA, 1744 bp, Glycine max
  misc_feature (77)..(77): n is a, c, g, or t
  misc_feature (119)..(120): n is a, c, g, or t
  misc_feature (122)..(122): n is a, c, g, or t
  misc_feature (127)..(128): n is a, c, g, or t
  misc_feature (604)..(604): n is a, c, g, or t
  misc_feature (615)..(615): n is a, c, g, or t
  misc_feature (1153)..(1153): n is a, c, g, or t
  misc_feature (1261)..(1261): n is a, c, g, or t
  misc_feature (1274)..(1274): n is a, c, g, or t
  misc_feature (1283)..(1283): n is a, c, g, or t
  misc_feature (1288)..(1288): n is a, c, g, or t
  misc_feature (1368)..(1368): n is a, c, g, or t
  misc_feature (1374)..(1374): n is a, c, g, or t
  misc_feature (1391)..(1391): n is a, c, g, or t
  misc_feature (1407)..(1407): n is a, c, g, or t
  misc_feature (1466)..(1466): n is a, c, g, or t
  misc_feature (1473)..(1473): n is a, c, g, or t
  misc_feature (1499)..(1499): n is a, c, g, or t
  misc_feature (1532)..(1532): n is a, c, g, or t
  misc_feature (1590)..(1590): n is a, c, g, or t
  misc_feature (1621)..(1621): n is a, c, g, or t
  misc_feature (1657)..(1657): n is a, c, g, or t
  misc_feature (1672)..(1672): n is a, c, g, or t
  misc_feature (1677)..(1677): n is a, c, g, or t
  misc_feature (1715)..(1715): n is a, c, g, or t
  misc_feature (1726)..(1726): n is a, c, g, or t
  misc_feature (1744)..(1744): n is a, c, g, or t
  Probeset Number=SeqID_13171
tgggggtgcccctccctctcctctcgctcccctctctgccggaacccctacacgcacgccaacacacccaaccacancgcccacacacccaccatcaataaaatatagcataaaaatanngnggtgnncgtagtcgctgctgttctagccgcacacggacgagcggctccgccgtgtcgacgtcaaaaacacgtggtgagataaattactacctcaaacaacactcgtaacacacctctcaccacccgccccgacccgccccgccaccgcgtcgcgcgccgcctgctgtcacgcgcggatccacccacgctcgctgtgctgcgtctccgcgtaattgagccacatcctaacaacacaacacaacaaaaaaaaagccccacaacgcgagcacgcaccgccgcaccccgagacggaccaccaactgaccgaacaatcaccaacgcaccaaatgtatgttcactcgtgagtatattattcttatcgtgttattacaggagtaagtgatgggcggctgacgcagggccgggggcgaccacgcagggcagaggcgaacaacgacacaagaagcaaggtagcgagagagcgaggaaggggagtaggaggnaggatatacgngtcgcacggaggaaaggtgaggtgagacgaaattcaaagaatgattgtgacgaagaaatgaacgaatagacgagagaatacgccgctgcgcatcgcccgcgtaggcagcgaactggatagagtcgcggatagagagtaattgagataggcgacggcgggcgactgaccgatggcgtcgtatcacagaccgcgcgtgctgctgatgccggaatcgggaagacgcgcaacaccgccaacgccgctcgaccgatgtggcgtattcgctagcgtgtagctgaacgaccacacgctcgccccgcacgtccatcagctgcctcacgcgtcagagcaccgcagctgaccgacgcggccgacgaccgcctacggcggagaggacgagaaaagcgaaagacgcaatgagccgtatgagacgatcccatctttcggccggcaggacggacggacgagaacagatgacgactacgaagatgcatcgacggcacgcgtcggagcacgccacgcgccgcacggcgaaagcaacgcggtgacgatgagcgangcacgcagcacgcactcacacacgccacacacgctcgcagatgcataatactatgtatgggtcgagcacacgatgtctgcagctgcaccgatagaataatagctgaancatagatgcgcgnatccgacantaganacacagacaacagcagtagagataccaccgcgaccacacaccgaacggacagcgcagtactaagagacgcggggtcgtgncgaganacgagcgacagcggacnagacggctgcacgcgncgaaatgacacgcggacgccgccagcgcgcgctgacatgcgtcatgatattggagtgtngatccgncgcgcggtcgcatgcccgtgagaacngagcacacgcacgacacgacggcatgccggccnactgcacggctcgctacgatcgtcactgtgagcgactatcggccgagtagctgcgcgntgtagagcaggcgaaacaggtattgaattgngcttaagtgtcgagagtcacgccgtgtgactgtggntaatgacggagcgtngttcngtgagctagttcgtgtagagctggtgcgcgatcacganattggacgatngagagacctatggaccgn

SEQ ID NO: 3393 - DNA, 1519 bp, Glycine max
  misc_feature (5)..(9): n is a, c, g, or t
  misc_feature (13)..(25): n is a, c, g, or t
  misc_feature (32)..(34): n is a, c, g, or t
  misc_feature (43)..(43): n is a, c, g, or t
  misc_feature (67)..(67): n is a, c, g, or t
  misc_feature (76)..(76): n is a, c, g, or t
  misc_feature (239)..(239): n is a, c, g, or t
  misc_feature (271)..(271): n is a, c, g, or t
  misc_feature (280)..(280): n is a, c, g, or t
  misc_feature (316)..(316): n is a, c, g, or t
  misc_feature (326)..(326): n is a, c, g, or t
  misc_feature (616)..(616): n is a, c, g, or t
  misc_feature (627)..(627): n is a, c, g, or t
  misc_feature (670)..(670): n is a, c, g, or t
  misc_feature (758)..(758): n is a, c, g, or t
  misc_feature (872)..(872): n is a, c, g, or t
  misc_feature (919)..(919): n is a, c, g, or t
  misc_feature (1309)..(1309): n is a, c, g, or t
  misc_feature (1439)..(1439): n is a, c, g, or t
  Peptide Sequence Number=SeqID_6842
  Probeset Number=SeqID_13172
ggggnnnnngggnnnnnnnnnnnnnccgcggnnncccgcgggncgcagaacaccaccacacacacanggcacgagngccaggcagcggcggcgcgcggggcgagacgctcgaaggagagacacataatacaataatataggtatagtactactatcttgtttctgtgcgtacaccgccctactcccttcttgagcgacgcgtatccactacgtgatgggggttgtaatgagctatatantaaccatcaaagaaatgtgctcactctctcancccaccccntcccctcccctcgacccaccgctccaacataccganccaccacacnagcgtgctctgactcatcacccactactactcctctctctctccttcctcacactcgtctcctatacttgactaccacgtatataagcatcatcgaagcgtacactctcacgatattcgattataaatgttatatatagtgatggagtgatatatgatataaatagatctctgttgacagacatgttatatataacattctcaatcctctctgagaatcagtgcgaggatggcgcgtcacgcagaatgagaggtgcgtcgacaggtattgatggatgggagcgtggtgtngtcgttatgangatagtgttgtcggttgtgttggaggtgtgtggtcggtggtgngacgtcaggtgtgttgcgatactatatgctaatgctacatgagaagcattcaacaaatagcacatctaacacgcgtatagcatctgcnacgaggaaggaagatgagagatgaagtgcgcgtgtaagttggaggtcggatatatatagtcaaacagacgattggattgtcgttactaacacgatacatgacataccttgcttntaatgtgataatataatgctgactcgactaagatcactgaggaatanatgacgtgtggtggggacctgtgcgtcgtctgtgcggacgctggatgcgagacgtggtgatgcgtgcgtcgtagacgcgtcatagtgtcggcgagctatgtacaacagatacctcattctatactcgcgatctccgtatctgctcttcatatatgatgcgatagacgagagcgagcatcacgccacagagtactaggtctatatctattgatcacatagcaagcaactgtcactacacttctgttcagaacatgaccgcagctcgcgatgtccctgcgtgacgtcgtagaccgatgcacaagacgcgcgagcgagtacgggacggcgacttacctgtagcaatgatgatgtgatgtgcgagtagtaggatacgagcgagatcaggagacntgaggtgtgcatatgtaatactgatgagaatatatgaatacatatatgtatagagtaattagcttcagtcatctagatcatactcattcatatatcccttgctagcgatgctgagagcgcggtagcgtantcatgtctaactctctgtctcatatatcttacacgctcacacacactcttgtcatacgttgatctcacagtctcaagatg

SEQ ID NO: 3394 - DNA, 180 bp, Glycine max
  Probeset Number=SeqID_13173
ccgttgcagatccctcattgtttaatgggatgaaattggtatggattccatagtcggattgcctcgcactctatccggctactattctatttgagtagtggtggaaccgtttgaccaattcatcccacttcatacctatcaacaccaactacaacatctcaacattttcaaatttttata

SEQ ID NO: 3395 - DNA, 1701 bp, Glycine max
  misc_feature (7)..(7): n is a, c, g, or t
  misc_feature (32)..(32): n is a, c, g, or t
  misc_feature (62)..(62): n is a, c, g, or t
  misc_feature (79)..(80): n is a, c, g, or t
  misc_feature (84)..(84): n is a, c, g, or t
  misc_feature (86)..(88): n is a, c, g, or t
  misc_feature (94)..(94): n is a, c, g, or t
  misc_feature (101)..(101): n is a, c, g, or t
  misc_feature (201)..(201): n is a, c, g, or t
  misc_feature (214)..(216): n is a, c, g, or t
  misc_feature (424)..(424): n is a, c, g, or t
  misc_feature (508)..(508): n is a, c, g, or t
  misc_feature (526)..(526): n is a, c, g, or t
  misc_feature (528)..(528): n is a, c, g, or t
  misc_feature (532)..(532): n is a, c, g, or t
  misc_feature (569)..(569): n is a, c, g, or t
  misc_feature (721)..(722): n is a, c, g, or t
  misc_feature (743)..(743): n is a, c, g, or t
  misc_feature (921)..(921): n is a, c, g, or t
  misc_feature (976)..(976): n is a, c, g, or t
  misc_feature (1060)..(1060): n is a, c, g, or t
  misc_feature (1080)..(1080): n is a, c, g, or t
  misc_feature (1131)..(1131): n is a, c, g, or t
  misc_feature (1207)..(1207): n is a, c, g, or t
  misc_feature (1214)..(1214): n is a, c, g, or t
  misc_feature (1284)..(1284): n is a, c, g, or t
  misc_feature (1294)..(1294): n is a, c, g, or t
  misc_feature (1335)..(1335): n is a, c, g, or t
  misc_feature (1429)..(1429): n is a, c, g, or t
  misc_feature (1471)..(1471): n is a, c, g, or t
  misc_feature (1492)..(1492): n is a, c, g, or t
  misc_feature (1497)..(1497): n is a, c, g, or t
  misc_feature (1501)..(1501): n is a, c, g, or t
  misc_feature (1563)..(1563): n is a, c, g, or t
  misc_feature (1698)..(1698): n is a, c, g, or t
  misc_feature (1701)..(1701): n is a, c, g, or t
  Peptide Sequence Number=SeqID_6843
  Probeset Number=SeqID_13174
gtttttntttgtgttgtggttgtgtgtgggtnttttggtgtgtgttgtcgtgtccgtcctgngtggtgtcttgtgtccnnccgncnnncgtccntcacctnaccaaaatccgtaccatttacctactcacgcactggcccttcagcaaaacctcatcaccccccactcgccctctcactcccctcatgcgccacacaccgnaggagatgggggnnntttccggaagatgtcgtctacacccacacacacgcccagcagtgctacaacacgcacgacgtcttcggttcctacgcataatcgctggcgttccactagccatctctgcacacgcgctactcatgcagtgcctggccgactgtacgtctcccctcccgccacgacactagcaccccgcacgatttcatctatccctcatacacaccgntcatcatcatgaggctgctccgacatcgatgtgacaccgaagagactagcaactacggcgaatgcttgacgcaactcacgacgngcgctcctcacactcccntngtcntcaccacgccagacgatacaacgaatcatgtactaanaccaacacaaaggcacgaccatcacacacagatggagagaacgtgaggacggaatataatgatgtagaatgagacgctgactaataatacatcgttatgagagaaaaaagctcacattctatccatctcatctcgatcaatatcacaaaggnntaacgtcaatcgacctcatcnacagatgacgtacaactagactgtataacgagacacactctcatacgttccctctagcgcagtcgatctactccgacgctcagatgtagtgaacggacacatacgataacgacaccacgacaacagagctgacactaatcatgcaatatctccatccctactctctccacatgaccgnaccacataatcacacacagtaattcaacactcagctggcgacataccgccctccncactccctacgatccgcactcattactgtgatgtatatccgtctcgcgtcgctacactgtaccgactactctacgacttctatncaagatcgcatgacgagatncgacgtaccttcaacatgtgcacgcagcgcgaatagtcgacaatcatcgcntgccgccacgacgatgagacacatcacatcacgcatgagtatcgcgtccacgctagctactaatatgatgatgagngatagtngcactacctcatcacccttcgacgactgcgtacagtgaccatgactgtcggtgctcgacatggacacgtngacgtcgtcngcgtgacgatagcgagcatcgtcccggtataaagcaccgtnatgcatcagctgtccgcgccgctgcacacctctgtaccacgctctcatactcgccgacactcttgcgaccgatctgctctcctcgctcatcgtnagcgactatatcacgcaagctcatccatcatgccactcagantacactctgacctaaactcanacacnatcnaccatagctcgacttatgtatcactcacagacacactactatccacgtgactctaacaaatnacactacgctctacatgataacatgcgcacacatcccatactatcctaactgctatatcacattcatcatcatctgacactgcacttcacatctatcacatctcgactaacgctcatccaactcatcatcactcntcn

SEQ ID NO: 3396 - DNA, 456 bp, Glycine max
  Probeset Number=SeqID_13175
gagaagaagaagaagaagaagaggagaagcagtaggctgttcaagaagaagaagaaatagttcgatggcgatgacattagcagcttcgtcctctgtggtagtgatgattccacgtgtctccaccgtctcttaccttcctccgctgcctcctcgctcttttggtcgatcatctttcactgttcctctgaagctagtttcagggaatggtttgcagaaggttgaattgatgaagacgagagcttcttcatcagacgagacctcagcgtccattgacaccaacgaactctttaatgacttgaaggaaaagtgggatggtcttgagaacaagacgactgtggttatctacggaggaggagccattgttgctgtttggttatcttccattcttgttggtgccatcaactctgttcctctgcttccgaaagttatggagcttgttggtctcgggtacacagg

SEQ ID NO: 3397 - DNA, 1364 bp, Glycine max
  misc_feature (81)..(81): n is a, c, g, or t
  misc_feature (90)..(90): n is a, c, g, or t
  misc_feature (136)..(136): n is a, c, g, or t
  misc_feature (237)..(237): n is a, c, g, or t
  Peptide Sequence Number=SeqID_6844
  Probeset Number=SeqID_13176
gactactttaatcatttccaccctacttgacactattttatcctatactttcattcccatcgatcgccgatatctccttantataagatnacattatttcactaagcgctctctctcctttgtcagctctgcactnactcttcgcccgttctcactcaaatctcacttcaccccgcatctatttgatatctctcatagtgtatccgctacgccaatctctactaatgccacatcatnctacctatcattctaacaccaacctattcttatcacaccagatcctactaatactctcatgtattcattgctgctatacgttatatagaatatcatctatatctacctacgccacctctttcttctctcccactacaccataatatcacccactactctcatcacacctcactacttcacctcgcatataatatctcaccctatactccttattcccaccatttttcgactctctccacaacacatctcttcatacgttcagtcaccgaccaatgccacccgctctcatctatgcatcatctctctctctctttccgccttccccccatttaataccccatctctccattctacccaacctcacacccataatcccttaactttcctcctactccttccctttacactctttccatctatataatacatcttatccccaatttaactatcagaactacctatccctttctactctcatactatctctactttactcatttccttcttatactctctacacattttgctccctctatcaagatatactaacacctacacctcctccacaatattccattacaaccttcacaatctttctatcttcttcactcactactatcttatctctctttccctctctctcatttatttcttattacatatctctttcctctcatatcaagatctatatattccttacacccccaccaccatcactcctcactatcttcctctcacttatctactcctcgtcactcacttaggtttactatatccaaaactatcatctttttcgccttctacacactatatcttacatccttatcacactaccctcccatattgtccttcctctacccctatcttctcctcctccacccttattactcctcttctctcctccctctcctttttcttttttgggaacaaaaaatcctcctttcctcatcctctccatcatcttacactaattttcccccctctcctctttcttgtgcacactactctctctcccccctctcctctttttggaaaacacctctcctctttcacttccaccaccactcccaccggtcacaccatcttttttttctctcgttttatactccaatctcttcccccaacct

SEQ ID NO: 3398 - DNA, 882 bp, Glycine max
  misc_feature (881)..(882): n is a, c, g, or t
  Probeset Number=SeqID_13177
ctatacaaaaaaaattcaggttcattaaatataaatcctgatagtaaattcataatgaacagtcatgtaaagctattttaaagagttgattgcttgaagtctccaacgcaaccgtgaaaatgaagcagtcacgacttgtattcatttcctaaaacaataagtaaaagattataagacatccgtagatatagataatatgtaagaacactaagggaatggagccttcaatggccaactggagctatcaccacacaacgtctttggactcaagaaatgtgtaccaccttctcttgggtttatgctgcttcagaatgttatgatttccataacctgattaattgtgcgtttgttatttctgcacccaaaaaaatcaagtgtcacccgtgtcacccccttctattccagaataaaaaggtgtgcacttgatttttgttgagttgttgagtgcaggaagaaacacccttagtatgtcttaattgtctttttttaattcaatcattatttcgggccaagcccactttagagcgtatgatagatacacatataaaactctgaaactttcctatgtcgtcctaacgactttagtgcataaacaacaagacagcaggaaattagatcttctattgctgtcgattaccaatttgccgatacactggggcacgttcagaaaactacaccactttcaaaaaagacatgtcagtactgaacatccaattcaaaaaaataaaatcccttcgtgacgaagagcaaaggttcacgggtatagcaattcttaagaagcagggaaaaaaatgttcaaacacttttttttattacatatatttttttattactacatgaaaaccggataaaattttaagaatgttctatcaacgacctcnn

SEQ ID NO: 3399 - DNA, 613 bp, Glycine max
  Peptide Sequence Number=SeqID_6845
  Probeset Number=SeqID_13178
ttttttttttttttttttatttttttttttttttttttttttttttttttttttttttttttttggaaccaaaaggaaattcccttttcccaaaaaaaaaaaaaaaaaattttttttcaatgggccccaaccccctgggggggttaattttaattgaaaaccgggccaagtttaaaaccccaaaccaaaaacaaggggtttaaaaaaattgcaatgaaggatgaccctttggggaaaagggggggaaaacttgcggtaaggcccgtttttgcccaaaaaattgcaacaacccgcaattcccctgaaaattgccaagggacttcccccccaaaaatcaaaaccgaaattgcaaaaaaaccgaaaatgtttttcatgaacccccccccataaatcccaaaaatggcaaaaaagggagttctaggcttcttagggggggcttctttgattgcgaaagttgcttccccaccatttggggcccagggagctagaataaatgacctgaaaaaggggtggaaccctgccctgaaacctatcttcttgaaacccaaaatctgaccccggacccgggacctaaatttgacctaagccttttcccaaaccaagaaaaaaattc

SEQ ID NO: 3400 - DNA, 606 bp, Glycine max
  Peptide Sequence Number=SeqID_6846
  Probeset Number=SeqID_13179
ttcactcggacattcccacagcacctgtacaatgtgagtccctcttaccacagctgtttgttgtatcattgcaacataccaagagtgccctgattccatagaagaagatggctgtgtaagaatattgacgagaatggagatatttgtgtgggctttactgcctttacaatctatggtaaaaaactaaaaatgctatctagaaaatctgaaatatacacaattaaattaaatggaacaagtattaagaattacttgcctttgcttttctcagtagttatatttttaagataaagcttcaatgaagtgttgtttagccttctgttctgataatcaagcaatagatggctcagagtacattattttacaagttttcttttacttttatgagtttatttatatattgttttgcagatccagagcaacctgtttgcccgattactggtttgcctgccaagtaccgtgatccaaagactggccagccatatgctacaaaagaagcttttaaaataattcgagaacgctttctgaatgaaagtactaacagtagaaaggacatgagcatgggaggcttatatgattcagtttctggatgtggtttttcaatta

SEQ ID NO: 3401 - DNA, 1363 bp, Glycine max
  misc_feature (8)..(8): n is a, c, g, or t
  misc_feature (35)..(35): n is a, c, g, or t
  misc_feature (112)..(112): n is a, c, g, or t
  Peptide Sequence Number=SeqID_6847
  Probeset Number=SeqID_13180
cacagatnctcaaacgagtgtataattacacgatncatctatcgatcttcaagtcggacacttgcgtaaatattgcagacgaacgaggttggcgcataggatgagaccagcngagagaataggcgtgaagattctaactatactgtgtgttatgcattcagggagacaaacataagcggcgatgtgaatgtagtgcagataagcagactaagtggccgctctggtaaaactggagttcgtatgctccacctatttcaatcaataatataattgacagtcggggccgagcagtatgagtcaaaacactcagcgtcgcatgaaggagatggaaaagcgcctagaccataacatacactgattacatgtaaggttaaagtcagaaagtaagtcgacgtttctacgtaacgatgggcgagaatagataggtgtagttgtagcatatctttgtcgcggtttgctcataaagcgtgcgtggtgcatggcgataataacacacacctatgtacaaatcccagtcatacaatacacacgcgcgaaggcaactaatactattaatgtctcgatggtgaatcagctgtgggttgcgttacaggcgttataccaatagctgtcagcgtgagagtcagtacgatatcaagcggaggaataagtcaatgggaagcaaataacagatcgcggactgcccttcgccggacacaaacacatcacagatcaggaagtattagaaatatgaataattatcatatattaacacaaactttattcatgatactagaataacatacacgtactgcacgcgcgttaggtctaacaaatccagctgcgctaatagtcgtgtagttatcggtctggcgcttcatccggactctcgccgtacacgaccaaggcggtgccgggcgcgcgcgttccgtcagcgccagggacgtgtcacgtcgcgctcgagaatagcgggcggtgagaagaacaaaagaacgacacgcgaagaagcatctcagacaggagctcgagatgagacacgaaatgcgatacaaaacgagcgcccgggcacagaaatcggcatcaacctccgcatcctcgaatcaccacctctatacacaccgcgtccgccgcatttcccgcctggttgcacatgagatactacaaactgcgtacgagagcccacttaataggtaagtacaggaagtagaggaaatgcacgtggatcagtgaccggatgatatgagtgatggggggaggtggtttggtgagtgatatctagttatattgtatacgtaggtgagtccccgaccgccgcgcgggtgtagcgatgcactggtgcctcagaacgcgggtgagtacatacaccatgcatccaaccaccagt

SEQ ID NO: 3402 - DNA, 1283 bp, Glycine max
  misc_feature (1283)..(1283): n is a, c, g, or t
  Probeset Number=SeqID_13181
ctttttcttcagaaacagtaaaccaaaaactatccattgctttccccctagcgttttcttctcggtcgatcttcttctccaactcacactccggcgtctcttagtcgaccgaccgctccttcagcagagaaagtcattccggaaacatgccgggtcagaagattgaaacaggtcatgaggacatggtccatgatgtgcagatggactactacggaaagagagttgcaactgcctcatctgactgcaccatcaagataaccggcgtcagcaacaacggtggatcccagcacctagctacattaaccggccaccgtggtcccgtctggcaggtcgcgtgggcccaccctaagtttggatcattccttgcttcatgctcctatgacggtcaggtcatactctggaaagaaggcagccaaaaccagtggacccaagctcatgtcttcacggaccataaatcttcggtcaactccatcgcttgggctcctcatgacctcggactgtccttggcttgtgggtcatccgacggaaacatttcggtattcacaggccgtgctgatggtggttgggacacgacgaagatcgaccaagcgcatccggttggagtcacttctgtctcatgggcaccagccactgcgcctggtgctcttgtcagctctggattgcttgatccggtttacaagctggcttccggtgggtgtgataatactgtgaaagtgtggaagctctcaaatgggtcgtggaagatggattgctttccggctcttcagaagcatactgattgggttcgtgatgtggcttgggcaccgaacttgggtctccctaagtccaccatagccagtggctcacaggatgggaaagtgatcatatggacagtggggaaagaaggtgagcagtgggaaggtaaggttctgaaggactttatgaccccggtgtggcgggtatcgtggtcgttgacaggtaacatgttggctgtgtccgatgggaacaacaacatgacggtgtggaaagaggctgttgatggagagtgggaacaggtcaccgttatggaatgatacgtttcgctatttactttactgaattaaagtctttttaaaaggatcctttttctcaggctggtttggtggtctatctgtgagggaatgtggatgtgtttttttcttcttcttaatttgggtttcggaacattttggtcattttcatctttcctagcgactttttcttttgtttttcctttttaaaaacactatcttcgtgaaatataatatcttagttttaaactggan

SEQ ID NO: 3403 - DNA, 698 bp, Glycine max
  misc_feature (601)..(698): n is a, c, g, or t
  Peptide Sequence Number=SeqID_6848
  Probeset Number=SeqID_13182
tcaaaaaaaagaacacctacattcatccttgtgtttccgatcccgccattgcaaagggaaaaaaatggcttctgcgccatcgtagaaccctaacgtactttttccaacccgcttcgaagcgcttgaagcccactctccccgcatcatgcaaatccgacgacgccgatgcttccacgctctcctacgatcataagttgctgatgggatacaacaagctcctcgtcacctcccacaggtatctcaaactctgcgtcgagaggagctccaaaagcaagaatcaggtttaggtggcgtgaagctggaaaaactgcttgtgcaaaaaacggggttggaaacctccaccgggggaactcaaaaacccaatggcccccctcccccccaaattccgtaaaaaggaaaaattccgggggaaagagggagtttttccccccccaacgccttggtttttcaaggctttaaccccacgcctttttaaaaaagcaaaaggtttttctctatgggcaaccccctttaagggggccggaaaaaaaaggggtcttcctttccgcgcccccgaggaaaaaaccccccccccggggggaacaattttgagggtctcccnnnnnnnnnnnnnnnnnnnnnnnnnnnnnnnnnnnnnnnnnnnnnnnnnnnnnnnnnnnnnnnnnnnnnnnnnnnnnnnnnnnnnnnnnnnnnnnnnn

SEQ ID NO: 3404 - DNA, 575 bp, Glycine max
  Probeset Number=SeqID_13183
cttgtctttttttgccacgagctgccgggaggttgaagggggggagggggggaaccgcgggacaatagaaccagacgtggtatctcttctgtgtcagcgatttttgcgatggctggcctctactgttcatttgcgcaagacagatagaggtagtgtgccgacgcggcaagcattcgcccgcctccgggggtttcgtttgggggcagggttacaggagggttttaggagatagggttctgtccattggagcaacgtgggcgccaatttccccataatatcccttggcaatgacatactttttgacagcttaaatcggaggacaagcagtaatgaccttgacaatgaagctcttgcctttaaacctgttttaggctccatgcttgcaagaatttatcataatccacaaagcaatgaggaatacaggaaaagaatgcagcaaatggtggagttctggtcttctaagaaggtatacgatcaagagactatatctttctgaaaggtgagatgattggtgggccacaattgtttaaacacaataaagtttaactgaacaaaatagatttaactatacaatt

SEQ ID NO: 3405 - DNA, 1600 bp, Glycine max
  misc_feature (263)..(263): n is a, c, g, or t
  misc_feature (361)..(361): n is a, c, g, or t
  misc_feature (425)..(425): n is a, c, g, or t
  misc_feature (456)..(456): n is a, c, g, or t
  misc_feature (553)..(553): n is a, c, g, or t
  misc_feature (627)..(627): n is a, c, g, or t
  misc_feature (629)..(629): n is a, c, g, or t
  misc_feature (632)..(632): n is a, c, g, or t
  misc_feature (667)..(667): n is a, c, g, or t
  misc_feature (673)..(673): n is a, c, g, or t
  misc_feature (832)..(832): n is a, c, g, or t
  misc_feature (834)..(834): n is a, c, g, or t
  misc_feature (923)..(923): n is a, c, g, or t
  misc_feature (974)..(974): n is a, c, g, or t
  misc_feature (1001)..(1001): n is a, c, g, or t
  misc_feature (1045)..(1045): n is a, c, g, or t
  misc_feature (1130)..(1131): n is a, c, g, or t
  misc_feature (1134)..(1134): n is a, c, g, or t
  misc_feature (1147)..(1147): n is a, c, g, or t
  misc_feature (1150)..(1150): n is a, c, g, or t
  misc_feature (1187)..(1187): n is a, c, g, or t
  misc_feature (1267)..(1267): n is a, c, g, or t
  misc_feature (1294)..(1294): n is a, c, g, or t
  misc_feature (1332)..(1332): n is a, c, g, or t
  misc_feature (1402)..(1402): n is a, c, g, or t
  misc_feature (1431)..(1431): n is a, c, g, or t
  misc_feature (1433)..(1433): n is a, c, g, or t
  misc_feature (1467)..(1467): n is a, c, g, or t
  misc_feature (1531)..(1531): n is a, c, g, or t
  misc_feature (1541)..(1541): n is a, c, g, or t
  misc_feature (1579)..(1579): n is a, c, g, or t
  misc_feature (1598)..(1598): n is a, c, g, or t
  Peptide Sequence Number=SeqID_6849
  Probeset Number=SeqID_13184
gtggcgccgctcaaccacgaggttctcgcagcaacttgactggatacgtgtgtgtgcgtcgccctcgcaagccagtgcgcgctcggcggcgcggggaggcgcgttgggtatatttatctgtatttgcgactctcgatgcgcatctctctctctcttacgagtgcgcgcatggaggcgctgattgtggcttttatgcctgacgcgcacacgatcggcgcctcgctgctccattatgtcgtttacctttacgtcataattggtgnatagagtgatagagagggtcgttcgctgttcgcgtgtgcgggcgcgggtggtgcggcggcgcgttgtagcagtgtgtgtgtctcgtacaggcttcggngaactacaccgcgtctgtagttcggcttgtcggccccgcgtcgtatgtggcgtttgtgttgtgncgtcgtatgcgcgccaacacgcgacgtgtanagcgcactacatgatctgcgatcccactcataatataacggccgtggatgcgttactctgccgcatacgtacgctgcgccctttccgacgtatatcnggatatggtggtggcgttgggtcgcggtgttccgggtccccgtggttggcgccagagcggcggagcggtgtgantnacnctgatgttgtgtgcgctcgtcgcctcatctcctgngtccgnacacctgtattgcgtgtatgttgtatcggcgccgggttatgcgttatcgctatgtatgtcgcgtgcctgcgtcgcggtgattccgcgcggtgccgtttgtctcgttcgggacgtcgcgtccacgcttgtgtgatacgcgcgggcgcgcgcactgcgccntnctcgtcagatttatgtgtccggcgatagctgcgggtagttgttagtttatggagtgctgactcgccggtataccgtcatgcgatccgcncgtagcgccgcggcgcgtataatggtaatactgtgctactatatctatctncggtgatctttaacgtctgtcgctatnctcgcaccgcactctgcctgacacgccgcccgtatgttctgccngtgagtacgctcgctgccatctaggcatagttgagtcacgctgtgatatatatagagtgcgcgtcgcgcgcgctggctgcgttanntgngtctctgcgtgtnatntatgtctcgttcctcgtacacgacctcagccggcgantgccgtcgctctgatactggctgtatgtccgtgtgtgatgcaactcgattagtatctatacgcgcgcgtcgcacgactgntccagtgtgtcttatgtctagcggatnttcagatacgcacgtagttatgatacgtggtgcgcgcngcactgcatgtcgcgagcggcggccgtggtatgatagttattgtctagcgccgcacggcgtgcgcgccancgatagatactactattaccgattctctngngtacgtgctgcgctactcctgccacgcgccgctncacgagaaataatatacactatcgtagcggtacgctctgcgcgcgtcggtggtctttctgacgnctgataatangagatgttagctagtggaccgtcgcgcgttcacttgtnctcctcgtgcgccacctcntg

SEQ ID NO: 3406 - DNA, 1458 bp, Glycine max
  misc_feature (1)..(37): n is a, c, g, or t
  misc_feature (53)..(55): n is a, c, g, or t
  misc_feature (57)..(57): n is a, c, g, or t
  misc_feature (295)..(295): n is a, c, g, or t
  misc_feature (304)..(304): n is a, c, g, or t
  misc_feature (1386)..(1386): n is a, c, g, or t
  misc_feature (1440)..(1440): n is a, c, g, or t
  Probeset Number=SeqID_13185
nnnnnnnnnnnnnnnnnnnnnnnnnnnnnnnnnnnnnggtttttccggtgtannngntgcatgtacatccgcccactgacgagtcgtctgcgggcccctttcttgtttggccgcagtcttcctcctttttctttccccggacggggtgtcgcctcatgcgctgcctttcttctttatttcttgaacacgcgacatcattaaaccacccgtaacccagagggcacggtagctatatctggcccctcggactcccacaacacagatttgcagaaagggtatcagtatatggtggaancatgatttnatgaaaagagcgaagaagttatgtattcatgttagctgtttcggtggtctttgtcctaaatattgccctactcctttggtactacatacgcataaatatgttttcttactcttcctccataaaacatataccaaatatatacttaagaatatattacccgaggcgccaggagcggataggagggaggatgggcgggaaggggcggagagcggcgcgtgcggcgtgacccgcaacatcctattaattaacattctgttcccctcctccgaaaaagacagaagagaacaagaccaccatatttactaatgtctggagatggggaagaaatgttaattcatacctgttctcgtgtccgccgcccgccaacgcccccgccagttagaggagagacataaaaactagtcgtcattaacaggaaacatctccgcccccatcgctgcgcgggctcagttgtcgcgttgacgctctgccgtcgggcgatccaggaaccgtcggtgcctggcgacgaaggaggcacgagccagccgaactatctattgttagttattctcaatcctattcattgatgcattgatagatagtacgccgttcatcacgaacgacccaaacaagagagggagagcaatgatagtcacgagtgatagagggacggagctggcgcatagtattttgagctgccgacacaggtccgtctcacccggctgcctctctgaccccatgatgtggagctggagtgtgatgaagggtaagggataagggaatagacggtgtgcgggcataaaggataatatgtactgagacaagacgactcggagcactgctcgcatagagagatagaaacagatatgacctaaatataatactctccttctctgcccacggtgtccttaatatcgtataagtataaaaacagcacatggtaagaccgtagctacaaatacatttacccctatgtaacgaatacatctgaatccactacgatcacttcttgttggggcgtatcgctgcattcttctcgctagatatatagtatatctgtctcgaatctacgccgcgtgttgcatacgagtatttgtctcttnttcctgtgaggggtcggggcggaggggcacacagactcgtctacgcggacgttnctcgtaacgcactctgtg

SEQ ID NO: 3407 - DNA, 469 bp, Glycine max
  misc_feature (219)..(220): n is a, c, g, or t
  misc_feature (452)..(452): n is a, c, g, or t
  Peptide Sequence Number=SeqID_6850
  Probeset Number=SeqID_13186
aacacaccatatccctctcgctcgccctcctcttctccgtctagatcgcgcccgagccgttgttgccgcaccatcatcgtcctcgcggccattggcctccccggcgcccgggaggatgtccaggagcttcagcacggacgactccttcgtctacttgcttcgattcgagtaggggcgccccggaagctcgccatcgcccgtcttctccgccaccacggnngccgcatctcgtcgacgagcgcgaagcgtccggccacctccgcgccttcggccatgtccacgaaccccactaccccgtgacgatgatgatgcccctgtgatcgactacgtcaccgacgacccctccttctcgtctgagcaaccagatgctggagtccaggagctagagatcccgaggatgattctacatggagttcggcttcgaggagtagttaggaggtcccaggcaggangccttgccttttcgatc

SEQ ID NO: 3408 - DNA, 1932 bp, Glycine max
  misc_feature (39)..(39): n is a, c, g, or t
  misc_feature (48)..(48): n is a, c, g, or t
  misc_feature (56)..(56): n is a, c, g, or t
  misc_feature (63)..(63): n is a, c, g, or t
  misc_feature (68)..(68): n is a, c, g, or t
  misc_feature (80)..(80): n is a, c, g, or t
  misc_feature (91)..(91): n is a, c, g, or t
  misc_feature (96)..(96): n is a, c, g, or t
  misc_feature (175)..(175): n is a, c, g, or t
  misc_feature (194)..(194): n is a, c, g, or t
  misc_feature (197)..(197): n is a, c, g, or t
  misc_feature (215)..(215): n is a, c, g, or t
  misc_feature (219)..(219): n is a, c, g, or t
  misc_feature (242)..(242): n is a, c, g, or t
  misc_feature (288)..(288): n is a, c, g, or t
  misc_feature (371)..(371): n is a, c, g, or t
  misc_feature (384)..(384): n is a, c, g, or t
  misc_feature (411)..(411): n is a, c, g, or t
  misc_feature (429)..(429): n is a, c, g, or t
  misc_feature (432)..(432): n is a, c, g, or t
  misc_feature (453)..(453): n is a, c, g, or t
  misc_feature (475)..(475): n is a, c, g, or t
  misc_feature (492)..(492): n is a, c, g, or t
  misc_feature (552)..(552): n is a, c, g, or t
  misc_feature (663)..(663): n is a, c, g, or t
  misc_feature (796)..(796): n is a, c, g, or t
  misc_feature (920)..(920): n is a, c, g, or t
  misc_feature (978)..(978): n is a, c, g, or t
  misc_feature (996)..(996): n is a, c, g, or t
  misc_feature (1028)..(1028): n is a, c, g, or t
  misc_feature (1030)..(1030): n is a, c, g, or t
  misc_feature (1096)..(1096): n is a, c, g, or t
  misc_feature (1133)..(1133): n is a, c, g, or t
  misc_feature (1283)..(1283): n is a, c, g, or t
  misc_feature (1389)..(1389): n is a, c, g, or t
  misc_feature (1470)..(1470): n is a, c, g, or t
  misc_feature (1564)..(1564): n is a, c, g, or t
  misc_feature (1668)..(1668): n is a, c, g, or t
  misc_feature (1670)..(1670): n is a, c, g, or t
  misc_feature (1672)..(1672): n is a, c, g, or t
  misc_feature (1674)..(1674): n is a, c, g, or t
  misc_feature (1713)..(1713): n is a, c, g, or t
  misc_feature (1731)..(1731): n is a, c, g, or t
  misc_feature (1783)..(1783): n is a, c, g, or t
  misc_feature (1809)..(1809): n is a, c, g, or t
  misc_feature (1877)..(1877): n is a, c, g, or t
  misc_feature (1893)..(1893): n is a, c, g, or t
  misc_feature (1895)..(1895): n is a, c, g, or t
  misc_feature (1899)..(1900): n is a, c, g, or t
  misc_feature (1910)..(1913): n is a, c, g, or t
  misc_feature (1932)..(1932): n is a, c, g, or t
  Probeset Number=SeqID_13187
ccgacgtcgtatcagttatagcatcatactactgtacgnctaatgagntggctcancgtgcgntgcgncgatccagtacncactcctgctnactancttcgtccgaacgactctagtcggatcacagatacatgcggatcgctcgtctcgcgacgtcggtcgatcgtacatcgancgatgacgctatcgtgcgncgncgcctatctagtaaactncctncctactgtctgtcatgcacgcancatctagcgatacgtctcgtgtataccgcctatgcatgctatatgnttgatacgactatatcatatgcgtgacatctacgatacgatacactacactcgagttatcgtcacacacatcatactatcgtntatgctattcganttacgtgtatctgcactatgatgtctntctacacaactctatatnagnctgtctgagcttatgtactcngttcctatgagcgctgatgctntcatacgcgcgcatcantatctacggcacacaggtagtctgctcacatacatatatgatactactcacatgcacagnatcgcttcgtgtgcggcgagtaatatcagtgatgtcgtcatcgcgactatagagttctcgtgttcgctcttatacgacgagacccgttacacatactcgcatcaggcacgngctggttcgtaagttagtgtagtcgtcagacatgacgacgtatctagtgtgagtatggacgatatcttgtcatgagtgaatatgcttctcgtgtgtcgcactctaacccacgtcttttcgcatcacatatcanactacgtacatctcgactattcattatcgatcgatactgacgttagcgcactagcatcgacgactgtcgtgatacgcagcgacgtcaccggtcgatacgtatgctcaatactatctcattactnttctgtactcgacgtagtctgtatattcgtgtaactctcttctgctcatacacatagnaggcacgtcgcagcgagnggtatagactctgcgcgcgagatgcgcatgcncnacgcattatgcgtcgcatcactcgcgctcagcgttctctcacagcaagtactataatcgtcacatngcatcgacgctcgacatgcatatcagatatactcgcnttgcttcgagcgacgcgacactgtcgtctctcatgtacgttcgtatactcacgcgtagatgcaatgacgagtcgataggcgcgagcggctacagtgtatcgtcacgagaataatacgacatgcacgtcctcacgcacactcgagtctcgngtcctggtgatacgtcgctcacgagtctcgtcctgtctatgttctcgattgctaagtatctcttgctcacaatgattctgacgattactctgtcgtcgatgtgcgnatgtgaagtgtgcggtactgtggtgccgtagtatcttgtcattttctcatatgctatctatttagtctcttctcgagtgtntgtgtgtgttatgttatgtcatttctattttatgtttgtcggttgaggcgcgtgggtttgctattcatatgtgtgattacgtattacagtatancacgctgagcgtgttgtgatatcgatcggactattatcaggtcgactacactacttctaccgatatgtcgctcgaacgtcgtcattgcactcacggccgcgggngngngngaaactatctcgtaatcatcttcttatcatatatgttgntcttgtctttgtgtgtgngtcgtatggatatgtgtgctatgtcgcataactcttcttatcaattatctcnttggtgagagtataaacacaacgtgnggaatttatgagcaatctaaataagagcaattaacacacatcacgtgtataattataatatatgtatntaaaaaaataattaananaaannacacaccccnnnncacaaacccaaaccaaaan

SEQ ID NO: 3409 - DNA, 1816 bp, Glycine max
  misc_feature (25)..(25): n is a, c, g, or t
  misc_feature (162)..(162): n is a, c, g, or t
  misc_feature (713)..(713): n is a, c, g, or t
  misc_feature (728)..(728): n is a, c, g, or t
  misc_feature (900)..(900): n is a, c, g, or t
  misc_feature (948)..(948): n is a, c, g, or t
  misc_feature (973)..(973): n is a, c, g, or t
  misc_feature (1131)..(1131): n is a, c, g, or t
  misc_feature (1135)..(1135): n is a, c, g, or t
  misc_feature (1144)..(1144): n is a, c, g, or t
  misc_feature (1223)..(1223): n is a, c, g, or t
  misc_feature (1239)..(1239): n is a, c, g, or t
  misc_feature (1263)..(1263): n is a, c, g, or t
  misc_feature (1275)..(1275): n is a, c, g, or t
  misc_feature (1288)..(1288): n is a, c, g, or t
  misc_feature (1292)..(1292): n is a, c, g, or t
  misc_feature (1311)..(1311): n is a, c, g, or t
  misc_feature (1320)..(1320): n is a, c, g, or t
  misc_feature (1327)..(1327): n is a, c, g, or t
  misc_feature (1333)..(1333): n is a, c, g, or t
  misc_feature (1335)..(1335): n is a, c, g, or t
  misc_feature (1339)..(1340): n is a, c, g, or t
  misc_feature (1392)..(1392): n is a, c, g, or t
  misc_feature (1409)..(1409): n is a, c, g, or t
  misc_feature (1437)..(1437): n is a, c, g, or t
  misc_feature (1506)..(1506): n is a, c, g, or t
  misc_feature (1509)..(1509): n is a, c, g, or t
  misc_feature (1520)..(1521): n is a, c, g, or t
  misc_feature (1526)..(1526): n is a, c, g, or t
  misc_feature (1600)..(1600): n is a, c, g, or t
  misc_feature (1645)..(1646): n is a, c, g, or t
  misc_feature (1669)..(1669): n is a, c, g, or t
  misc_feature (1730)..(1730): n is a, c, g, or t
  misc_feature (1760)..(1760): n is a, c, g, or t
  misc_feature (1783)..(1783): n is a, c, g, or t
  Peptide Sequence Number=SeqID_6851
  Probeset Number=SeqID_13188
cttctaactccatttcatattcctnttcccttgtcctacttgtatttgttcttcacctctcccgtttatcttgtacgcttatatttagtattgacgtccttgggcggccctctctctatctactcgcgcgttcaacacgtgtaccagcgcatctatcactancaccatcatgcacgcttcaccatccgactccgcacgcgtagtatgttagagcatctctgacataagacacgcacgcactagatcgactgctcattatcagagctagttcagctcgtcacctacacatccatatatttaataactcgctattagtgtaacttacacctacgtatcgcacctcaaatccctaactatacacgacttcgagattcactctgcttctcgtcgtcatctacgagacgcaccacatatgctaaccacacaagaggaagcacccaaatcttctagcactgctagtctccccttcgctgtcgtcgccgtcagaacatactatgttacctaagcacgtcaccctcttacctcatgcccacgagatgcatcttcagtatggcaccctgcagaccatcggtctccactctgcgctagacttggaacgtcatcgaactctctccatatctcacacacaacgtgcataattgcgactggcatctgctcaccgcacctgtcctctatcttcgttactgtaactctcactactccactccctgagnagacttacagctggntaattcgctatatacacctatcacaaaacaggtttgctcgactcctttcatattaccctctatcgaatctgccatagctgacatacatattcgattcgcttacattgtgattggccccttggcgtgccaacgtcaaatcacaatcatctgcgtgctaatacaccgtatacgnagcacctctcttcaacctccgcgaatatcgcggtcactatctccgcantgagcaccggccagctcctcataantctcttagtgctaatatatcatgtgagaggaacagcgaaaccttttatacctatgatctccttgaggtcgcgaaaccacaatcgtcatcagactatcctcatttcagcttactatagccagcttacaacggcatacgtctcgtatgtatgtggtatcnctgncacacatancagatgcattgtgtctactctatcatctactcactctctactagatagagatgctcattatgtctgaaatacgtataanatagatcccgcatacnacatcatcgtctatgattatctancgttgcgaccanacgagatcgtacnaggnatgcatagtactcgacccnctgtcgctncgtctcntctatntncganngactgtgcaaatcgtgtgtacctatgcagtacgctgctctactgcagcagangatcgtgactacaacancgcagccatcacgccctgtctagacggncgtaatccgacagtcacacgtataccaaccaccatcctcgctgaccctcgacattcgtcaagcgcgcanacnttcatatatcnncttgngactagcacgtcgggcgtcacgatacgtgtctgtgtccagtgtcgaatctgatctagctcagtctactgcacantgtgagagatagtctctgcgtatcatcaacgatctcacgtatcanngcttctcacataaaagcgtcacncacgtcggcgcatatgtgagaaaaaatgagtcatcacgcactctacgcacgcaactcgacngcatacacatccttctaacatctgtggccnactgacgcgacgcgtgcgctcanctacatgcagagctacttagcgtgcgtagagag

SEQ ID NO: 3410 - DNA, 1448 bp, Glycine max
  misc_feature (9)..(9): n is a, c, g, or t
  misc_feature (18)..(19): n is a, c, g, or t
  misc_feature (21)..(21): n is a, c, g, or t
  misc_feature (25)..(26): n is a, c, g, or t
  misc_feature (31)..(31): n is a, c, g, or t
  misc_feature (34)..(34): n is a, c, g, or t
  misc_feature (70)..(70): n is a, c, g, or t
  misc_feature (229)..(229): n is a, c, g, or t
  misc_feature (260)..(260): n is a, c, g, or t
  misc_feature (329)..(329): n is a, c, g, or t
  misc_feature (968)..(968): n is a, c, g, or t
  misc_feature (1211)..(1211): n is a, c, g, or t
  misc_feature (1255)..(1255): n is a, c, g, or t
  misc_feature (1401)..(1401): n is a, c, g, or t
  misc_feature (1448)..(1448): n is a, c, g, or t
  Probeset Number=SeqID_13189
aaatgttantttcatttnnanaccnnacgangtnacgtacctcaacacacgacagaacggcctcctcgcngcaatatactacttttattcttctgtgttctactgtttgtgtttatttatcgcacgacactcgctcttacaatataagtagagaactaccacacactcctcccctcttctagtgcgcccgacatattgtgcgtaaaccgaggggcccccctctccttcntataagttcaagagttatccgagcagggggnacacacatcctccttctcctcactccgcctatataagcacatccctggtgagtaatagactcaaacaantatcagtcgaactatattaacgcgtgaggaatatgacttcgccgctttctcacctcgggcccgacggcgctacacctcctgacgggtgctctctctgtcgacgtctctcactatatacttcatcattctactttcttgcaccttgttcctgtggtgcgtggtgtggtattctctcggatattgtcatctagtaacatgtcgtgttgtttctctctagactaagtctatacttcatagtgtcaaagctcatttaattttcagttttgtattgtctatccttattaactcataggagattgaggtataatgtggtgttgttgtccccatagctcatctctgtttctttactgttaggccgtctacttttcatataactccgatcacattagtgcatatgtataacgaacgaggacttatacataagcacgcggaagtatgattttcatcaaacccgctataagtattggatgtcactctctcacaaacaagttcggtatagtgagtcaacaaatttctataatactgtaatacaacacacactacgaattgaccagtcgagatatgaggcgcatgtgtctgttgtcatcttgtgttgttttgcatatataataaacaccaccgcacttctcctctgtaggngtgatgtcgacactatcttagtatattttgtgttttccgcttgtgcgtctctattgtagggtaatgtggcacttctcgcatattctaccaaccctccttcctcacatcctcttgcgtaccatatgcttctacttctactatgtatctcctctcatttttgctcttagatcaatacaatctctctctgcacacttgttctattaccagatcttcatcacatcatcaacaaagacaataaggagnagaacaatcgtctacgtctacgtgcatatgtggttaatacatanatagagcaggcatgctatataatatacgcacgtatatactagtatgaccatgatagatagtagtatgaagctttgtacgctatctcaaccaataccatctcgctcatgtacgctctctcctctcagaatacgattctagtcctctncctctctatgctcactacgtagatatgatcaacatataacacaccan

SEQ ID NO: 3411 - DNA, 1428 bp, Glycine max
  misc_feature (68)..(68): n is a, c, g, or t
  misc_feature (1061)..(1061): n is a, c, g, or t
  misc_feature (1268)..(1268): n is a, c, g, or t
  misc_feature (1333)..(1333): n is a, c, g, or t
  misc_feature (1428)..(1428): n is a, c, g, or t
  Peptide Sequence Number=SeqID_6852
  Probeset Number=SeqID_13190
atgtgtcccccctcatacagagcttacttttcttccattatggtgttgtgtcgacacaaaacaatatnttctccctctcgtgttggacccaccgcgtttcccgggccctctcttcttcctcgcgttttgtaatgcgtcataatcagagggtgcaagcgcactctggggggcggggggtatcgtcctctttcacaaatattttgtttggtacttcctctccgtatgtagggtggtgtgtaaatacccgccccggaccgcgcgcttataaattaaaaagtgaggtaacaatgggaaaattattcccactagcaggttcctaggacggacgagcgttttatgtttagtctatttactaagcgtagcccgcctccgcacgcaaggaccatcgattcccgcattcttaaattattgaagtattttggcctccctcgccgcgccctcttttttattttcccgctcccgaggtgtcaaagacgtaagaagagagcagaccgtacaatattttctttgctctcctcattcatcctgattatcgccgtgtactcttatccgcagacaatacacgcgtcccatggtcgcgatatatattcccttcccctcttcttgtattatatattattcaaatcagtcccgcccgcgagtgtctcatattgtagtctccccgacgtctcaacgggatggtcctgccgcggttttatatgcctcccgcgtcttccctccttttcgcgcgatgtcctcacgcttttcctgctgtttccgccgtcccgcattttactacgtcacaataattatttgattcgtaatgattatgacgccgccgcccccctatatgcgctatccctacaatagcaatatatacacatgtatctctgacgatcgttattcgcgggggcatattcgagcacgttatcactcccacacaacctgcgccggtttgcttgagtgatcaacactccttattaccgaataggtattcgttttcacttctctccccatatatttatcgttattgtctgtttagacgcctctcgttcctgtatgataactccctacactgccgntcgtctgctaataacaaagatacaacactatatcatttgtccacatcaactctctgccatttacgcccccgcgcgctctatctatttcgcgctgcgttcacaaccacatcattcgtctttattgtgtgcccgtccgcgcgtccgcgctctatgtgactgttggtgtcggcgctcgccgactttctcataacgaatatttacttagtngtatatcatactcatcttcaatcacgccaacgctactataatccgatagttgtgattacattacncgtatacttgagacgcgctccaccgctcacgtgctgagtggacgctgctttatacgactgtcgtcgacctttctaccgcgacataccgcgacacn

SEQ ID NO: 3412 - DNA, 2014 bp, Glycine max
  misc_feature (92)..(92): n is a, c, g, or t
  misc_feature (278)..(278): n is a, c, g, or t
  misc_feature (451)..(451): n is a, c, g, or t
  misc_feature (645)..(645): n is a, c, g, or t
  misc_feature (778)..(778): n is a, c, g, or t
  misc_feature (862)..(862): n is a, c, g, or t
  misc_feature (985)..(985): n is a, c, g, or t
  misc_feature (989)..(989): n is a, c, g, or t
  misc_feature (1005)..(1005): n is a, c, g, or t
  misc_feature (1178)..(1178): n is a, c, g, or t
  misc_feature (1430)..(1430): n is a, c, g, or t
  misc_feature (1436)..(1436): n is a, c, g, or t
  misc_feature (1454)..(1454): n is a, c, g, or t
  misc_feature (1620)..(1620): n is a, c, g, or t
  misc_feature (1659)..(1659): n is a, c, g, or t
  misc_feature (1665)..(1666): n is a, c, g, or t
  misc_feature (1680)..(1680): n is a, c, g, or t
  misc_feature (1682)..(1682): n is a, c, g, or t
  misc_feature (1708)..(1708): n is a, c, g, or t
  misc_feature (1752)..(1752): n is a, c, g, or t
  misc_feature (1754)..(1754): n is a, c, g, or t
  misc_feature (1759)..(1759): n is a, c, g, or t
  misc_feature (1765)..(1765): n is a, c, g, or t
  misc_feature (1777)..(1777): n is a, c, g, or t
  misc_feature (1850)..(1850): n is a, c, g, or t
  misc_feature (1854)..(1854): n is a, c, g, or t
  misc_feature (1877)..(1877): n is a, c, g, or t
  misc_feature (1944)..(1944): n is a, c, g, or t
  misc_feature (1981)..(1981): n is a, c, g, or t
  misc_feature (2014)..(2014): n is a, c, g, or t
  Probeset Number=SeqID_13191
ttctttattgcatcctttcttcgcattctctacaatataatgtctctctactgcacgtcttactagagcgtacgcaccgtgtgttgactttncgcgtacgctcgctcgcgagagtgtgatgtagtgaggtgcttgtggtgtgatgagctcactgtatcggtccgcgacaccacacaccccgagctccgcgctcgctattatgtgtgttgtgaatgccactccacgcactacatgactcgacgaggtataagagtgtattccaagcgtagataacaagnaccgcaccacctcgcatgcacgcgttctgattgagatcgctgtgagcctctactcgcacaccgtatcttattgtcatcactcacgccgcgccgtcgagacaaccgctgtcacacagcggcgagaactggacggaagagtgtgagaatgatgtatactatgatgcacgcgagantattactaacgcgatacactatgtcaacgtatcctatacactatcacgcactgctcgtattagtatcggtgctcgagcccacatagtagatatatatagcgaatcacgtaccagtatctaccagagatataaattactatcgataactatatctgatataataactcaatctcatatgtgtaaacatactccgncattcatgtatttcttactcagtccacgcgaagcagcgcaacctcagacactatgccgtaacagacactatcgtccgtatatatatacgcatactaccatcaatatatactataattgctgcacgtaaacgantcgacaattgtttgtgtgtacgcaacagatctcgagtgttgcatcacgagagcctcgtctaccgatgtacgtcacgtgtgatantggtgcgcgcgccatcgcgacattactcatatcttgttgtagacggtcagcgattagatccatgcagtcacgcgaagatacgcgcagtgctagccatctgagcgaccgagtagacatacagantgangttatatatagatgtntgcgactctacgctgacgtcaccgacgtacagtgctgtatcgaaggacgtgacaacgtgttagtagtttgtccacgagacactccgctacatgagacgaactcgtgagacttgagtgtaggcttctcatgcgccacatcgattgtctgaattcagtatactagtagcatatantattagatatttgtatagatgatgaaagcgaccacgatccgcatagtacaagattacgctcccgactattgcctgagtgtcacttcagtacactacactgaagcgcctgctcaagactctattcattgtatgatgagtgagagtagctggtctcgcaagcgcacagagatcatactatccttacatcagcgcgatatgtaatgataagtgaccgacgcattgtcatatgtacgactgacaacacgtatgtcnatgttntacgtattcagaagagtnctgacgtcatgtacatcacgagcatcgatcgtatatacttcacactacgtagttacgcgcgatccactcgcgtatcgtacatcgacgactcgagatactgattgtctgatatgtctgtatatcgtcgctcacccatctacgcgtcacgcgcagcgcgacgcgacangctaatcaaggatcatagatatatagatgtcagcacgcncgacgnncgcgtctattaatnanatgcattacgatataactgagcgacnctacagctaacgatgtatggtctcgcatcacgacgatgactcantncgtantatgtngtataagttttnatattcatagtgtagtgcacgagcaagctcactcgtgtgatgatgctagtatgcatatctatggtactctgantacnaaatactagcagaacctgcattncattgaaacgtcatcatatggatactacacgtctaatgtgctggccgagccacgacgctgacctctnctgctcgagttcgcctcaatagtattaagacctacantaccatgcgtcttcactacgattgagacgtcgn

SEQ ID NO: 3413 - DNA, 551 bp, Glycine max
  misc_feature (43)..(43): n is a, c, g, or t
  misc_feature (56)..(56): n is a, c, g, or t
  Peptide Sequence Number=SeqID_6853
  Probeset Number=SeqID_13192
aaataaaggagtttatttttggtttgtagggggttagggttgnatgggtggggggngggggggggtttggaggaaaaaaagagactgtaaatattggggcggggggcgggatttttttttttttttttcccacatttgaaggggctttatcgaacattgttgtgccaattgttaaacccgccattaaggggtttcaggtctctagatcccggaagggataaagtgcatatttggaacaatggattgacgttgctatgcatcacggcttttacacatcaatgcagcgtacacagcgacagaggtcgttgaacagtagttggacaacttcctggcgtcacgtcgggaattctttcccagcagcatgttggctaagtacataagggccaggaggtgagattcctagagcagtcgttactcacatttttctgtcatcaactcagtagatcacgctaacaggtatatgttattgttggagacacatcagaggtgaaagaatgtgagattttttaggaaggacaaatctgatgttgcagatagaatgtggggaatct

SEQ ID NO: 3414 - DNA, 1531 bp, Glycine max
  misc_feature (15)..(31): n is a, c, g, or t
  misc_feature (33)..(33): n is a, c, g, or t
  misc_feature (111)..(111): n is a, c, g, or t
  misc_feature (175)..(175): n is a, c, g, or t
  misc_feature (208)..(209): n is a, c, g, or t
  misc_feature (217)..(217): n is a, c, g, or t
  misc_feature (252)..(253): n is a, c, g, or t
  misc_feature (255)..(255): n is a, c, g, or t
  misc_feature (262)..(262): n is a, c, g, or t
  misc_feature (280)..(280): n is a, c, g, or t
  misc_feature (283)..(285): n is a, c, g, or t
  misc_feature (310)..(310): n is a, c, g, or t
  misc_feature (318)..(318): n is a, c, g, or t
  misc_feature (512)..(512): n is a, c, g, or t
  misc_feature (530)..(530): n is a, c, g, or t
  misc_feature (593)..(593): n is a, c, g, or t
  misc_feature (845)..(845): n is a, c, g, or t
  misc_feature (924)..(924): n is a, c, g, or t
  misc_feature (978)..(978): n is a, c, g, or t
  misc_feature (995)..(995): n is a, c, g, or t
  misc_feature (1055)..(1055): n is a, c, g, or t
  misc_feature (1230)..(1230): n is a, c, g, or t
  misc_feature (1413)..(1413): n is a, c, g, or t
  Probeset Number=SeqID_13193
gggtgggggggggcnnnnnnnnnnnnnnnnntntaccgttccaggccgcttcccttctactacctaaattccgcctcgtgtatgttcatctaaaagctcccgcgtcacacnaacaaaaggacgccccagcgacccctttccacaacaattacaatacacccacccagacgacacnttcctcttctactccgcacccccgctcttcccnnctcccgcncgaagaggcgatgagccggcggcgcgcctagcacnngngatggtnatattacgcggccagggnctnnntgatggtggtgcgtttgttgtgggncagttagnggacttgtacagtgtacgactcaaacctagtggaggaccgcgttgcggcccaagcgagtggggaggggcgcgcgagcgaaaagcacaccggcgggtatcgtgcgtaggtgcaacgctacgcgaatattatcgtgcgtttaccttctctggatcggagcccttctgctttcttagatacatagatattgggtccngttcagcacatttgtcgntagtgcgggcgctccgcgcttgatactaggactgtgatgctgcgactgagagtcgcacagcgncacccagcacgtgcgtcgaactatctctctccgatcatcgtgttttattgtactctctcctactttgacatcacatctcctgccgctctaccacacccactatatatcattagccacgcgatattataaataatgtccaccctgactacatatagttgtcaacttgaaaccgtatgctacaaacaataatatacgttcaatatcgtactcttactcaccgtccggcatgttctgtctccatgcagatgacangatgataaatggtgggtagtgcgccatgagaggaacatcatgacgacgacacggacgaccagattgattagatctacgncctcctggctgcgcgcgtcccgtcgcggcgctcatgtaattactagagggcgtngctcgatgcatgtacgnatcttgacacaggtagacagtattcgaacggtaaagagagagaaggagtgatgacaggancagaagccgacgtgtcagacgatagtgtatatgtgtgtgtggtgtcgtcatgtggtgccatctcggctcgctccacacgcgagagggaacggcagacgtatgcgtcagcgcattcgcgagtctctgtgataatgcacacggcgatgcacacagctaagagcgaccatgcactccnatcgccgcagacgctatccgcgccccgtctccttcgcgatacgctatctctcttgctgtccgcgtggcgtacggatagcagcaacgacaccggctgaaggctcgtacgatcatcacatctcgacgtcgcccgatgccacgtctatcgtaataaatcttacgtcttcgttgcctatgatcatgnttaatcgatataggtaggggtaatgatagcaaaaggcgcatggttacaaagacggagaagaagaatggagaggagacgagaaccacaaagacaacgaagatctatataccccgacacg

SEQ ID NO: 3415 - DNA, 343 bp, Glycine max
  Peptide Sequence Number=SeqID_6854
  Probeset Number=SeqID_13194
caaaaccgtaggcttttaggtttttccaacacccacaaccacaacaaaaaggggagcgggggggataagagcaaaaagggcagggtacaaaccaaaaaaaccacacataaccggccacatggcccaagcccaaacgagaaggcgaacagcaagacactaaccaagagccgagcccccaaaaaccacctaaacggcgcagcaccgacggagaaatccaagccaccccacaccacgacaaacaaaggggccaaaaaccgaacaaacggagaacagccacccgaaacaaccggcgaaccacccgagaacccaaacccaccaacaacaaaaacactgggaaaaacac

SEQ ID NO: 3416 - DNA, 1815 bp, Glycine max
  misc_feature (297)..(297): n is a, c, g, or t
  misc_feature (579)..(579): n is a, c, g, or t
  misc_feature (697)..(697): n is a, c, g, or t
  misc_feature (1155)..(1155): n is a, c, g, or t
  misc_feature (1205)..(1205): n is a, c, g, or t
  misc_feature (1276)..(1276): n is a, c, g, or t
  misc_feature (1346)..(1346): n is a, c, g, or t
  misc_feature (1361)..(1361): n is a, c, g, or t
  misc_feature (1363)..(1363): n is a, c, g, or t
  misc_feature (1400)..(1400): n is a, c, g, or t
  misc_feature (1411)..(1411): n is a, c, g, or t
  misc_feature (1416)..(1416): n is a, c, g, or t
  misc_feature (1426)..(1426): n is a, c, g, or t
  misc_feature (1431)..(1431): n is a, c, g, or t
  misc_feature (1458)..(1458): n is a, c, g, or t
  misc_feature (1538)..(1538): n is a, c, g, or t
  misc_feature (1542)..(1542): n is a, c, g, or t
  misc_feature (1587)..(1587): n is a, c, g, or t
  misc_feature (1615)..(1615): n is a, c, g, or t
  misc_feature (1648)..(1649): n is a, c, g, or t
  misc_feature (1703)..(1703): n is a, c, g, or t
  misc_feature (1715)..(1716): n is a, c, g, or t
  misc_feature (1749)..(1749): n is a, c, g, or t
  misc_feature (1785)..(1785): n is a, c, g, or t
  misc_feature (1802)..(1802): n is a, c, g, or t
  misc_feature (1809)..(1809): n is a, c, g, or t
  Probeset Number=SeqID_13195
agtctggtctgtctattgactgtcttctctgacgacgctcctatctcgtgtgcatactactactctacatttctcatctggtctgttctaatctaatattaatattcactatattctgcgctacttcctcgtactgctggtgagtacgttggtgcgtgctcgtgatgtatctctcttctatcccgtactgcatgtataatggagtgtgtgtgatactatatacacgttctagctaactatatctcaccgtagtcgcggtctatatatatttatctcttagatcggaacacagcctancacacagcacgacaacgtatggactactaactacttatccacatgtatacatgcgtccgtgtagcactacgtactggctgataggctcagggcggcgcatcacgacggattgagtcgtctgtctacgtatggggcgagatggtgcgacgccatctagtcgtccactataaggcctgcgcgccgtagcgcacgaagcgtggatataagtggtacatagagtatgtactactctcatataattaagacgctagatagtcagatatagtctagaggacattcatnagtactagtatatcacagacactagcaacacgagcgatatacgtatgagatacgatatatcctaacaactaaccactctaagaacgaccacgagctaatagcacgtcgagtctctctnatacgctactctcactatatcttgtaacttatctcatgcaatcacccgcggccatcacacatgcgcgtaccacgagtagcctctcgtatgtggagcatcgagagctagatagagaggaagtagagatcgagcacgcacgcgaggcgcgcgtgtctacacaatcatcttcaattagtacgcgttcgaacacgtctgcgatcgcgaacgtctatctgcatatcctgtcactatgtacgtgccgacagcgcgacaatgtcataaaacgatggtcacgtcgatctccccgcactaccatcacgatacagcgctataggatatctcagaatcgtatacttactctacgacaggcgtactattagctcgtataatattttagcgctctatcaccactcgtctcgtcttatctgactatgatgcgcataactgccttgcgatgtcgagtgtctacgcaatgcgtngaactctatcttgaatctaccgaatcacaacaatgatactcaacacacantgtacgcatagtctgtcgatacttaccttcacactcactactcactcgcgtaagcatagcgtcctctatanagtagacgacgttacacacgacgcgcatatgagctcgcccatacctacacatgatcatgctgtcgtctantcacagcgaatcacnantatccacccacacgacgactgaccatctactgcatantgactagatanagagncatgatgtgncgaantagagagagcagtacgcacttcattcnctctacgtcacgcatcaggcgacacacatacgtgacgctcatagctccatctcacctcgtcgtatcacacagcgtacagnactnactatatatatacgctcgtgatgtcgactatccgtactcgtcgtnactaatcgacacgacgcgtcatgagtanctcgactggagagtacgatatgaagatcgagcnntgtcacgagacttataacgtgctgcagtcaacagactacgcgcgacgcgagtgnactatgtcatannatgtataacttacgactgaacatctactactanctttacgactacttgacgacacatcattgcataatncactaaactatatcagntcgatcngcagag

SEQ ID NO: 3417 - DNA, 1812 bp, Glycine max
  misc_feature (7)..(7): n is a, c, g, or t
  misc_feature (47)..(47): n is a, c, g, or t
  misc_feature (70)..(70): n is a, c, g, or t
  misc_feature (127)..(127): n is a, c, g, or t
  misc_feature (179)..(179): n is a, c, g, or t
  misc_feature (196)..(196): n is a, c, g, or t
  misc_feature (250)..(250): n is a, c, g, or t
  misc_feature (277)..(277): n is a, c, g, or t
  misc_feature (333)..(333): n is a, c, g, or t
  misc_feature (360)..(360): n is a, c, g, or t
  misc_feature (379)..(379): n is a, c, g, or t
  misc_feature (395)..(395): n is a, c, g, or t
  misc_feature (400)..(400): n is a, c, g, or t
  misc_feature (414)..(416): n is a, c, g, or t
  misc_feature (438)..(438): n is a, c, g, or t
  misc_feature (441)..(444): n is a, c, g, or t
  misc_feature (456)..(458): n is a, c, g, or t
  misc_feature (471)..(471): n is a, c, g, or t
  misc_feature (478)..(478): n is a, c, g, or t
  misc_feature (490)..(493): n is a, c, g, or t
  misc_feature (507)..(508): n is a, c, g, or t
  misc_feature (515)..(515): n is a, c, g, or t
  misc_feature (531)..(531): n is a, c, g, or t
  misc_feature (538)..(538): n is a, c, g, or t
  misc_feature (540)..(542): n is a, c, g, or t
  misc_feature (546)..(546): n is a, c, g, or t
  misc_feature (558)..(558): n is a, c, g, or t
  misc_feature (576)..(576): n is a, c, g, or t
  misc_feature (578)..(578): n is a, c, g, or t
  misc_feature (581)..(581): n is a, c, g, or t
  misc_feature (583)..(588): n is a, c, g, or t
  misc_feature (600)..(600): n is a, c, g, or t
  misc_feature (612)..(612): n is a, c, g, or t
  misc_feature (614)..(615): n is a, c, g, or t
  misc_feature (617)..(617): n is a, c, g, or t
  misc_feature (619)..(619): n is a, c, g, or t
  misc_feature (633)..(633): n is a, c, g, or t
  misc_feature (636)..(636): n is a, c, g, or t
  misc_feature (650)..(650): n is a, c, g, or t
  misc_feature (657)..(658): n is a, c, g, or t
  misc_feature (660)..(660): n is a, c, g, or t
  misc_feature (682)..(682): n is a, c, g, or t
  misc_feature (690)..(691): n is a, c, g, or t
  misc_feature (698)..(698): n is a, c, g, or t
  misc_feature (704)..(705): n is a, c, g, or t
  misc_feature (708)..(711): n is a, c, g, or t
  misc_feature (721)..(723): n is a, c, g, or t
  misc_feature (725)..(725): n is a, c, g, or t
  misc_feature (728)..(728): n is a, c, g, or t
  misc_feature (737)..(740): n is a, c, g, or t
  misc_feature (748)..(748): n is a, c, g, or t
  misc_feature (750)..(754): n is a, c, g, or t
  misc_feature (758)..(758): n is a, c, g, or t
  misc_feature (763)..(763): n is a, c, g, or t
  misc_feature (767)..(767): n is a, c, g, or t
  misc_feature (791)..(794): n is a, c, g, or t
  misc_feature (796)..(796): n is a, c, g, or t
  misc_feature (807)..(807): n is a, c, g, or t
  misc_feature (820)..(820): n is a, c, g, or t
  misc_feature (822)..(825): n is a, c, g, or t
  misc_feature (832)..(833): n is a, c, g, or t
  misc_feature (840)..(840): n is a, c, g, or t
  misc_feature (842)..(842): n is a, c, g, or t
  misc_feature (844)..(844): n is a, c, g, or t
  misc_feature (853)..(857): n is a, c, g, or t
  misc_feature (859)..(859): n is a, c, g, or t
  misc_feature (869)..(869): n is a, c, g, or t
  misc_feature (882)..(882): n is a, c, g, or t
  misc_feature (887)..(888): n is a, c, g, or t
  misc_feature (896)..(898): n is a, c, g, or t
  misc_feature (906)..(906): n is a, c, g, or t
  misc_feature (912)..(914): n is a, c, g, or t
  misc_feature (919)..(919): n is a, c, g, or t
  misc_feature (922)..(922): n is a, c, g, or t
  misc_feature (925)..(928): n is a, c, g, or t
  misc_feature (936)..(943): n is a, c, g, or t
  misc_feature (947)..(947): n is a, c, g, or t
  misc_feature (955)..(955): n is a, c, g, or t
  misc_feature (959)..(959): n is a, c, g, or t
  misc_feature (967)..(968): n is a, c, g, or t
  misc_feature (970)..(970): n is a, c, g, or t
  misc_feature (987)..(987): n is a, c, g, or t
  misc_feature (1003)..(1003): n is a, c, g, or t
  misc_feature (1013)..(1013): n is a, c, g, or t
  misc_feature (1016)..(1016): n is a, c, g, or t
  misc_feature (1044)..(1044): n is a, c, g, or t
  misc_feature (1048)..(1048): n is a, c, g, or t
  misc_feature (1063)..(1064): n is a, c, g, or t
  misc_feature (1081)..(1081): n is a, c, g, or t
  misc_feature (1083)..(1083): n is a, c, g, or t
  misc_feature (1091)..(1096): n is a, c, g, or t
  misc_feature (1112)..(1112): n is a, c, g, or t
  misc_feature (1165)..(1165): n is a, c, g, or t
  misc_feature (1171)..(1171): n is a, c, g, or t
  misc_feature (1173)..(1173): n is a, c, g, or t
  misc_feature (1217)..(1217): n is a, c, g, or t
  misc_feature (1226)..(1227): n is a, c, g, or t
  misc_feature (1237)..(1237): n is a, c, g, or t
  misc_feature (1254)..(1254): n is a, c, g, or t
  misc_feature (1278)..(1278): n is a, c, g, or t
  misc_feature (1284)..(1284): n is a, c, g, or t
  misc_feature (1299)..(1299): n is a, c, g, or t
  misc_feature (1336)..(1336): n is a, c, g, or t
  misc_feature (1344)..(1344): n is a, c, g, or t
  misc_feature (1352)..(1352): n is a, c, g, or t
  misc_feature (1357)..(1357): n is a, c, g, or t
  misc_feature (1362)..(1362): n is a, c, g, or t
  misc_feature (1384)..(1384): n is a, c, g, or t
  misc_feature (1399)..(1399): n is a, c, g, or t
  misc_feature (1412)..(1412): n is a, c, g, or t
  misc_feature (1418)..(1418): n is a, c, g, or t
  misc_feature (1429)..(1429): n is a, c, g, or t
  misc_feature (1431)..(1432): n is a, c, g, or t
  misc_feature (1434)..(1434): n is a, c, g, or t
  misc_feature (1443)..(1443): n is a, c, g, or t
  misc_feature (1451)..(1451): n is a, c, g, or t
  misc_feature (1463)..(1464): n is a, c, g, or t
  misc_feature (1468)..(1470): n is a, c, g, or t
  misc_feature (1474)..(1474): n is a, c, g, or t
  misc_feature (1476)..(1476): n is a, c, g, or t
  misc_feature (1496)..(1496): n is a, c, g, or t
  misc_feature (1505)..(1505): n is a, c, g, or t
  misc_feature (1512)..(1513): n is a, c, g, or t
  misc_feature (1546)..(1546): n is a, c, g, or t
  misc_feature (1592)..(1592): n is a, c, g, or t
  misc_feature (1630)..(1630): n is a, c, g, or t
  misc_feature (1635)..(1635): n is a, c, g, or t
  misc_feature (1667)..(1667): n is a, c, g, or t
  misc_feature (1691)..(1691): n is a, c, g, or t
  misc_feature (1704)..(1704): n is a, c, g, or t
  misc_feature (1729)..(1729): n is a, c, g, or t
  misc_feature (1735)..(1735): n is a, c, g, or t
  misc_feature (1743)..(1744): n is a, c, g, or t
  misc_feature (1746)..(1746): n is a, c, g, or t
  misc_feature (1753)..(1757): n is a, c, g, or t
  misc_feature (1759)..(1759): n is a, c, g, or t
  misc_feature (1762)..(1763): n is a, c, g, or t
  misc_feature (1765)..(1765): n is a, c, g, or t
  misc_feature (1769)..(1771): n is a, c, g, or t
  misc_feature (1773)..(1775): n is a, c, g, or t
  misc_feature (1788)..(1788): n is a, c, g, or t
  misc_feature (1801)..(1802): n is a, c, g, or t
  misc_feature (1812)..(1812): n is a, c, g, or t
  Peptide Sequence Number=SeqID_6855
  Probeset Number=SeqID_13196
ggtagtngagcagagcatcagcgagcgcacgcagacatatgatagtngcatctataagcgctcactatgntgtcgtgtgtgctgtcgtacgtacgtgcgtgtcgcctcgtgcttgcactgccgtgtntctcgtactattatcgcacatacgatcaatctagatgagctagtgcgttgcntgtaggtctgtgcggtngtgcgcttaatgaggtgtcatctactcggccgactacgcatttgtcatgtcttnttatttagctcggtctgccttgcatancatgtgacttcacttatctacttatctactatacgagacgggtatgcagcctagtncacatcataatcgtctatatagtagtnaagactactcacgaggatnatagtcattccatgtnttgtncgtaagttgcgcannnaacctagtcatatatatctctntcnnnncctattatggtnnngacgtcgagttcnagcagtntgcagaagaatnnnncgcggcgctcctcnngcacgcnacaaattatatttttnagatcancnnntcgncgtaccgctacntgctatgctccgccgcgngncantnnnnnntggccgggttcnggcgtgttacgngnntngncgacgtattactcngtngctcgccgtgcggnctggttnncntgcgccacgacaccaacacacntcctcccnnccgctanactgcnntgnnnnttctcccttnnntnacnagactcccnnnnccttactngnnnnntttntgtgngcanggcggagagcgggcaatcgacagnnnncngcactttctcngtgctggtttcantnnnncggtttnnttccgtncngntgaagaggnnnnngngacactgcgnatgttataaatcncttanngcgccggnnnggggtcgntcgtgnnngtgtntgnttnnnnttgaacgnnnnnnnngtgngtgtgttnttgnttggtgtnngntgcgggcgtctcgcgcncctgcgcgcggattgntgcacgaggncgnggggtagcttgtggtgtggtgattagtnatgnatgatgccgacgggnnggccctcgcgccggccncncgcgaggnnnnnngcgaggagtatattgntagacgcacgcgcacgcgagccgagggcgagaagggttgttggcgggtttcgnaggacngntggattgcatttcgtgatgagtatagagtcacaatagcgacctntctctatcnnagtgtgcgtnattccgataagagacanagcagcatattagtatatgatatngaatangaactacactatgtnagacagatgatggtaacgcgacgcagacacatagtangatatatngacatganatagnacgangatatgtgttcattctctgtcntcttgaatcatctanatgtgactgtgtngttagngctacgatggntnngnccgcgttcngaaatcantgtcaggacagnnagannngcanantcctctctcgcacgtacgtnctgtatatngcacgcnntagtaacgccgtctcggtgttccccatcctgcnacatacggcgtcatatcgaagcacagtcaacaccggatgcgccacnccgccgtagctgtagtggtacattgactctagtagatnattgncacagacaacagctataatagacactcatgcngatactgattatgacaatagacantatagactatganatacatatgtagtatagataacatnagacangtagtatnnanatgatannnnnanaanntnaaannnannntgggacaattaangtaacaaaaaaanngggggggggn

SEQ ID NO: 3418 - DNA, 1458 bp, Glycine max
  misc_feature (192)..(192): n is a, c, g, or t
  Probeset Number=SeqID_13197
ttctcttttttttttctcccccttatctctcttcaccccacaactccccatccataagtctggaagctccaccgccggttggtcgtgccgtctctttgaaactagatggactcctcctcgggtctgactggtattctctgctacgatcaccatttcaccttaactaacattcttcacttcgttacttagcanacgcagcctgcattccgcagtctaaccatctatacctaaacagaccatcctctgcttactctccactcttacccgtaggagcagcctctagccccgctgcccctgcttctccgttgtacaccgatgcgtttgttttttgcgcttgtcacgttctgtggttactcccaaatctagagcacatatagttaaagttctacacgctgcactgtgtctctatgcacacacggtccccttcctcctccacagcatcaatatacctccgaacccaccgtctcacctgatccgcgcgcttctacagtgcaccgcacggccgttcgccatccagctacactcgtaactcgcgcaacgagctcgacgtagttgcgacgatctctatatatgtgcctccctgctccccatgtctctgccgctccctcctcactgcttaagtccctcgcatattacaacctccccgcctcgcatcatcacgtcctgctccctccgcccgctaatgcaccacctaatatctccatagcttatcgccctttccacttcgacatacctcgttactccgactcaccgcccactactcatcacactaatgcgctgactttacttatgtacaatatctcacaataatatgcttcacattattttcgccaacactacaccaataacgagattttttatctaatcgaccctcatcgccccatttcttatgttcttctttttctcgtgccgcttctcttctattctatctatctttccaccccaatattgtctagacccactctcccaatcattctaccttcatacccatctcactctattcctaccacacacccacctatccctcactctcctctccacttcttgtctccacgctcttacgcgaacccaagctacatgagatgatgtcacatacggccgcgataactttataatagccgtcgatcatgatcactcatctatactatattacgtaagtagcgctgagaacatactattgctgcttccaactttgtaattctacctattcttcttctctttcatcacgtaccgactaactatatatctcctcacaccacacaccatatctatctctccctattcacatgtacactctatctttatattatatccaccctctaacacacatctcatattcgcatctttctataatgatacaacacctacattctatcgatgtcttatacccacagacctcgcggcgggcggacagctagtaggattagtaatactgcttatctatttatacctatcata

SEQ ID NO: 3419 - DNA, 628 bp, Glycine max
  misc_feature (628)..(628): n is a, c, g, or t
  Peptide Sequence Number=SeqID_6856
  Probeset Number=SeqID_13198
tcgagtcagctacgtagggcccccccccgagcagaaaactttaataaattttaaattcgagcaacaagtaatcatgtcaatagcagtcggaaagaggaacttcgctgagaacttcagcaagatgatgatcaatgacttccagagagacaatctctatcgttctaagatggttgtcaacgaaaataccctaactaacagaacttataccaatcaacctaatgctgcttattattctgaaaatgttataattttagctcagcaatttccccaagtcgaccagagagaattgttgactgttcttgacgactgtgacaatgatctagaaattgccgtggaaatcctccaaaaaggcattcagaataaaataaactcccctaagctagttccaatggaaggaagaactattaaaaaaataaatggtgctaaggaagctgaacaaaagagcaatgttttggcccttagacaagccgaagaaaagaagtctgataatagtattcaagaagaagaccctgctgctagtgctaagtgggctgagactagaaatttatccgctaatgtaattgacaagttgcagactttgaataccatggatgaagctaaggagcttttgactcagattattctggan

SEQ ID NO: 3420 - DNA, 1360 bp, Glycine max
  misc_feature (1182)..(1182): n is a, c, g, or t
  misc_feature (1311)..(1311): n is a, c, g, or t
  misc_feature (1360)..(1360): n is a, c, g, or t
  Probeset Number=SeqID_13199
tttcccccgccttcctcggccctcgctgttcaaaggccacggcgcggtcaacaaatataacattttaacaaaaaagttttcacaaaaaccatccccgtggaaatggggcgcgtctcacgcccccccctttgccttatatggggtggtaaataatatgcggtatgcaagaccttaaaatatgtttgtacatttttggcgagaggggcgctgtaaatttaaaaatcgctaaaacaccggaggtcgctcgctcctccaccagaatgatgatacgtgtttgccatttctaataacatatataggtatgcagtaccaccgcgccgcattttattcgttagccgctatattcttattatgattataggggatggcgatacaggtagcccgccccaattcatagttcgttgtggatgatttcacatatgctcgaatttttgggctctaatcttatactatatagctaagcgcaatcgctatttaagctgtatcttattttacttatatattaaaggtcgtggggacgaaaaattccacgcgcggctttattttggactatcgcacaaacataatacatggggctatattgatcggacgtcgtgtatatgtgccgaagcgccgcgccttaccctcccttatcatcctttttttttgttcctccacatttgtattgtttttgctttgtgtttcagcacgcacgtcttatatctcgtgtagcaaactatttttataaaatgcgatcgtcgtgtgacaacgcctgcgagtataacaccgcggcatgacatatatagtaggatataacggactgtgcgtgaactgcgtctagggcgagcggcgtaataatgaagattaatcgtcgccacaacacaatatatcgctgtgtttacgttacttcgccatatacaccgcgcttattattttttacccttcttcctccttgcgggcgcgtttctttcgttcgcactcttcatattctaataataatatctccacattacgtccgccgcgccaacccccgcatattatttggcccggcggcgcgcgccgtcttgtaaacgcacttcataactgagaaagggctgccgcgaaagtcgttaaacccgcgcgaattaatgacgcgcggccttattatattactatatcagctgtagccgtgtggaatcacaataatatcgcgagaaccgacanggagaattaatttatcactctattttcgccgtccgcttctctctattaccgcggaatattatcgccagacgtatatatcatgtatgatattgcggcgatataaaatgtacatatacataagtataacgntcgcgcactgctatgtatgtcaggcgcgtggctcatatgtgtgtcgtan

SEQ ID NO: 3421 - DNA, 742 bp, Glycine max
  misc_feature (245)..(245): n is a, c, g, or t
  misc_feature (251)..(251): n is a, c, g, or t
  misc_feature (330)..(330): n is a, c, g, or t
  misc_feature (333)..(333): n is a, c, g, or t
  misc_feature (476)..(476): n is a, c, g, or t
  misc_feature (487)..(487): n is a, c, g, or t
  misc_feature (492)..(492): n is a, c, g, or t
  misc_feature (494)..(494): n is a, c, g, or t
  misc_feature (515)..(515): n is a, c, g, or t
  misc_feature (546)..(546): n is a, c, g, or t
  misc_feature (584)..(584): n is a, c, g, or t
  misc_feature (614)..(614): n is a, c, g, or t
  misc_feature (616)..(616): n is a, c, g, or t
  misc_feature (637)..(637): n is a, c, g, or t
  misc_feature (653)..(653): n is a, c, g, or t
  misc_feature (716)..(716): n is a, c, g, or t
  Peptide Sequence Number=SeqID_6857
  Probeset Number=SeqID_13200
ttgaaaagagagtcaaagagtgcttgaaattgtcgggagggaaccctcagaccctccaattcctctcggaatgcttcctccacactctctccccctcgccggagccccgccgccgcgctgagtcctccctcgccgaggccgccgaccgccccaactacgccctcgccgtcctccgcctggtcgccgagccctccatcgacgaccagatccgccaggccgctgccgtcaacttcaagaaccacctncgcctncgctgggcctccgaggactcccccgtccccgaccccgagaaggaccagatcaaaaccttaatcgtcccctcatgctctncgncttccccaaaatccaatctcagctcagcgaagcccttgccctaatcggtcaccacgatttcccaaatctggccctctttcttcccgaactcatcgcaaatcttcaaaaagccttccagtccttcgattacgccttcattaacnggattctcggnactgntnactctattttcaagaaattanggttcaagtattaaacccatggacctattgntcgacttaaagtactggcttgacactttggccggttcnttattggagaatttcctcaagaaggggttngntgatcgaagccggggccggcnaacttgggcccggttntttgaggtccaaaaaggcttgggcttgcagggaaaattcttacttcgcctggaaatttttcanggaaacttggccttgaggtttttttt

SEQ ID NO: 3422 - DNA, 1360 bp, Glycine max
  misc_feature (1)..(6): n is a, c, g, or t
  misc_feature (20)..(27): n is a, c, g, or t
  misc_feature (35)..(35): n is a, c, g, or t
  misc_feature (44)..(44): n is a, c, g, or t
  misc_feature (48)..(49): n is a, c, g, or t
  misc_feature (53)..(53): n is a, c, g, or t
  misc_feature (56)..(58): n is a, c, g, or t
  misc_feature (62)..(62): n is a, c, g, or t
  misc_feature (66)..(70): n is a, c, g, or t
  misc_feature (395)..(395): n is a, c, g, or t
  misc_feature (1131)..(1131): n is a, c, g, or t
  misc_feature (1177)..(1177): n is a, c, g, or t
  misc_feature (1205)..(1205): n is a, c, g, or t
  misc_feature (1208)..(1208): n is a, c, g, or t
  misc_feature (1246)..(1246): n is a, c, g, or t
  misc_feature (1264)..(1264): n is a, c, g, or t
  misc_feature (1301)..(1301): n is a, c, g, or t
  misc_feature (1306)..(1306): n is a, c, g, or t
  misc_feature (1360)..(1360): n is a, c, g, or t
  Peptide Sequence Number=SeqID_6858
  Probeset Number=SeqID_13201
nnnnnnaaaaaaaaaaaaannnnnnnnaacaaaanaagagaganggannaganaannnaatnaaannnnntggtgtctctatacggcgtgtgcgaatagccacacacccatcgtagtgctaacaccgtacgtcaacacccacgtgaccgatcccgggagtgcggtgggatcctccgagagggtgggttatcttcgcatgctcgcacgtttgatgtattcgtagtctaagacaatggagacgaagaagcgggcacgcctcagccaacgcacgcacgcggagataagagacacacaccacagcacagatagtgcggcacagctatccaaccagaacacaaaatactcggcgaagaccacactgcaccagtgtgaagtgtggtgtggggtgaggtggntctgagtatgtgagttgactagatttaatgcagagttgcccgtgtgacgcctgttggtgtagtctatacagcgaaggtatattgtatacaacatagtgttgtggggacacgacacacggcaatgtgcagactcgtctcgttcacattggatgaccaatagtgagcgagtgcgtggcgggtgtggcgacgcggctcgcacttagcgcgttcacaggcataacactctcgtccgttacgtctgcttctctctcttctcatctctcacacgatctgctcttctcgcacacaacgtgactgcgaatttctcgttatgggtatgcgtggaactgctctgggtctattgcactactctcagcacacatatatcacctcttacgtcgcaacgtggcacacacctctgcgatcttcacttcatcgccttcatcctactgtccctctcatgccgacctcgcactcctcgcactactaacaaaccaatactcatatattgtgtctctcctcacaaattgtcttgtggcgtatactatagatatgatacaggaatgggcaagaggggagaatgtacagatcagctgctacgttgtctgctcatctctcgttactctatctggcgtatagctaatatactacatacaaaatatccagctaccatattcgctacacaatgtagactgagagacccaggcggatatatattacacaacatgagagtgatgtgagctgcatctacgcatangcggagatgattagtcggtagcataatgctatcatactcactactnctgacgcaagatcatatatccaactcgntancgagcgtctaatactatatcataaatatacaatatatnctctgcgagtcagacganatttgtcagtactcaccgactatcctgatggagatanagtantatagtgtgttagatgtgagtgatcgcccgaccgtcagatctacgtagtctatn

SEQ ID NO: 3423 - DNA, 508 bp, Glycine max
  Probeset Number=SeqID_13202
agccacattttgtttcctcgtctcctctcactcgttcaaccggcgccgctcgtcttcaaggaaaggtttgagagaaaatgagtcgcggagctgcagccgttgccaagggaaagaagaagggagtgtccttctccattgactgctcgaagcctgtcgatgacaagatcatggagattgcttccctcgagaagttccttcaggagaggatcaaagtcggtggcaaagccggtgcccttggtgattccgtcacaatcacacgtgagaagaacaagatcactgttacctccgaaggccaattctccaagaggtatttgaagtacttgacgaagaagtacttgaagaagcacaatgtgagggattggcttagagtgattgcggctaacaaggaccgtaacctctatgagttgaggtacttcaacatcgctgagaacgagggcgaggaggaagactagaagagcgctctactcttgtttttgcctgtattggtttctgctcgttcgttgttgct

SEQ ID NO: 3424 - DNA, 1677 bp, Glycine max
  misc_feature (86)..(86): n is a, c, g, or t
  misc_feature (246)..(246): n is a, c, g, or t
  misc_feature (264)..(264): n is a, c, g, or t
  misc_feature (267)..(267): n is a, c, g, or t
  misc_feature (275)..(277): n is a, c, g, or t
  misc_feature (283)..(283): n is a, c, g, or t
  misc_feature (291)..(291): n is a, c, g, or t
  misc_feature (344)..(344): n is a, c, g, or t
  misc_feature (366)..(366): n is a, c, g, or t
  misc_feature (379)..(379): n is a, c, g, or t
  misc_feature (412)..(412): n is a, c, g, or t
  misc_feature (418)..(418): n is a, c, g, or t
  misc_feature (430)..(430): n is a, c, g, or t
  misc_feature (449)..(449): n is a, c, g, or t
  misc_feature (638)..(638): n is a, c, g, or t
  misc_feature (652)..(652): n is a, c, g, or t
  misc_feature (671)..(671): n is a, c, g, or t
  misc_feature (697)..(697): n is a, c, g, or t
  misc_feature (699)..(699): n is a, c, g, or t
  misc_feature (701)..(702): n is a, c, g, or t
  misc_feature (737)..(737): n is a, c, g, or t
  misc_feature (741)..(742): n is a, c, g, or t
  misc_feature (751)..(751): n is a, c, g, or t
  misc_feature (764)..(764): n is a, c, g, or t
  misc_feature (822)..(822): n is a, c, g, or t
  misc_feature (854)..(854): n is a, c, g, or t
  misc_feature (883)..(883): n is a, c, g, or t
  misc_feature (1054)..(1054): n is a, c, g, or t
  misc_feature (1094)..(1094): n is a, c, g, or t
  misc_feature (1096)..(1096): n is a, c, g, or t
  misc_feature (1207)..(1207): n is a, c, g, or t
  misc_feature (1279)..(1279): n is a, c, g, or t
  misc_feature (1281)..(1281): n is a, c, g, or t
  misc_feature (1395)..(1396): n is a, c, g, or t
  misc_feature (1402)..(1402): n is a, c, g, or t
  misc_feature (1444)..(1444): n is a, c, g, or t
  misc_feature (1502)..(1502): n is a, c, g, or t
  misc_feature (1526)..(1526): n is a, c, g, or t
  misc_feature (1538)..(1541): n is a, c, g, or t
  misc_feature (1543)..(1544): n is a, c, g, or t
  misc_feature (1567)..(1570): n is a, c, g, or t
  misc_feature (1577)..(1577): n is a, c, g, or t
  misc_feature (1584)..(1586): n is a, c, g, or t
  misc_feature (1601)..(1605): n is a, c, g, or t
  misc_feature (1610)..(1611): n is a, c, g, or t
  misc_feature (1615)..(1618): n is a, c, g, or t
  misc_feature (1623)..(1623): n is a, c, g, or t
  misc_feature (1633)..(1634): n is a, c, g, or t
  misc_feature (1640)..(1640): n is a, c, g, or t
  misc_feature (1646)..(1646): n is a, c, g, or t
  misc_feature (1654)..(1654): n is a, c, g, or t
  misc_feature (1656)..(1656): n is a, c, g, or t
  misc_feature (1658)..(1658): n is a, c, g, or t
  misc_feature (1664)..(1664): n is a, c, g, or t
  Peptide Sequence Number=SeqID_6859
  Probeset Number=SeqID_13203
tatcacatagcaactgtctctgcttcgataatttctcagttagatacggttatgggtagtcggttgagttgccagatagatctctnttctctagcttctgcgtcccgaacagcgtgccccgtttagctaggagcgaggacagtagggatcattgagccaggactgatatgacagagtatgctagtaaacagagtatcgagaactaatacagcgtgacacgcatcgcacagcactgatgcacagtancgctgtacacaggtggtntanggtgtttnnnccagtncaacatgntatatatcatcatatcatcactctaccagtcaagcggagcaacagacactagntcatagcgttcgtggcggagtngcacgcgtcgcantagatacgaggtaagtgtgtgtgttggctaggngagatncgtccagatagnactagcgtctatgcgatgngaacgctgtacgtagaagctcggatctgggcgacgtgcactagtgcgcgacgacaacagacaatcagaaaacgacacactacacggatacaacaagcctgtgcacatgtcatctctctatgtgtctgtgtgtgtgtgtgagggcagagcagagagtgtgtaatgtaaggtgagtagctgtcagacatangtatcagacacatncactaacatcataaaatgnagtaggagttgtgtgtagtagatgtntntnntaccttgtctatagagagagttgtagtatctgtgngtgnntggtgtgantgttatatatttnattctacccttaacttactatctacatacactaactcgtcagcctaatagatcgtcgnattacattccacgtgatcatgtcataacagcncgtgtcttacactatgtatttatttggtnagtaagatagatgggctctttctatctcctggcgtgatgtatgaatattgtctacttatgtccttctcattgcctttactacacctagatctagatatatcaactctatttgtattattattatcgtcctatcacgctcgcagatagtgactaagataagaaatgcagatnaaacaaacgggagttctctcactgcgatattattgttatntntatagttactactattcatatgttctttactatatgatccgcacatcacacagctactaccacggttgctcttgtcgcctgtatcagtgcgggggtcgtgcacacagatgngggagcgcgttagcactaacaggttaaaggagtgctctaatataaatgtatgataaagtatgaggtgtgtgntntgatggcgattgtacaaggacggtgaagaagaagaggagaagatcacactctagtgattgtatagatatgagttttgattctgggcggatgctgaccggcgatggccactaatnnactatnttgttgggttaaggcctgtggaaagatatgtcggctgttctngtcactaccataactaatgtatgcacttcgtttgctctggagaaaggaagagggcacncaccacataatggatgaggatagnaagtgggagcgnnnntnnttatattttctcctcctctacannnnttttggngttttgnnncgtatctatgggtgnnnnnggggnngggnnnnggggngaagcgtggnnaggagngagggngcccgcgncncnccaccncaaacacaacaca

SEQ ID NO: 3425 - DNA, 1673 bp, Glycine max
  misc_feature (32)..(32): n is a, c, g, or t
  misc_feature (150)..(150): n is a, c, g, or t
  misc_feature (162)..(162): n is a, c, g, or t
  misc_feature (164)..(164): n is a, c, g, or t
  misc_feature (300)..(300): n is a, c, g, or t
  misc_feature (343)..(343): n is a, c, g, or t
  misc_feature (364)..(364): n is a, c, g, or t
  misc_feature (379)..(379): n is a, c, g, or t
  misc_feature (451)..(451): n is a, c, g, or t
  misc_feature (489)..(489): n is a, c, g, or t
  misc_feature (519)..(519): n is a, c, g, or t
  misc_feature (539)..(539): n is a, c, g, or t
  misc_feature (599)..(599): n is a, c, g, or t
  misc_feature (675)..(675): n is a, c, g, or t
  misc_feature (732)..(732): n is a, c, g, or t
  misc_feature (1205)..(1205): n is a, c, g, or t
  misc_feature (1487)..(1487): n is a, c, g, or t
  misc_feature (1490)..(1490): n is a, c, g, or t
  misc_feature (1502)..(1503): n is a, c, g, or t
  misc_feature (1639)..(1640): n is a, c, g, or t
  misc_feature (1645)..(1653): n is a, c, g, or t
  misc_feature (1655)..(1657): n is a, c, g, or t
  Probeset Number=SeqID_13204
ccgagtgagtatcacttagtgtctctctcgtnatgctacaatcatcgtgtgctgtatcctactgtctctgtgcacgcgcatgtctactagatttcgtcgtttgatatactctaactatactcttatgtcactatggttctcgtccagcgngtgttgagtatntnagtcttgtcgtttatattgacgtatagagcaggtgtatcgtcgtcatgtctcttcgtcgtgactggtgtagagatgatagaatatacgctcaagattatcggataatatagcttcatctgcgtctcttgagtgtcngcgtgtcgtggcgcaggccgcgcgcgtggcttggtcagtcgcnggagcggtaacgacgccgcangagttcacgcgtcgnggtgtggtcgagcattagaacgtcacgaccacgactgttctgcgtaaatctacgcttcatagagctagtgcntggagaccgctggagatacatcgtataagttagaggtnggttagtgatgggagcgacagatacagtancaacccgcgccgtctatacnctttgatacatttgagcgtcgtctagtcctctgctgcgtgtagatgagtatatgagtcanataggatacgatatgtgagagcgagatagatcagcagagctcctccaacatactccccacgcgacgcgcggggtgnactaaagtgtaattaccaacagcgacgcaatgcgtcgcagtcacgcagcgcatcacncatcgcaaccacctatgtaatcgtgtgtcgccatcttattattcacatcgcttaaaataaaatatgtaccgcagcgtatcttgtcatagttgtacaattgattagtagagagttcgataggtgaggtgtggtggtgtgtgcagactcgttgaggtgtgaagtgtcacgaaacgaaacattgtactcggcgggcgccgcgcggggatagatatatgtgtaggcgtcacggactcacgtgagacgagtcgcgtcagtcttctttgataatctattggttgactgtcgagatcaacctgttaatgatcttcttcattaggttggaggacgaccatcgtgattgttgtctcacccccgccacgctctttaaattcactaaatatcagtttactctacccctccgtcatgccacttcgcacgccgccccctcgcgcccccgcaccgcagctccacccgcccacatcgagctctagcgnagggaggacgcctcaagtattgtggctcccgacatactcgtgccgcgcctacgacgcaaactaaaacgtctaagaaagaccagacagaaggatcttagcgcactcgcatgttcttcacaatcaaccagatttaaactaccaccaaacactatactccagcccacccaattattcagtccacacacacacacactccaacaaagcatatacggcgtctaccgctgtgtagtccacctactctccttccgcattcacactgggaaggcagagccattactaaanaanaacagatcaaannatagtgatggggtgaggcgtcctcgattgtatgagcgggtgtatttgtaatatttgagtgatatatatgatttagtgatgtcggtgttgttagttgttgtagttgtggttgttagggtttgtttgtttttttgttnnggttnnnnnnnnntnnnaaaaaagaaaaaaaaa

SEQ ID NO: 3426 - DNA, 1387 bp, Glycine max
  misc_feature (1)..(1): n is a, c, g, or t
  misc_feature (998)..(998): n is a, c, g, or t
  misc_feature (1022)..(1022): n is a, c, g, or t
  misc_feature (1202)..(1202): n is a, c, g, or t
  misc_feature (1284)..(1284): n is a, c, g, or t
  misc_feature (1304)..(1304): n is a, c, g, or t
  misc_feature (1337)..(1337): n is a, c, g, or t
  misc_feature (1339)..(1340): n is a, c, g, or t
  misc_feature (1356)..(1356): n is a, c, g, or t
  misc_feature (1358)..(1359): n is a, c, g, or t
  misc_feature (1361)..(1366): n is a, c, g, or t
  misc_feature (1368)..(1371): n is a, c, g, or t
  misc_feature (1373)..(1375): n is a, c, g, or t
  Peptide Sequence Number=SeqID_6860
  Probeset Number=SeqID_13205
ntgtatgtcgctttcgagtggagcgcggcgggctctcagcatatgcctcgaaagccgacagagaaggggagagggacggtggcagaacggtgtatgatcgctgagaactcagcactaccgaccgactcaatgacatatctcactcccgttgtccacttgatcccggagagcgcgtgccacatcgaataggctcggggcgaggcgtgagtgggtgtggaggggtggtgaagtggtggggtagttatgcgtgtctagtgcttgtgtggtgtcgagggctaacatgtcgggttcgagacgtctcacattcatcctttcgtcggtcatcatagcgcgcataaactagtagagtagagcagaccaatgtcatttaacttcatatcgactcgtgggtagagcgataggcggcgggccggtgggcgggtgggtgggagaggagcgggggcgtgatcggggcggtcggcggggagagagcgcgcgcgggcgggtagcagctgacgaagacggcgatgcacagtaataacgacaatacctacattgttaatgcaagcatctatctctttactagtagaatcacgtgtgatggaccatcgctcactgactttcgattaggtgaggcgagtactaaaacgggtagacgcacgagagctccagcagcgtgagaagcgtgaaatatatataatagaatagtataagggaagcaggcgggggggcgtggcgggcgggcggtgaggcggtcaggcgtgtgtggtgctgtggtaatagtaacttttaggggtgggtgttttgacgaggttgtggtggcacgcagacggtattaaaatctctccccacccacccctcccctccgcctctaaactataatctatcttttccctcccccacccgaaacaatactctaacttacacagcccccccccgttgagcggggtatggggcccggccgcacaccgatacccgcgcgcttcgcgggccgggcgcggccgcgcgggcgcgacccntgccgccttccctcagagctcgtnaaaactcaactaccccgggagagaaggtaatagtgtgtggagaagatattagatttatcagaataatttgagagaattattgataatataatcaatataataaatcaatatgcaaatcagaacagtaatattccactactcatataacagaaaaatggtggagaggtaccggctcagagnaaaacaagaattatatctatatattcatataatagaagagcgaacgcaaactattgcagaaggagggatatagagcatattnaaaaaaatatattaaccatnataagcatgatgcgttgcgcgtggtagagcgangnnagagcaaaaaaaaaangnnannnnnnannnnannnaaaaaaaaaaaa

SEQ ID NO: 3427 - DNA, 697 bp, Glycine max
  Probeset Number=SeqID_13206
gcggggagtcaatgattgatatatcaagtaattgatttctgaatagaaaagaggggatggcattgactgcattttgctctgaagaggcagaggtattatatcgtttacagtgcgtgaaccgtatgatgggcgtgaagttcgaagcatgcacgggcatcagccaatcaagacttgagttgctatcgctgttattccaagccgatgaaatcagccaatcagatttgcagaaaaaagtaaatattgatggtgcagctgtgacgcgtcacttaaaacagctagaaacaaaaggaatggtcacacgcagaagaaaaccagaagataatcgagtcacacttgtccgcttaacagacgaaggcagaacaagaatcgaagcttctaaaatagaaaaagaacgatttatctcagaaatgcttgaaaacgtaagtgaagaagaacgaaggcttctcactgatgtgctcatccgtatccaacaaaacatcgaaaagattcaaacaacctaaaggagtgttacacatggctacaacattaaaaacaaacgattttatggaaattatgaaagggcgccgctctattcgtaattatgatccatctgtgaaaatcagcaaagaagaaatgacagagattctagaagaagcagcaactgcaccatcatcagtaaatgcacagccttggcgcttcatggtcattgacagcccag

SEQ ID NO: 3428 - DNA, 2026 bp, Glycine max
  misc_feature (26)..(26): n is a, c, g, or t
  misc_feature (230)..(230): n is a, c, g, or t
  misc_feature (277)..(277): n is a, c, g, or t
  misc_feature (304)..(304): n is a, c, g, or t
  misc_feature (307)..(307): n is a, c, g, or t
  misc_feature (625)..(625): n is a, c, g, or t
  misc_feature (700)..(700): n is a, c, g, or t
  misc_feature (873)..(873): n is a, c, g, or t
  misc_feature (970)..(970): n is a, c, g, or t
  misc_feature (972)..(972): n is a, c, g, or t
  misc_feature (1045)..(1045): n is a, c, g, or t
  misc_feature (1090)..(1090): n is a, c, g, or t
  misc_feature (1161)..(1161): n is a, c, g, or t
  misc_feature (1181)..(1181): n is a, c, g, or t
  misc_feature (1206)..(1206): n is a, c, g, or t
  misc_feature (1232)..(1232): n is a, c, g, or t
  misc_feature (1346)..(1346): n is a, c, g, or t
  misc_feature (1357)..(1357): n is a, c, g, or t
  misc_feature (1370)..(1370): n is a, c, g, or t
  misc_feature (1388)..(1388): n is a, c, g, or t
  misc_feature (1404)..(1404): n is a, c, g, or t
  misc_feature (1423)..(1423): n is a, c, g, or t
  misc_feature (1440)..(1440): n is a, c, g, or t
  misc_feature (1442)..(1442): n is a, c, g, or t
  misc_feature (1491)..(1491): n is a, c, g, or t
  misc_feature (1493)..(1493): n is a, c, g, or t
  misc_feature (1511)..(1511): n is a, c, g, or t
  misc_feature (1594)..(1594): n is a, c, g, or t
  misc_feature (1630)..(1630): n is a, c, g, or t
  misc_feature (1654)..(1654): n is a, c, g, or t
  misc_feature (1656)..(1656): n is a, c, g, or t
  misc_feature (1671)..(1671): n is a, c, g, or t
  misc_feature (1736)..(1736): n is a, c, g, or t
  misc_feature (1754)..(1754): n is a, c, g, or t
  misc_feature (1787)..(1787): n is a, c, g, or t
  misc_feature (1789)..(1789): n is a, c, g, or t
  misc_feature (1793)..(1793): n is a, c, g, or t
  misc_feature (1805)..(1805): n is a, c, g, or t
  misc_feature (1816)..(1816): n is a, c, g, or t
  misc_feature (1820)..(1820): n is a, c, g, or t
  misc_feature (1832)..(1832): n is a, c, g, or t
  misc_feature (1836)..(1836): n is a, c, g, or t
  misc_feature (1936)..(1936): n is a, c, g, or t
  misc_feature (1959)..(1959): n is a, c, g, or t
  misc_feature (1976)..(1976): n is a, c, g, or t
  misc_feature (1982)..(1982): n is a, c, g, or t
  misc_feature (1988)..(1988): n is a, c, g, or t
  misc_feature (2026)..(2026): n is a, c, g, or t
  Peptide Sequence Number=SeqID_6861
  Probeset Number=SeqID_13207
cagcgagcacgtctgcatatagtgcnagtatatgtagaatggtactgatgttgatagcactatcaacagatattatgatagtatttacactagaacataaatcgtgtgagtcacacacgcacatcatgagcatcgcggcgagatgtactttactccagcatggacttagtatatctcagtacacttgctgatctactcatttcatcgcaaaatggatcgcagcagttatnctcgactcgcgcgacatgcatgtcttaatagttactacgtatagagnctagacgagaaagctacacgattatantcncacacacaatatatagccaagccgcacgtgtcggtatcgtactcattctcagactgatattagtggatgacgatccgaacagtggctactcctcttgtcttcatatacgtaatcttcatctactaacacatagagacgccattacgtaatcagaatgagcactgacatataagcgccactgtctcgcaggcagcggtactcagaacttataagcgaagaatatataccactcgccatccggtacgtagtatctgcatcactcctcgttcgatctctcagcgctgcctctccgttgcgcacgaatcacgtcggcgcacngctgaataatgattatatgatctattgtagcatgcgaaacgcacgccgccacacgaacatcacccagtagcgaanatatgatatctgctcgagcgcaggtcctatatgcgacgcactatatctgatgtcatcatcagcgcatcatgtctcttcgaacgatagatgacaaattacatatagagtcgattgatatgtagatgggtcgtggaaataccatcataactatatctcaccaatccacatcactntcacgcatagtctgcagcgaacacacatatactattgccgtgcgtagtatccgttgccatcgtctacaacttcgtgcatctatggacttgtgctcancngatatgacatacgatctcgacactattacctcaccgcaactgctcacactatgttcatatcgatgcgtcatcngcggtctcgcatccattagaacatcactcatctccgcacgcgtantctacaagaatgcgtcatcgcgtcacgtctatatgccatcgctgttcgacgtctccagactactaccacgncaacgtactcagacacatgnagacgcaacatgtcgtacacggctntagctccgtctctactgatcgcacgnctgacgacacacgtatatatctatactaattaactgtagccgagttagtgcgtcatacgtactatccatcatgtcgtgcccgtgtcacgatagatagtactataggatcgtatngacgcacgatngaggagcgtgctnatatcatctatatcactnatatgtagtttactanagtgtaacgcgcatgctcntacagcacaactgcagnanacgcagcgactcacatgagtcttgctggacatacctcgcatcgtgctancnagcatgacacgacgatcnatgtgatagtaatcgcgtcgtcagtacatatatctctacttatctccatgcgcctgttacgcagcgatagacgctgaccgcanactatgctagacagcgtcgcgactacgtcatctctngtcgtaacgcgcaatacatatcantncgaagctctctatanactcatctcgatgcatgtatactcgctctgatctcagtttcatgtagcgccccgactcatacatngagtccatgctcacatangtgctccgctgcagtctgcacacgacgacgctncngcangacgacgtaggngatcagatganacgncatcgccgacancaantactcacgtacatccgacgatcagcgagagtgatgtggtacgtgaactattgatgcgaccattatcatagaactactcactacgtacttcacatcatgantacgagcgacacatgaattcagnataattacgcgtatgcntgcatnactcantaccgtcccaccagtataaactacgactactacaaatn

SEQ ID NO: 3429 - DNA, 560 bp, Glycine max
  misc_feature (157)..(157): n is a, c, g, or t
  misc_feature (178)..(178): n is a, c, g, or t
  misc_feature (381)..(381): n is a, c, g, or t
  misc_feature (436)..(436): n is a, c, g, or t
  misc_feature (556)..(556): n is a, c, g, or t
  Probeset Number=SeqID_13208
ttttttttttttttttcaaattcaatagcgatttattaatgaaatatttattaatatatatatgcatgttttattattattattttataacactaaaaatattattaatattttcataatactgaattattgctttacaataatattataaaattgngataaaataataacaatattnggctctatttttgctatacatgtagtacataaaatcacatttatttacatcaactttgaccaaacaatgattatataagcaggcataatatgtacatcaattatgataagcgagatatttctaaaaaattaactaaaactaagtctttgtaactaaaccgttattcttgtttcaggttgaggtcactccttttcatgcgtggnggaacaggcgggggctggtcactatctggttcaggctcataatacgctttgtacncatacagtccaataattatgttgacagctagtacactagcaataactgaccatacaatatttgagaaatcactaacattaaaaacgtctttcaaaatgtaatgggtcccaaagtaagctntgaa

SEQ ID NO: 3430 - DNA, 1956 bp, Glycine max
  misc_feature (1)..(1): n is a, c, g, or t
  misc_feature (11)..(11): n is a, c, g, or t
  misc_feature (15)..(15): n is a, c, g, or t
  misc_feature (35)..(35): n is a, c, g, or t
  misc_feature (66)..(66): n is a, c, g, or t
  misc_feature (76)..(76): n is a, c, g, or t
  misc_feature (88)..(88): n is a, c, g, or t
  misc_feature (111)..(111): n is a, c, g, or t
  misc_feature (130)..(130): n is a, c, g, or t
  misc_feature (142)..(142): n is a, c, g, or t
  misc_feature (218)..(218): n is a, c, g, or t
  misc_feature (233)..(233): n is a, c, g, or t
  misc_feature (252)..(252): n is a, c, g, or t
  misc_feature (265)..(265): n is a, c, g, or t
  misc_feature (282)..(282): n is a, c, g, or t
  misc_feature (310)..(310): n is a, c, g, or t
  misc_feature (405)..(405): n is a, c, g, or t
  misc_feature (475)..(475): n is a, c, g, or t
  misc_feature (481)..(481): n is a, c, g, or t
  misc_feature (483)..(483): n is a, c, g, or t
  misc_feature (502)..(502): n is a, c, g, or t
  misc_feature (504)..(504): n is a, c, g, or t
  misc_feature (700)..(700): n is a, c, g, or t
  misc_feature (722)..(722): n is a, c, g, or t
  misc_feature (745)..(745): n is a, c, g, or t
  misc_feature (817)..(817): n is a, c, g, or t
  misc_feature (875)..(875): n is a, c, g, or t
  misc_feature (911)..(911): n is a, c, g, or t
  misc_feature (927)..(927): n is a, c, g, or t
  misc_feature (1119)..(1119): n is a, c, g, or t
  misc_feature (1240)..(1240): n is a, c, g, or t
  misc_feature (1273)..(1273): n is a, c, g, or t
  misc_feature (1433)..(1433): n is a, c, g, or t
  misc_feature (1466)..(1466): n is a, c, g, or t
  misc_feature (1590)..(1590): n is a, c, g, or t
  misc_feature (1880)..(1880): n is a, c, g, or t
  misc_feature (1916)..(1916): n is a, c, g, or t
  misc_feature (1933)..(1935): n is a, c, g, or t
  misc_feature (1937)..(1937): n is a, c, g, or t
  Peptide Sequence Number=SeqID_6862
  Probeset Number=SeqID_13209
ncacgagcaanatgnatggacgtcgtcagcatctncaacagtaatgatcgtcgatacgtactactngacgtcgtcngtcgatcactcntagtagctcatagcgtccttatnactgtgctacttcacatcntagcatcagcantaacactcactctcgtgacgcacgctacatggctcgatcatatgatcatgagctcgagcatagcttaagttatatnacattagtcataganagtagacagatcagtagangcagaatgacgangaactgtaagagaccantagagatgctagtaacatagtcgtaatnagcgtatatgagtttgtatatgctaacatcttgcatatctagatgtcatgatatgacgcatctgtcatcagcgcaatgctatcgatctagtatcncagcatatcgatgagtatactagcagatcgtatgcgtagtcatctagtatttatgtctagatacatccantcgctngnatatgtcgtcaatcgtcgncnagatcactcacacgtctgcgatcgtatcatctgcacacatcggctgtatgtgcgtccgagtaaagtatcagtatagagatcagaacgaagatccgagacacgtaaatacgacacggacggagacatctaagcagtggtgcagtatgcgtacatatcgacagatacgagtgtgatgcttagagagtctatcagtagncacgcagcgagatcgcacacangagtactcgacgtagtcatatcnaatgctagtgaataggtactcagctacatctattcattagacgatatagtgcgcttggcgtagagtcgagtnacagactcaactagataggagtcgcacgtcgcgctcagtatagcaatatgcgagatanagcagacgtggtgacgatcgatgttagtataatagnttacatcgagtgaatnctgccatgcatcgactagatcatacatcacacatcactgcagtagataggacgatgtcgtgtcattgatatatcattgtgatatcacaagtacgacacgctcgcgcgctacgcgtacatccatatcatccatctctatctatgcgactcacagctcaatccgttatcggactatacatcatatactcgttcncattatcatcttgataattcagtatcagtactcttagaagtcatataccacacgagacaatagtgagacgcgaagaagaatgtcggatgttagcgcaagactattattagtcactatccgncatcaatcatatgtactccacacatatagatantatatatatatatgatagtgaggcgtagttgacgaataggtgtcgagataagttatctatggatagggagcgaaggagaccggaggagacggtgtgcgcgctgctagccacgcagccgtgcctcaggccgcggactgcatagactgcgcagctgcggctntcgtccacctatacagacgacaatgttatatgncatacgcgagacgagcgagatgcggctatgaggtagacgcagaacgagatagaccgcggcggccgatgagaggtcgagcccactgctgagctgccacctcgctcgtaacatggtgcgcacaacncgtattcgtgcatcagtcagcagcgccccgacgcctctcgcatcagtcgcactccgggacgcagacggacaatcgtatgtatcatcatatggttctccgtctctctctgttatgcgtgtgttagtgtgatgtatatgcggtgacattgtgaacggctgtgagtgcgccttgtattggtgaggatagatgtgtaggtcgaggtagacggtattgtctagtattgtgatatttgtgtgtctcgggtctactatcgcgcctctctcgcgctacatgaccagctctgtgtgctntgtgactcgactatgtcattcgatatcatagtaccnggccgttatttcgatannnancacacaacacacatacacc

SEQ ID NO: 3431 - DNA, 1595 bp, Glycine max
  misc_feature (1)..(1): n is a, c, g, or t
  misc_feature (5)..(5): n is a, c, g, or t
  misc_feature (16)..(16): n is a, c, g, or t
  misc_feature (25)..(25): n is a, c, g, or t
  misc_feature (50)..(50): n is a, c, g, or t
  misc_feature (78)..(78): n is a, c, g, or t
  misc_feature (97)..(97): n is a, c, g, or t
  misc_feature (295)..(295): n is a, c, g, or t
  misc_feature (432)..(432): n is a, c, g, or t
  misc_feature (528)..(528): n is a, c, g, or t
  misc_feature (531)..(531): n is a, c, g, or t
  misc_feature (641)..(641): n is a, c, g, or t
  misc_feature (778)..(778): n is a, c, g, or t
  misc_feature (1104)..(1104): n is a, c, g, or t
  misc_feature (1208)..(1208): n is a, c, g, or t
  misc_feature (1263)..(1263): n is a, c, g, or t
  misc_feature (1461)..(1461): n is a, c, g, or t
  misc_feature (1573)..(1573): n is a, c, g, or t
  Probeset Number=SeqID_13210
ngtangcatggtgtgntatgtattngtcatcgacgtgacagacgtgcgtnatacgagtcgcagcaggcgtgtgtcgtnttgagagcgagcagcgtgnatcgccgagtgtatgtgcgcggagacagcgataagtgtgcgctgcggtctagtctctactcatatcagtcgttgtgtatgtgtatagggtgctggtgtcgttcgacgttgagtgtcagtgtggttgtgttgatcatgcgtgtgttgtagatacaagcgatcatataggagtacatggttgatgaggtaagtattgaantcgtgcatgagtatatccgcagtgagagtgtgtactgagacgctcgtgtgtgtggagagcaggctatgtgctactctagaggcgagtcgcggcgagagggagacgtcgcgagggttgagagagtatggtacatagcngtagagtgtgtatgtgtgtgtggaggtccatagtgttgttatcgagtcgtaacgtcatgacgtgtgtgaccgcgatgagtaccatgactcagtctnagncagagtgagacgagaactgcgcgcgactagagtgtgatcaagctggatatgtggtgtagggtgtgtacgatgtgtgatcagtgatagatcataagatagagatcagcgantcgtatgtgtcgatgatagtaggtcgcatgactgatggtgagacaaagagatgagaagagagcgtggcacgcaatggagcagtgcgcgtcggtcgccataagcggtgagggtgggagacacatgtagcagggtaggnagatgcgtgtggcggtgtcgtaaggcatatacgtatcttgcgcggaccgtggtgctcggagtggatgctcaagagggcgagtcgacgtgtagggagtgtctaagggcgcgcgggtcgatatctcgcggaaagagaacggtgagcgtcagtgaatgctgagaaggaacgatgtacagagagagttgagatagtaggtaagattgatctgatcgtgaccggggagtgtgtgcgcactgcgtagggagatgtcgctcagggggcgtctgaggatgtgtatagtgctggggggccagacgctggtcgcgcctgtggggatatattcatantatgacatatcatagctgtgattatgactgaggaagatatcatagatctgagtatcatagatgactagacagaacgcgacactcgagtgagtgagagagagcgnaatgcgcgccgtggatatagtggtgagacacgatatgggctccatcatcgtagangagtagaggtgcagttatatccacatatggatgagagtcaatttaatcactagcccgtagattgtcgaggtgttattaatctatatgaagtgctaaagtagagagcaatagacatccatcgtgtggcgcacgacgaactctgctcgcagcctgcatgaacgcgtcgtcgcgtagaaagttaatatggtatggcggtgnagtagcggcgtggagacctgggagtgatggggtgtgtataatggtagtgcgctgggtcgttgcgtgcgggtggtgggtggtgtagagagaggaggatgaccgacgggagagnagacgaggcgagaggagcggcc

SEQ ID NO: 3432 - DNA, 476 bp, Glycine max
  Peptide Sequence Number=SeqID_6863
  Probeset Number=SeqID_13211
ccaaaactactacwtataccgttaattcctaaaaatakgggccaytgatttccttacaagtaaatacaaaaaaaatcaaacacattactatttaatagtctataacaagtactctattcaggcctatcctcagagattctgacataaatattggtttttgtaacttaatagtaagtaactcctcaacccaacaaaattctaaagcctccatcttcccttaatagtacccggtgggtcgaaatcattgcaactaaatcatcaaagttaaatgggtattcagcaaaacccaaaaagattaaaaatttaaaaagaaaaaactaaaatttataatggggtgtggaaaaaatggagcagctacgaaacggagcgctggcgccacaactgtattcagcggagcaccgaacggtgtctctgctctctctctctctctctctctctaaccatgtctctctttctctctcttaactctttgtttt

SEQ ID NO: 3433 - DNA, 1433 bp, Glycine max
  misc_feature (56)..(56): n is a, c, g, or t
  misc_feature (982)..(982): n is a, c, g, or t
  misc_feature (1004)..(1004): n is a, c, g, or t
  misc_feature (1207)..(1207): n is a, c, g, or t
  misc_feature (1241)..(1241): n is a, c, g, or t
  misc_feature (1318)..(1318): n is a, c, g, or t
  misc_feature (1408)..(1408): n is a, c, g, or t
  Peptide Sequence Number=SeqID_6864
  Probeset Number=SeqID_13212
cacactacgcacccacgcaccactcaatggcgggataggagagtaccgagtcgatnacattctatctttatatatctcactcgtgtcattatatattttctcctatcatatcccgcatcactgactctatttatttatcatattaccctctacttctgcaccaactaacatcacgtcctctacacgacaccacacgcttgcaccacacgcatactacactctacttgcacgtagcctggctctgtagtgtgctcgacgcggcctatattgcactccagaccatatcatataatgagtttctgtcatattcgttttcttgcttcatctcttatcgctccttccctcccttttcaccaccgattcgacgacatgcctatcgacacggtatacgacatttctccgcattcttgattgtaatattattgtgatatataattggcacacaacgtatacaatgttacttctcaaacttcgcaaaaccattgataatcataatcataaccacgacattctagctagcgattatctgccgcgagtgagtctggtgtattctgcatctacctccacgatctgttctgtcattgtagcactgtggcaccacgcacttatatatactgctcactacttctcatcccaacgacccacttaaccatctatcttatgccactccttctctccccttatttcatctagactctggctctcgattcatcgtcgtcgctacgtgtatcagtggcacttggtgtagttgtgcgtagggtgcggatgcatctcgggtgctatgctgtacagcacctgttgaacatgcgtgtgtattagatatcgtagaatttctctcgttgacttgcgttagaagtcacatccttccacatgctacagtctggtaattcgtatcccatgcgaagcagcaatgatcgtattgtctgctcgtgcgactgacgcttatctgtctgtgcgcagattgatactgaacgacgaccgnattctacgttcacacggtcatncttgtcatacaagatcgatcattcacaccgaaacgtcacgtagttgactcatattcgcgacaagtgtgacatgcgtccacacatacatcgagctagattcgagataatgctcttagtttctctgtctcgtaaacggatgacctatatgcacgttacgtgtgtataatctcagccacgtgagagctcacactaatagacacctngctgctgcttctatgcgcacgcgacttgcaaggncacgagcgatctactacatatctgatagagagctagatacatacataactatacgtatcgaacgcgacgtccaagantaacagtgcctcgcacgacgaccgacatctgacgtctgctcatatagatcacagtacgtatacatgcttagaatcagtgtatcgacgccntataatacgcacgctcacgcgcacc

SEQ ID NO: 3434 - DNA, 1781 bp, Glycine max
  misc_feature (1)..(1): n is a, c, g, or t
  misc_feature (21)..(21): n is a, c, g, or t
  misc_feature (77)..(77): n is a, c, g, or t
  misc_feature (86)..(86): n is a, c, g, or t
  misc_feature (95)..(95): n is a, c, g, or t
  misc_feature (109)..(109): n is a, c, g, or t
  misc_feature (115)..(115): n is a, c, g, or t
  misc_feature (118)..(118): n is a, c, g, or t
  misc_feature (124)..(125): n is a, c, g, or t
  misc_feature (181)..(181): n is a, c, g, or t
  misc_feature (211)..(211): n is a, c, g, or t
  misc_feature (238)..(238): n is a, c, g, or t
  misc_feature (297)..(297): n is a, c, g, or t
  misc_feature (323)..(323): n is a, c, g, or t
  misc_feature (331)..(331): n is a, c, g, or t
  misc_feature (356)..(356): n is a, c, g, or t
  misc_feature (489)..(489): n is a, c, g, or t
  misc_feature (502)..(502): n is a, c, g, or t
  misc_feature (555)..(555): n is a, c, g, or t
  misc_feature (660)..(660): n is a, c, g, or t
  misc_feature (1098)..(1098): n is a, c, g, or t
  misc_feature (1226)..(1226): n is a, c, g, or t
  misc_feature (1279)..(1279): n is a, c, g, or t
  misc_feature (1351)..(1351): n is a, c, g, or t
  misc_feature (1412)..(1412): n is a, c, g, or t
  misc_feature (1414)..(1414): n is a, c, g, or t
  misc_feature (1491)..(1491): n is a, c, g, or t
  misc_feature (1665)..(1665): n is a, c, g, or t
  misc_feature (1696)..(1696): n is a, c, g, or t
  misc_feature (1708)..(1708): n is a, c, g, or t
  misc_feature (1728)..(1728): n is a, c, g, or t
  misc_feature (1740)..(1742): n is a, c, g, or t
  misc_feature (1745)..(1752): n is a, c, g, or t
  misc_feature (1760)..(1762): n is a, c, g, or t
  misc_feature (1767)..(1769): n is a, c, g, or t
  misc_feature (1774)..(1781): n is a, c, g, or t
  Probeset Number=SeqID_13213
ncttcgttgtcgtgcgagtancgatcggctgatctcagtagtaccgtagtcatacgattgtctgcttcaccacgcgngtgctgcgncgcttcatnatatgcgtccgctntaatcnttncttatnncgcgtcattattctttgccatcgttatcgtctacggccgcactctgtgcgacactncagcaagcgtagtgacgtgctgctgtagangagggaggagcgcgtcatgtagtgagncggtgtgacagcatgcgctgctgtctagtgacgatgctgggtagcgcgcgtgcccggtnggcactacacggcgacgcgcgatctnctctcctntctgtgcgcgtaggcacacatactnagcgatatggtaggtactggtcccttgctcctcgtcatacagcgcgtagagagcgatgctaggaggtcgtggtgttctcttgttatcgtgtcatcacatatctgccgtatcatatgttgagtacagaatgttnagatgataggtgnatcgcgctcgcatcgagtgtattctatatatcaatacctgctagcgtacgcgngtccaagtgtgcgttgcgtccgtgtgtatggtctgcgtgatacatgcgcatcgagtcggcggcctgtacgcgtacgtcactgtcgctcgatcacgcgcgtgcatngggtcgatgaagacatcgcgcctcagatcgagccgacaccggcatcgacggacactccttctctcatccgtgcgagtacggtcggagccgcgacgatgacgcccgtggcgtcgtacaggaggcgcgagcgagcggcatatagctttgcatggacaagtacgcggccgcgagctgtagcgcagagtgcgggtctcagacagagagcgagtctaggtctattcgagaatatagctatggcaatacgcgcggcaattgtacagatcttatctattattctaattattgtatattcttatagtttggcacgcgacgcgttcacgtcttctcatttataatgtagcagtgtgatcaagagcagaggcaatgtgcgcgcattcatgcacggatgctatcacgatcaggtgagcaataacagcgacgcgacagcgacctaccacnaggcacattctaactttctgatcacgtctacgtcgtgcgtgggtgccgggcgttcgtgcgagagatcactctctcgattctcctcttcgtatacgtgtcgcttccgcgcgcgctatctcctccacgtngctaccttcatacggcttgtgacgcgctatcccacttgtcatccggtctagtnactactacgcactcgaccctcgtcacatggcgcggcggtgccgccgttgggctgcggcgcgtggtgcggcgncgtggcgtcgcgcggccgggcgtactgtagggttatgcgggtatgtcgcgccccgttctgncnccttcgcctgctctctcacgcgcgtctctccctctcttactatacacgcctccctccacctatcaatctcgttcatntgcgtcccagctacgatgtaactccacaccatcaccaatctaagcaggagagtgacgaacgcggaaggactagttatgccagttattgcggagcgggtgtgtgtatgataaatatagtttacttatctacaagactgctagacgaattctcgtagtttttacattacacttagnatctgtatatgtgtttataggttacgtattngggtatgttacnatctcatcgtcccacaccancccaacaacacnnnaannnnnnnnaaaccccnnnccccnnnaaaannnnnnnn

SEQ ID NO: 3435 - DNA, 453 bp, Glycine max
  Peptide Sequence Number=SeqID_6865
  Probeset Number=SeqID_13214
ggcacaacgctgctctggttcttaaggagatgcatgttgaggctttggtgaaatgtgtaggagtttttgaggctttgattaacatgattaaggagcctgttgggagtggttccaccaaggcctgtttgtcaacgattttcaacttggctaataataaaagaggcgtgacgacttgtctaaggtttgtggaattgggtgtggttgatgtgttgttgaaagttcttgttgatgcacagagaggcgtgtgtgacaaagctttggtggtgttggatagcctttgtgattgcaaacaaggggtgtagatggtaaatgctaatgctttgactgtttctcttgctattaagaagctctctacggcgtttgtgatgtgttcaagctacatcatattcagttgtttggaagctttgctacacaatatagcagaaggggtgttgattgaggcgcttcaaatgc

SEQ ID NO: 3436 - DNA, 1611 bp, Glycine max
  misc_feature (13)..(13): n is a, c, g, or t
  misc_feature (22)..(37): n is a, c, g, or t
  misc_feature (39)..(40): n is a, c, g, or t
  misc_feature (49)..(49): n is a, c, g, or t
  misc_feature (60)..(60): n is a, c, g, or t
  misc_feature (69)..(70): n is a, c, g, or t
  misc_feature (85)..(85): n is a, c, g, or t
  misc_feature (90)..(90): n is a, c, g, or t
  misc_feature (110)..(110): n is a, c, g, or t
  misc_feature (118)..(118): n is a, c, g, or t
  misc_feature (157)..(157): n is a, c, g, or t
  misc_feature (216)..(216): n is a, c, g, or t
  misc_feature (244)..(244): n is a, c, g, or t
  misc_feature (277)..(277): n is a, c, g, or t
  misc_feature (317)..(317): n is a, c, g, or t
  misc_feature (335)..(335): n is a, c, g, or t
  misc_feature (343)..(343): n is a, c, g, or t
  misc_feature (361)..(361): n is a, c, g, or t
  misc_feature (376)..(376): n is a, c, g, or t
  misc_feature (387)..(387): n is a, c, g, or t
  misc_feature (395)..(395): n is a, c, g, or t
  misc_feature (430)..(430): n is a, c, g, or t
  misc_feature (456)..(456): n is a, c, g, or t
  misc_feature (462)..(462): n is a, c, g, or t
  misc_feature (465)..(465): n is a, c, g, or t
  misc_feature (534)..(534): n is a, c, g, or t
  misc_feature (537)..(537): n is a, c, g, or t
  misc_feature (547)..(547): n is a, c, g, or t
  misc_feature (653)..(653): n is a, c, g, or t
  misc_feature (670)..(670): n is a, c, g, or t
  misc_feature (729)..(729): n is a, c, g, or t
  misc_feature (929)..(929): n is a, c, g, or t
  misc_feature (981)..(981): n is a, c, g, or t
  misc_feature (996)..(996): n is a, c, g, or t
  misc_feature (1343)..(1343): n is a, c, g, or t
  misc_feature (1450)..(1450): n is a, c, g, or t
  misc_feature (1502)..(1502): n is a, c, g, or t
  misc_feature (1611)..(1611): n is a, c, g, or t
  Peptide Sequence Number=SeqID_6866
  Probeset Number=SeqID_13215
ggggtttcccctntcccccccnnnnnnnnnnnnnnnntnnctttgttancttggttgctncactgtttnngatcgtcgcatctgngctcncttgtctgttggcgacgttnatcgctgngacgctcgcccgtgcgcgttctcgcgagctcgtcctcgntggtgtgtgagtgggagggtgtatacggtgtgatggcggtgctggatagggagggcgantgagatggcataatatatatcagttctntaatctcactatttcgtagactgctcgctcagnatcactcgctcactctctcttcttgtacctctgtcgcccnccgctctagcagctcgcncctcgtgncgcggcgcatccagctgnccgcacccatcacangcgcgagtgangtgcgagnaaacgcgccagctggagcgatgtgtctctcgtgangcggcgatggtgcacgagatgtgatngtatgntcnttgcttacatcgcgcctccctcctcgctccctctctcaactctccccgcacctgcgaccctgcgactcngtnctcgtgcgcncgcaacatctcgccgcgcccgcgcgcgcgccaccagcccatcccgcctgccggccgctaccgcgcgccgagtactcctcgagtgtctacacactatgtcctgtcgnacgttgatcttcacccngtgttgtgtcgttcgctccgtgcatatatacgcatgggtcaaacacatggacatgtgtngatatcatatacatacgcgccgactactgtgatatacgtatcatagtgctataatattgatatgtaatgtatagataatgatctatagattaatcggatgatctacaatcatacttaaaatcgcgcgcgtctgccttgtcatggtcactctattccacatatactgaagcgacggatgatcgcgtgtatccacgcctgancagtaagctgctttgtcacacgcggggcccacacccagcaccgtatgctctntactcgagtgtgtgnagcgtggagagcgagccggatcgcgtgagtacgactgtataatatatatagtaatccgatcgcacagtcgcctcttgacacgtcgtgatgtatgtctcgtacaacagagctatatattagctacatcatccactagtctcgatcgctctctctatcacctcatcctctctactctcatgtgtctgtctcattgtatatcctcattctcttgtctggacatgcgcagcactcacgtctctctatcctctttatcatccacactcctctgctccactatcgctgctgtatactcgtgtgctatatgtgttggtagtactcgcgcttctcgtctctgctcctctctctcnctcgacattcatctgttctctctgtgatagtacgtggcgaccgctgttgcacacacgccgcctgccgcgtgcgacccactacaacgcactcacatccactatacaangctccacatacatctcaccactccctcactctacaacaaaaactcacgacantatcagttcatacgatatcgacactgtatgcgacggcggatgcatatgtacgtcatgctatgatctatgtacacatgcatcacagctgcatagacgatagcatagatgn

SEQ ID NO: 3437 - DNA, 269 bp, Glycine max
  misc_feature (46)..(46): n is a, c, g, or t
  misc_feature (74)..(74): n is a, c, g, or t
  misc_feature (146)..(146): n is a, c, g, or t
  misc_feature (182)..(182): n is a, c, g, or t
  misc_feature (187)..(187): n is a, c, g, or t
  misc_feature (189)..(189): n is a, c, g, or t
  misc_feature (196)..(196): n is a, c, g, or t
  misc_feature (209)..(209): n is a, c, g, or t
  misc_feature (212)..(212): n is a, c, g, or t
  misc_feature (216)..(216): n is a, c, g, or t
  misc_feature (220)..(220): n is a, c, g, or t
  Probeset Number=SeqID_13216
ttttttttttttttttttgtattttgatggcaattttcttttttancaaattctccctttataaaattatgcantcatttatatattcagtttacgaacaatctgggttctcctactgtatatacttaaatatcttcttggggtantttggaaatcactttgacaagatcttcataaacttnttggncnggcttantgaccttagtganatntctnaatntttggaaaatttgggcttgtctttcttgaagtttttgagagtcaaattc

SEQ ID NO: 3438 - DNA, 1459 bp, Glycine max
  misc_feature (21)..(23): n is a, c, g, or t
  misc_feature (26)..(27): n is a, c, g, or t
  misc_feature (29)..(29): n is a, c, g, or t
  misc_feature (66)..(66): n is a, c, g, or t
  misc_feature (70)..(70): n is a, c, g, or t
  misc_feature (133)..(133): n is a, c, g, or t
  misc_feature (157)..(157): n is a, c, g, or t
  misc_feature (213)..(213): n is a, c, g, or t
  misc_feature (274)..(274): n is a, c, g, or t
  misc_feature (312)..(312): n is a, c, g, or t
  misc_feature (342)..(342): n is a, c, g, or t
  misc_feature (530)..(530): n is a, c, g, or t
  misc_feature (642)..(642): n is a, c, g, or t
  misc_feature (734)..(734): n is a, c, g, or t
  misc_feature (1148)..(1148): n is a, c, g, or t
  misc_feature (1203)..(1203): n is a, c, g, or t
  misc_feature (1246)..(1246): n is a, c, g, or t
  misc_feature (1259)..(1259): n is a, c, g, or t
  misc_feature (1272)..(1272): n is a, c, g, or t
  misc_feature (1291)..(1291): n is a, c, g, or t
  misc_feature (1389)..(1389): n is a, c, g, or t
  Peptide Sequence Number=SeqID_6867
  Probeset Number=SeqID_13217
gtggcggacccgccccgcggnnnggnngncaggcgacggccacacccacaccacctatccgatcgnaacnatcggtaaagttatttgtttcgccctctgtatgtggctctccgctgtgtcctcgccccgcttnctacttgcttgggtgacgaataantgatctcttcttcgtccgcccaataatacactgggggatatcggtgcccacctgtnctacgctccgaacaccgtacgtcggtagcaagaaaatctgagtataactgtgatttggtgnaagaactgtatggcgtagtgatgaacagcatttggggnataaaaagacacacgcggtctccgcgtctntgcattcgcctcactactgtatgtttgttatctgttgttatccgggtgcgtatagtctcttcagcgtgtcttggtgttataatatgaagggacgggagagtggacaaacggagcacgcgcgagaattataacaaatatataaaggggtaatatacatggcgggttgtagcgcacgcgacacgccgggncaataatactgtgactatctccacaactcgttgtcgaacgcgagacccgccgcgcacagacaacgcatcgcgtgccacaaggaaaggcggtaatatatagaaccgcgggtanaaacagcgtctcataagtgagtcgtgaactattctcatcgctcttttcattccacttactctgccggtcgcgatactattcgtatcgggggngctatgatgttgtataatgtgaatgatatatgaatttgtattatggatattcattattttgggggcaaaggtcatatctaaacggcgcgcgctaacgtcaggactgtgggggtttattgtttggtcagagggtaagcgtatctactatctatgaaacatgttgggtgtgtatccacggcgcaccacccgcctcaccgtatctcatcggtgtcgtaatgtgttgtgttaactgctatatcattactatataagtcaatctcccataccacatctcgcctctccctgttctattatatatatattaatatattcgtgctaagattgcatctcggtggtctcggaatattacaacgcgacacgcccactcacacaacaaccacacccgtatgatcgggagaactttgatacgctgtnttgatcttctaagaacactcgttcgcattacatatgctgtgatacggtaagtagnatactcgtcgcttaactgtctacatcggttcactgcgtcaatntcacgctcgactncgggctgtggtcntcgtatctatcttcatatngctgtgcttacagcgcttctaatatactgcgacatgctatcattcgtctctcaaatctgcgctcgtctctctgtcaacgaactactctggtaggcganacatagacacaataataacagtgcgacgacaacctcatcttttatcataacgtcggtacacacactcggt

SEQ ID NO: 3439 - DNA, 2198 bp, Glycine max
  misc_feature (15)..(15): n is a, c, g, or t
  misc_feature (20)..(20): n is a, c, g, or t
  misc_feature (24)..(24): n is a, c, g, or t
  misc_feature (26)..(26): n is a, c, g, or t
  misc_feature (28)..(30): n is a, c, g, or t
  misc_feature (33)..(33): n is a, c, g, or t
  misc_feature (35)..(36): n is a, c, g, or t
  misc_feature (38)..(39): n is a, c, g, or t
  misc_feature (41)..(44): n is a, c, g, or t
  misc_feature (48)..(48): n is a, c, g, or t
  misc_feature (73)..(74): n is a, c, g, or t
  misc_feature (79)..(80): n is a, c, g, or t
  misc_feature (82)..(82): n is a, c, g, or t
  misc_feature (92)..(92): n is a, c, g, or t
  misc_feature (97)..(97): n is a, c, g, or t
  misc_feature (101)..(101): n is a, c, g, or t
  misc_feature (106)..(106): n is a, c, g, or t
  misc_feature (109)..(109): n is a, c, g, or t
  misc_feature (119)..(120): n is a, c, g, or t
  misc_feature (156)..(156): n is a, c, g, or t
  misc_feature (158)..(158): n is a, c, g, or t
  misc_feature (162)..(162): n is a, c, g, or t
  misc_feature (165)..(166): n is a, c, g, or t
  misc_feature (170)..(170): n is a, c, g, or t
  misc_feature (183)..(184): n is a, c, g, or t
  misc_feature (187)..(188): n is a, c, g, or t
  misc_feature (194)..(194): n is a, c, g, or t
  misc_feature (208)..(208): n is a, c, g, or t
  misc_feature (235)..(235): n is a, c, g, or t
  misc_feature (240)..(240): n is a, c, g, or t
  misc_feature (259)..(259): n is a, c, g, or t
  misc_feature (273)..(273): n is a, c, g, or t
  misc_feature (286)..(286): n is a, c, g, or t
  misc_feature (315)..(315): n is a, c, g, or t
  misc_feature (317)..(317): n is a, c, g, or t
  misc_feature (340)..(340): n is a, c, g, or t
  misc_feature (343)..(343): n is a, c, g, or t
  misc_feature (349)..(349): n is a, c, g, or t
  misc_feature (352)..(354): n is a, c, g, or t
  misc_feature (422)..(422): n is a, c, g, or t
  misc_feature (431)..(431): n is a, c, g, or t
  misc_feature (434)..(435): n is a, c, g, or t
  misc_feature (459)..(459): n is a, c, g, or t
  misc_feature (495)..(495): n is a, c, g, or t
  misc_feature (514)..(514): n is a, c, g, or t
  misc_feature (520)..(520): n is a, c, g, or t
  misc_feature (522)..(522): n is a, c, g, or t
  misc_feature (552)..(552): n is a, c, g, or t
  misc_feature (567)..(567): n is a, c, g, or t
  misc_feature (569)..(569): n is a, c, g, or t
  misc_feature (574)..(574): n is a, c, g, or t
  misc_feature (613)..(613): n is a, c, g, or t
  misc_feature (622)..(622): n is a, c, g, or t
  misc_feature (666)..(666): n is a, c, g, or t
  misc_feature (798)..(798): n is a, c, g, or t
  misc_feature (831)..(831): n is a, c, g, or t
  misc_feature (842)..(842): n is a, c, g, or t
  misc_feature (867)..(867): n is a, c, g, or t
  misc_feature (869)..(869): n is a, c, g, or t
  misc_feature (937)..(938): n is a, c, g, or t
  misc_feature (943)..(943): n is a, c, g, or t
  misc_feature (948)..(948): n is a, c, g, or t
  misc_feature (969)..(969): n is a, c, g, or t
  misc_feature (975)..(975): n is a, c, g, or t
  misc_feature (993)..(993): n is a, c, g, or t
  misc_feature (1015)..(1015): n is a, c, g, or t
  misc_feature (1019)..(1019): n is a, c, g, or t
  misc_feature (1055)..(1055): n is a, c, g, or t
  misc_feature (1065)..(1065): n is a, c, g, or t
  misc_feature (1068)..(1068): n is a, c, g, or t
  misc_feature (1070)..(1070): n is a, c, g, or t
  misc_feature (1078)..(1078): n is a, c, g, or t
  misc_feature (1092)..(1092): n is a, c, g, or t
  misc_feature (1100)..(1100): n is a, c, g, or t
  misc_feature (1105)..(1105): n is a, c, g, or t
  misc_feature (1123)..(1123): n is a, c, g, or t
  misc_feature (1135)..(1135): n is a, c, g, or t
  misc_feature (1139)..(1139): n is a, c, g, or t
  misc_feature (1149)..(1149): n is a, c, g, or t
  misc_feature (1176)..(1176): n is a, c, g, or t
  misc_feature (1202)..(1202): n is a, c, g, or t
  misc_feature (1246)..(1246): n is a, c, g, or t
  misc_feature (1273)..(1273): n is a, c, g, or t
  misc_feature (1310)..(1310): n is a, c, g, or t
  misc_feature (1336)..(1336): n is a, c, g, or t
  misc_feature (1401)..(1401): n is a, c, g, or t
  misc_feature (1406)..(1406): n is a, c, g, or t
  misc_feature (1440)..(1440): n is a, c, g, or t
  misc_feature (1459)..(1459): n is a, c, g, or t
  misc_feature (1462)..(1462): n is a, c, g, or t
  misc_feature (1504)..(1504): n is a, c, g, or t
  misc_feature (1511)..(1511): n is a, c, g, or t
  misc_feature (1536)..(1536): n is a, c, g, or t
  misc_feature (1565)..(1565): n is a, c, g, or t
  misc_feature (1567)..(1567): n is a, c, g, or t
  misc_feature (1584)..(1584): n is a, c, g, or t
  misc_feature (1678)..(1678): n is a, c, g, or t
  misc_feature (1694)..(1694): n is a, c, g, or t
  misc_feature (1773)..(1773): n is a, c, g, or t
  misc_feature (1776)..(1776): n is a, c, g, or t
  misc_feature (1836)..(1836): n is a, c, g, or t
  misc_feature (1850)..(1850): n is a, c, g, or t
  misc_feature (1857)..(1857): n is a, c, g, or t
  misc_feature (1862)..(1862): n is a, c, g, or t
  misc_feature (1884)..(1884): n is a, c, g, or t
  misc_feature (1937)..(1937): n is a, c, g, or t
  misc_feature (1944)..(1944): n is a, c, g, or t
  misc_feature (1951)..(1951): n is a, c, g, or t
  misc_feature (1980)..(1980): n is a, c, g, or t
  misc_feature (1990)..(1990): n is a, c, g, or t
  misc_feature (2049)..(2049): n is a, c, g, or t
  misc_feature (2060)..(2060): n is a, c, g, or t
  misc_feature (2063)..(2063): n is a, c, g, or t
  misc_feature (2072)..(2073): n is a, c, g, or t
  misc_feature (2081)..(2081): n is a, c, g, or t
  misc_feature (2117)..(2117): n is a, c, g, or t
  misc_feature (2171)..(2171): n is a, c, g, or t
  misc_feature (2198)..(2198): n is a, c, g, or t
  Probeset Number=SeqID_13218
tttttttttgttttntttgntttngntnnngtntnncnngnnnncggncggtggcgcgtcatccgtagtcgtnntctcnntncgtccctctntgtcntacntcgtntcngtcgtccttnngactcggcgggggggtgtctggttggtgatgagtgngntagntgnntgtnatgtgccacccannaannaaccanacataaacacaccngaacacgctagtacgtactatactatncatcnccatatcatttgacgatcngtcgatctgtactntattatctatatntgaattgttctcgttgtcgtactatgttntnatgtatgaatttagtattagtgnatnatgatntannnatgattcagtatgatcatatagtagcagtagcaatagcgacgatgaagcaagtaataagtgacggatnatgtagtanatnnatatagtcatgaatcgtatgatgntacgctctgatgagtgatgtattctgactgagagangatatactaaaccacaacncatcanancccaatctctgtagcgacgcgtggcaagcnacgtgtgatataagncngcgtntactgtcactactactatactctactactgttagtaganctgcgctcntagacgcgtgcatgcgattgcgtagatgacgcgtatgagactgntgctgtcttcgtgtcatcgtcgagatatctatattatggtacgacgctattctgatatagttcgtacattacttgatatacttcccatctcactctctagcatatcactatatatcaacgcacactacacancacactatattcatgacatccagacactactantgtacacactngcgatgtagtagtatccacaactancnctactcatgatcagtgatatatatgtgatgtagcatgatgtatatgtcagtgatactctcgtcgacgnnagttngtgtntggtgtgtcggacgtccacangtctangcttacagatagtacgangctctgtcacactatgtatctnattngatgattgagattagtgcgacggcgtgtcttcgtgntgagtgagtnacncncagcgatncagtactagtcgcngatctcgncatantatgatcttaagtgaatngacggggtagcngcangtcactggtnaggtgcaagcactctaccctgtggctncatcgtctcacgctatctctcacacnacatctatatacttacatatatgattataggtcgcgtcatctgnacatacagtgatatgaagagtgtgtanaaagagacaacagcataaatcagctgagtgatcatantaaacacgagtgtgatgaacgtgacntgatgatcgtactgatcgataattgggtgtctgcagtgaccaacgatcgacgcaggactgcgtantctcntgtcatcgacgtgtgtgcgtatgtggttacgtanacttcactactagtacgancancaaacacacactacgcgccgtcgacgacgcacatcatagtcngcttcantaccgacgcaccgtgtcttgtctancattcttgtgttagtagatatgatgcacntnctatctgtcatgacgcncgatacatatgacgatgtcgctgcactcgtgaccgactacgtagttgtatcgtctactcgacagcagcatcatacgcatcgctctctagatcancagccacatagtattnaaacttactataattagcacaaactgtctagatcagctccgacgactatactcatctttcatctacatggtcatgaatncangctacacactctacagctctactcacgtgcactcacgatcgtcagctcatatgtgacgtnatgatacgagacancatcgtngagtnagagtgtgtagtgacagatganacgaagtatgtatgctgcgtctcgctcactgctctgtagtctactacgactcncgacgcngccgtantcgctcgatctcgttactgctgtcgatanttatatacanctcgacatcacgacactgcatgatagtagcagtcataatctagtcgttagctgcagcgntgatgcaacgnatnacatctctnntggatgtnacgtcgtgctgtcttacgagaggactgagtgtgctngtctactagtcgtcacacgatgatgttagcgtagacgtggatgagtgaacacanagtcgctcatcgagctccacatgtcgn

SEQ ID NO: 3440 - DNA, 1756 bp, Glycine max
  misc_feature (1)..(1): n is a, c, g, or t
  misc_feature (6)..(6): n is a, c, g, or t
  misc_feature (56)..(56): n is a, c, g, or t
  misc_feature (79)..(79): n is a, c, g, or t
  misc_feature (92)..(92): n is a, c, g, or t
  misc_feature (99)..(99): n is a, c, g, or t
  misc_feature (101)..(101): n is a, c, g, or t
  misc_feature (165)..(165): n is a, c, g, or t
  misc_feature (181)..(181): n is a, c, g, or t
  misc_feature (261)..(261): n is a, c, g, or t
  misc_feature (270)..(270): n is a, c, g, or t
  misc_feature (333)..(333): n is a, c, g, or t
  misc_feature (344)..(344): n is a, c, g, or t
  misc_feature (397)..(397): n is a, c, g, or t
  misc_feature (580)..(580): n is a, c, g, or t
  misc_feature (685)..(685): n is a, c, g, or t
  misc_feature (793)..(793): n is a, c, g, or t
  misc_feature (1004)..(1004): n is a, c, g, or t
  misc_feature (1095)..(1095): n is a, c, g, or t
  misc_feature (1098)..(1098): n is a, c, g, or t
  misc_feature (1108)..(1108): n is a, c, g, or t
  misc_feature (1114)..(1114): n is a, c, g, or t
  misc_feature (1143)..(1143): n is a, c, g, or t
  misc_feature (1169)..(1169): n is a, c, g, or t
  misc_feature (1284)..(1284): n is a, c, g, or t
  misc_feature (1319)..(1319): n is a, c, g, or t
  misc_feature (1330)..(1330): n is a, c, g, or t
  misc_feature (1419)..(1419): n is a, c, g, or t
  misc_feature (1452)..(1452): n is a, c, g, or t
  misc_feature (1466)..(1471): n is a, c, g, or t
  misc_feature (1474)..(1474): n is a, c, g, or t
  misc_feature (1478)..(1478): n is a, c, g, or t
  misc_feature (1489)..(1489): n is a, c, g, or t
  misc_feature (1504)..(1504): n is a, c, g, or t
  misc_feature (1526)..(1526): n is a, c, g, or t
  misc_feature (1536)..(1536): n is a, c, g, or t
  misc_feature (1538)..(1538): n is a, c, g, or t
  misc_feature (1545)..(1545): n is a, c, g, or t
  misc_feature (1556)..(1556): n is a, c, g, or t
  misc_feature (1565)..(1565): n is a, c, g, or t
  misc_feature (1570)..(1570): n is a, c, g, or t
  misc_feature (1574)..(1574): n is a, c, g, or t
  misc_feature (1579)..(1581): n is a, c, g, or t
  misc_feature (1619)..(1619): n is a, c, g, or t
  misc_feature (1621)..(1621): n is a, c, g, or t
  misc_feature (1623)..(1623): n is a, c, g, or t
  misc_feature (1629)..(1631): n is a, c, g, or t
  misc_feature (1633)..(1635): n is a, c, g, or t
  misc_feature (1653)..(1653): n is a, c, g, or t
  misc_feature (1662)..(1663): n is a, c, g, or t
  misc_feature (1665)..(1665): n is a, c, g, or t
  misc_feature (1684)..(1684): n is a, c, g, or t
  misc_feature (1700)..(1701): n is a, c, g, or t
  misc_feature (1706)..(1706): n is a, c, g, or t
  misc_feature (1710)..(1710): n is a, c, g, or t
  misc_feature (1715)..(1715): n is a, c, g, or t
  misc_feature (1718)..(1718): n is a, c, g, or t
  misc_feature (1722)..(1725): n is a, c, g, or t
  misc_feature (1729)..(1729): n is a, c, g, or t
  misc_feature (1731)..(1732): n is a, c, g, or t
  misc_feature (1734)..(1735): n is a, c, g, or t
  misc_feature (1739)..(1740): n is a, c, g, or t
  misc_feature (1747)..(1749): n is a, c, g, or t
  Peptide Sequence Number=SeqID_6868
  Probeset Number=SeqID_13219
natcangtgtcgcgtcactgctgagacatctagatctatcagtctacgagtcgcgntgtgtcattgcacacgtgtgcanatatcatctgctnttgattntnctccctgtcgattcgccgacattctgtctatttatatttatatgatttgcatttgcactctgtnctatgacgagcaatcnacatgatatatcttcaccacatcactctctgctgctcagcgtgtgaccgacaccctgccatccctagcatgtatatgtgnacatctacncgtgcgcgcgctagcacgatcgctcgtacgattcgacgtgctctctgtcccgcatccgactgncatcaaatctnttatgacacgacctcatcactcgatcagagcttgcgtgcgtatcatacgagcncgcacactctctagtatgcacacagtcttatgtgccgaactattcaaactatcgtgagatatagtagtcatgcagacacactaacattgctactgcactcgacagcactattagtgtatgactcgagttgcatcgcaaatggttactataatataactagccataatataagagttgtgactnacagaagagcgtcatgtagacacttaacgtatcactccgcatgctacgctgtagtgtggcttgtggtatcatcagtggtgcggtgcgtgttgtatataattatantatccatgtgtcatattgatacgtgcgatcaggattcaacgcgataattatgtgtgtcatagtgttcgtccgctgtttaggatagtaagccgagctgcggatatagtntgcgctagccagacatcgtcacgagtctcacgtcgcgcgcacgaccacttcaaccatcatcacactctctactaactatctacgtatgtcacatacacataacagtctcctctcttacatctctatcactgcactccttcatcctcgcgccatgagatgtctaataccagcggccgagcacaggcagcgtagcgtgatgacggaagaagantatatattatataatatgaattatgacacactgtaactaaggattctatgcatcgtattctgttataaagtattatatcagtagtatatantanttagtatagnatatanttagatactaatattgctaatatactctnatgatatatctgtattatctactacntatataatagtgctttagtatatatatgatgtaactgtattatatatggctctctacgtgcgtcaagacctcacactcacagtcgcggacgcgtaccacccacacacctccatcntctcgtgcgctgctcactctgacattacagagacntatatgagtcncatatgaggagtgacggaagtggatgtgggtttgagttcggctcgtcttgttggtcgtctacgctgacgtcttcgccgtcgtctctctnttatgtactcttctcttccgcgctccactcacnccgcgcacctcttnnnnnnttnctcncacaccgcggngcagccgcgcggtgngccgcgatatttatgcaacatntacaagaagnangagaganagaagtgtacnaacacaagncaatnaaanaaaannnaagagataatgtgatgaggatgaagagatagagaagcnanantggggnnnannnagccggcgcctcagtccntgctgggtnntngtgtcgtcagcagctagcnatcctcgcacaagtcnngcacngtgnccacnccnccannnngccnanncnnccgnnccggggnnncccccca

SEQ ID NO: 3441 - DNA, 337 bp, Glycine max
  Probeset Number=SeqID_13220
tggtttcattgggtactcaatggggaagccgctggatccattgccgcaaggacatgccagcgtgtggcataagagtgaggtttcaagtggttgcgggcattcgtcttgggtcaattttattacgaatagtgcttgtgtgggggcaattttttggtggccctttttcaactttcccagagtagttggcataaatgagtatcagtcttgggaaagttcgagcccatatgttttgtgtttccgtgttctgcaatccaatactgtttggctgttctaagtttataaggatttcttctatttggtcggcttggtgctaacctctgttgtattaacgtggtgg

SEQ ID NO: 3442 - DNA, 1542 bp, Glycine max
  misc_feature (1)..(1): n is a, c, g, or t
  misc_feature (20)..(21): n is a, c, g, or t
  misc_feature (25)..(26): n is a, c, g, or t
  misc_feature (29)..(30): n is a, c, g, or t
  misc_feature (32)..(33): n is a, c, g, or t
  misc_feature (50)..(50): n is a, c, g, or t
  misc_feature (52)..(53): n is a, c, g, or t
  misc_feature (55)..(56): n is a, c, g, or t
  misc_feature (58)..(61): n is a, c, g, or t
  misc_feature (64)..(64): n is a, c, g, or t
  misc_feature (66)..(68): n is a, c, g, or t
  misc_feature (70)..(70): n is a, c, g, or t
  misc_feature (76)..(76): n is a, c, g, or t
  misc_feature (128)..(128): n is a, c, g, or t
  misc_feature (190)..(190): n is a, c, g, or t
  misc_feature (224)..(224): n is a, c, g, or t
  misc_feature (359)..(359): n is a, c, g, or t
  misc_feature (588)..(588): n is a, c, g, or t
  misc_feature (625)..(625): n is a, c, g, or t
  misc_feature (638)..(638): n is a, c, g, or t
  misc_feature (690)..(690): n is a, c, g, or t
  misc_feature (694)..(694): n is a, c, g, or t
  misc_feature (750)..(750): n is a, c, g, or t
  misc_feature (753)..(753): n is a, c, g, or t
  misc_feature (774)..(774): n is a, c, g, or t
  misc_feature (776)..(776): n is a, c, g, or t
  misc_feature (814)..(814): n is a, c, g, or t
  misc_feature (861)..(861): n is a, c, g, or t
  misc_feature (864)..(864): n is a, c, g, or t
  misc_feature (886)..(886): n is a, c, g, or t
  misc_feature (915)..(915): n is a, c, g, or t
  misc_feature (964)..(964): n is a, c, g, or t
  misc_feature (968)..(968): n is a, c, g, or t
  misc_feature (975)..(975): n is a, c, g, or t
  misc_feature (1014)..(1014): n is a, c, g, or t
  misc_feature (1026)..(1026): n is a, c, g, or t
  misc_feature (1103)..(1103): n is a, c, g, or t
  misc_feature (1120)..(1120): n is a, c, g, or t
  misc_feature (1146)..(1146): n is a, c, g, or t
  misc_feature (1155)..(1156): n is a, c, g, or t
  misc_feature (1184)..(1184): n is a, c, g, or t
  misc_feature (1193)..(1193): n is a, c, g, or t
  misc_feature (1198)..(1198): n is a, c, g, or t
  misc_feature (1212)..(1212): n is a, c, g, or t
  misc_feature (1215)..(1215): n is a, c, g, or t
  misc_feature (1218)..(1218): n is a, c, g, or t
  misc_feature (1265)..(1266): n is a, c, g, or t
  misc_feature (1270)..(1270): n is a, c, g, or t
  misc_feature (1288)..(1288): n is a, c, g, or t
  misc_feature (1337)..(1338): n is a, c, g, or t
  misc_feature (1376)..(1376): n is a, c, g, or t
  misc_feature (1397)..(1397): n is a, c, g, or t
  misc_feature (1452)..(1452): n is a, c, g, or t
  misc_feature (1461)..(1461): n is a, c, g, or t
  misc_feature (1471)..(1471): n is a, c, g, or t
  misc_feature (1486)..(1486): n is a, c, g, or t
  misc_feature (1490)..(1490): n is a, c, g, or t
  misc_feature (1496)..(1496): n is a, c, g, or t
  misc_feature (1498)..(1498): n is a, c, g, or t
  misc_feature (1511)..(1511): n is a, c, g, or t
  misc_feature (1522)..(1522): n is a, c, g, or t
  misc_feature (1526)..(1526): n is a, c, g, or t
  misc_feature (1540)..(1541): n is a, c, g, or t
  Peptide Sequence Number=SeqID_6869
  Probeset Number=SeqID_13221
ngggcgcccccccccccccnncccnnccnncnnccccgcggggcaccggnannanngnnnnacncnnntngaaccnataatcgctcgccgaaactgaagtggcggcgcgccgcggccccccccctccntcgcgcagctctcacataaaggggcgcgccccctctccccgccacacctgcgcatatatccncgtagcgtgtgcatacgaagtggatgttattgtngtgttgatcgtgtttaacgctgttgcggagtaagagagagcttgtgccagatcattctatcgagcgcgtctgcgaccgggcttctcttgtagtatgcatccttctcctcatcttcctactactcatgatttggcncccgcctaagcatggctcttgcaattactgtgtgcatacctctatctgtctctttctcacatgtctggagggcgggtatgatagtgttggtgtggtgttatgttatatgaagagtggaataatatatgttttgggtgcatccatcctccttcaatggtcctcctgctcttcgtgtggttagtggtaatgtcattatggctgcgcgcacaacgctcgtctcggtgacagncgccgagctagaccaattgtctaggtaatcgagtctncctaatagttgtnctctatgtagtcattgtgtgttgtatttgtgtctaaggcttacttcgtctcntctntcatcttactctcctacgctcttcagctctcttcccttatgttcttgggtgttgtngtntgtgtgtgtgtgggtttatgntntgtaatatttgttgatggcatcctttactacaactcanaatacgaatgcgtggcgcgcgcgttcctcctgtgtggactgcacaancgnagcgcagacaacccatacagantatgtgtgtgtcgagacaagaaagagatngcgcgtacactagaactcgcatgccgccgcgcgtcacgcccactcaacnacgncaccagncagcgcggctccggcgatctgacgcacctacgctaccgngagcggaggtgnatgtgggtggccctgcgtggacggctggccgtcaccctctatgcgcttctacgcgcctcctcctgcacactgtacgncgtgtgcgcacatcatntagtgggcggcgtcatcatgtatgtntcgatctcnnctccgcgcactgccatactgcacgcagnctgagtggntctanataccatctctganctnggnggtgcatgtactacctacagcaagaccgcgtgcatctcacgccgacnngcgncgagcacacaagcacttnacgacatcgtctcgcacgtgtgaggatagaacaagactactatcatcanncagggagagacaacaagtatcagcaagcgagtgtgtgnatgctttagtaacgtctacanagtgtggggccgcgctcctgcgtactgaagcacgttaaacatcaactcgcgactncgacactcntgtgatcacnacacaatttctcgtnatcncgtggntntgtctgcggcgangagctcgtgcngctnatgatgacgaatanna

SEQ ID NO: 3443 - DNA, 520 bp, Glycine max
  misc_feature (1)..(1): n is a, c, g, or t
  misc_feature (9)..(9): n is a, c, g, or t
  misc_feature (13)..(13): n is a, c, g, or t
  misc_feature (17)..(17): n is a, c, g, or t
  misc_feature (27)..(27): n is a, c, g, or t
  misc_feature (110)..(110): n is a, c, g, or t
  misc_feature (117)..(117): n is a, c, g, or t
  misc_feature (201)..(201): n is a, c, g, or t
  misc_feature (216)..(216): n is a, c, g, or t
  misc_feature (251)..(252): n is a, c, g, or t
  Probeset Number=SeqID_13222
ngagaaggngagngagnaagaagaaanaggagaaggagaggcccaggaagaggccccaggcaaccacaaggaccccggcggagccccagccaacgacgccaacgccgggncgcgacncggcggcaaagccgccaacgaaggcaaacgcggggacgacgaggcaggccacaggcgagccggaaaccgcaaggagaacggggnccgcgccgacggcancaccgaggaccagggggcacgcacagcgcaggccnncgggaccctacgtttctacggggagcgcgagttcatgagcgaccggaaccccagcgaagacaagcgcctcaaggacgaagaagtcaacgtagaacgcaacaaagcaggaaaagtgagcgagcacggaagaagaaggaggatcggggaggaatgcagaggaggagacgagaaggcaacggaagaagccaaggaaaggggggggctggtaaaaaaggaacggaacctacgggtaaaagagagggacaaaacggaggaagagcggaaggaa

SEQ ID NO: 3444 - DNA, 1387 bp, Glycine max
  misc_feature (19)..(20): n is a, c, g, or t
  misc_feature (49)..(49): n is a, c, g, or t
  misc_feature (58)..(60): n is a, c, g, or t
  misc_feature (63)..(63): n is a, c, g, or t
  misc_feature (185)..(185): n is a, c, g, or t
  misc_feature (187)..(187): n is a, c, g, or t
  misc_feature (450)..(450): n is a, c, g, or t
  misc_feature (539)..(539): n is a, c, g, or t
  misc_feature (646)..(646): n is a, c, g, or t
  misc_feature (655)..(662): n is a, c, g, or t
  misc_feature (731)..(731): n is a, c, g, or t
  misc_feature (751)..(751): n is a, c, g, or t
  misc_feature (814)..(814): n is a, c, g, or t
  misc_feature (1103)..(1103): n is a, c, g, or t
  misc_feature (1181)..(1181): n is a, c, g, or t
  misc_feature (1202)..(1202): n is a, c, g, or t
  misc_feature (1387)..(1387): n is a, c, g, or t
  Peptide Sequence Number=SeqID_6870
  Probeset Number=SeqID_13223
ggagagaggaggaacaccnntctgccgccgcctcttatatattgcgggnctcagcggnnnggnagtgtgacatacggctctggaacaaaggggcagatacacgccagcccctgggccggtcctactacactctccaccataatatgaaaaatcgcaccaccgccacacagccgggacgaggtggngntggcccgcacatcacaatacaccttcgcgcactcatctctcgaagatataattcctctagtcttgaaggttgtttctcgcactacccggtgtatgtgtatgcaaatagtttatatgatatacatacaccaaccactccccgcagctcgctgctgtttgggagggtgttagtgtccatgctggcccttgtatctccggttccttgtattaataactaaaatcacgcgcgctgcgcagttatgttaattaatctcccgctcgccncgctgctgcgcaatatgccaccaacggcctggcgcctaacaaaacacaaccaccgataatttaacacctatttatgtctgatagttctngcgtctcgtctgtatatatcaggtatatgaggagtggaggtgcggcgcggggacgctcaacaccacggggagactctgctttggcggtcctggtttggttgtatatntattagttnnnnnnnntacaataacaaaactcctgtatctgcgtggaggcgctctcccttatcctgccccagatcaccgctaaantaattgtctgccccccaccnccctctctcagctttgtgtcagtattattatacacctcacccaccacaacacaacccaacaanaccatagattatcacgacatcatcccacggctagataatataaatctatgaaatatcccttctcctttatctctcgttctcgtctgtgtcagtgcgtggcgcgtggcacagcaccaacgcctagtgttcgaggccacgtcgacggcgagtctcggtgtgtgagtcgcgtcttggtgttgtggtgttcatgctgctgcacctcgtcatcgacattgacgatccctggggcgtctaaggcatctaccacagtcacaacacatgactctaacacaccgcacgctctccgccnctgacgagaccaacgtgcctacacacacatgagctgatcagtagacaccgctattatcacacactattgcatcactgncgtgcgccggtgcagtgtggntggtctctggacgtcagcgcaccccaggaggcggcatgacgcaaacatgagcatctcgtctctataccactgaaggacctggagtcttgcggagtactccactgctaacttcctccaaacaacgtatcatacacatcgcagtggtcagtcttgcgacagactccctcactactgcacaccacacn

SEQ ID NO: 3445 - DNA, 1659 bp, Glycine max
  misc_feature (11)..(11): n is a, c, g, or t
  misc_feature (72)..(73): n is a, c, g, or t
  misc_feature (106)..(106): n is a, c, g, or t
  misc_feature (173)..(173): n is a, c, g, or t
  misc_feature (934)..(934): n is a, c, g, or t
  misc_feature (963)..(963): n is a, c, g, or t
  misc_feature (1385)..(1385): n is a, c, g, or t
  misc_feature (1463)..(1463): n is a, c, g, or t
  misc_feature (1492)..(1492): n is a, c, g, or t
  misc_feature (1544)..(1544): n is a, c, g, or t
  misc_feature (1598)..(1598): n is a, c, g, or t
  misc_feature (1627)..(1627): n is a, c, g, or t
  misc_feature (1635)..(1635): n is a, c, g, or t
  misc_feature (1656)..(1656): n is a, c, g, or t
  Peptide Sequence Number=SeqID_6871
  Probeset Number=SeqID_13224
ctcccgccgcncgtactcggatgtcttggtgcggtgtgtgatcgcggtgccgctatatatcatccgcatctnntcaatagccctaacagagatacaggagaggtcncaagatacgagtagagtgcgaggacgcgtgtgcctgactcgtacaaccaaccgcgctcacgagacgncgctgcggggcgtgtcgagggtgacgtccgcgatgagtagtaatgtattatagtatagtcgctgcgcgctgtgtcggtgtgctatgttatctatcttctcgtcgtccgtttcttagagagtctaggcgagatgtccgtgacgtagtgacgacgaaagtacgatgactatggcatagaacacagcgcgcgcaccccacggtgaaaatgattatctacatctgcgttatcgtcgagcgcgcgatgctgatataatgactgatataacagtatgaccgattgagacgagtgctgttcgtgtcgctgtagtcgatgacgagctctatatgtagtgcgatccgacgaagttgaacgtagagattattcttgtgtcgtcgtgcgacgcgcgctgtggactgagatgtggtgaatgttatgcgtcacactctacatggcggtgccgtgatatcgatcttcgtgttaagttgcgctgcggtgagcgttagcatgagagacactcagaacgtggtatatgtcggagagagtcatcacgtcgttcgagatatgcacgcagatgaggtagcggaggacatgatatcggaccgcccgacaccgtctgtgacttgcccactctcgtctcttgtatgctggttgcttaggcgactgcttattctgcctggcgtgtctctgacgccaggtggcctatgctgcagtgatgttgtgacgagagccgatgaggagcacgatactgtgtatgctgtcgtacatgactcagtctctgcttncatgacagcgcggcgcgctacgagcgcanagcgtgtcgtgtgagtggtagtagctacgagtgcagttcgagtgatcgctccgtgtatacgcacgcgatgcacgattgttatcacactgttgatggtgagtgactgatgtgcgcgccactcacgccgttgtgctattgactgtactatctagtgttcgatgagtgtcggatcagtgtgccatacgtacccgatacgctctacatgttatgattgtgagtccgtgaatgacatatgcactatgtctcgtatatgtattgctgatatatacatctcgagtacgagtaccgaagtggccgtcggtgcgtatactaacgcatatcgcatacgtcaggtgtacatcgttcgacgtgatctcgtacccttcggctaccgaatgtgtctagcctcagtatcttcgagtgagtctacatctgcgcgctangtttgtatcatgtttcgacatacgttcattgtactgaagtaaggcgacgtgacgtgatagcataagtatgctctgctntaccagcaatagccagacatgtctgatanaactgctcagacagtacgtcatcaacacactatcttggctagatgctagatnatgtcgcatgcgcgtcgatgtgatatagagtatcacacactgtgaatctgtgcnacgtagtcatgtagcactgtacggttaantccatgantgcttcgacgtcgaatccatnata

SEQ ID NO: 3446 - DNA, 2195 bp, Glycine max
  misc_feature (8)..(8): n is a, c, g, or t
  misc_feature (14)..(19): n is a, c, g, or t
  misc_feature (23)..(27): n is a, c, g, or t
  misc_feature (30)..(30): n is a, c, g, or t
  misc_feature (32)..(35): n is a, c, g, or t
  misc_feature (37)..(37): n is a, c, g, or t
  misc_feature (39)..(43): n is a, c, g, or t
  misc_feature (45)..(46): n is a, c, g, or t
  misc_feature (51)..(52): n is a, c, g, or t
  misc_feature (59)..(59): n is a, c, g, or t
  misc_feature (80)..(80): n is a, c, g, or t
  misc_feature (91)..(91): n is a, c, g, or t
  misc_feature (114)..(114): n is a, c, g, or t
  misc_feature (116)..(116): n is a, c, g, or t
  misc_feature (118)..(118): n is a, c, g, or t
  misc_feature (121)..(122): n is a, c, g, or t
  misc_feature (152)..(153): n is a, c, g, or t
  misc_feature (201)..(201): n is a, c, g, or t
  misc_feature (229)..(229): n is a, c, g, or t
  misc_feature (281)..(281): n is a, c, g, or t
  misc_feature (548)..(548): n is a, c, g, or t
  misc_feature (676)..(676): n is a, c, g, or t
  misc_feature (759)..(759): n is a, c, g, or t
  misc_feature (773)..(773): n is a, c, g, or t
  misc_feature (837)..(837): n is a, c, g, or t
  misc_feature (845)..(845): n is a, c, g, or t
  misc_feature (893)..(893): n is a, c, g, or t
  misc_feature (963)..(963): n is a, c, g, or t
  misc_feature (972)..(972): n is a, c, g, or t
  misc_feature (1020)..(1020): n is a, c, g, or t
  misc_feature (1024)..(1024): n is a, c, g, or t
  misc_feature (1056)..(1056): n is a, c, g, or t
  misc_feature (1076)..(1076): n is a, c, g, or t
  misc_feature (1111)..(1111): n is a, c, g, or t
  misc_feature (1252)..(1252): n is a, c, g, or t
  misc_feature (1385)..(1385): n is a, c, g, or t
  misc_feature (1396)..(1396): n is a, c, g, or t
  misc_feature (1440)..(1440): n is a, c, g, or t
  misc_feature (1601)..(1601): n is a, c, g, or t
  misc_feature (1662)..(1662): n is a, c, g, or t
  misc_feature (1664)..(1664): n is a, c, g, or t
  misc_feature (1731)..(1731): n is a, c, g, or t
  misc_feature (1734)..(1734): n is a, c, g, or t
  misc_feature (1805)..(1806): n is a, c, g, or t
  misc_feature (1838)..(1838): n is a, c, g, or t
  misc_feature (1935)..(1935): n is a, c, g, or t
  misc_feature (1956)..(1956): n is a, c, g, or t
  misc_feature (1996)..(1996): n is a, c, g, or t
  misc_feature (2008)..(2008): n is a, c, g, or t
  misc_feature (2053)..(2053): n is a, c, g, or t
  misc_feature (2068)..(2068): n is a, c, g, or t
  misc_feature (2116)..(2116): n is a, c, g, or t
  misc_feature (2124)..(2125): n is a, c, g, or t
  misc_feature (2128)..(2128): n is a, c, g, or t
  misc_feature (2136)..(2136): n is a, c, g, or t
  misc_feature (2176)..(2176): n is a, c, g, or t
  misc_feature (2186)..(2186): n is a, c, g, or t
  Probeset Number=SeqID_13225
taattttntttttnnnnnncttnnnnnttngnnnntntnnnnnannttatnngtatttnttcttgttatgtaatcgtccnatttgtctatntataatattgtgttaatagtatnananacnnaaacaaaacgacatactcatacagtacgannaatagacaatatgttatgatagtgtaatgtgtgataagagtgtatatntattagacgatattagtagtctactatnctgtagagtatttatgattatgttgatctggacgagagcgtctgttgtttgngttgtgtgtggatatagctgtatgcgtgccttgagatctctattgtctgggcggccggacggcgcgcgcagtgcgcgaggctcggcggccacggcagcatcggcgcggcgcgccgtgcgacgacgcagctcgcacgcggcctctcgctcttgagagcgatagttcatatcttattctgttgtactagtatgtttgcttagatactttcactctactcttctcacacgttgacgacgctcaagcgcgccacggcgcacgctgccgacnaccggccaccgccgcggcgcgcgcatccgaccgcgccacctcgctgcgcacgcgcgcgcagcacgtgaatgtagtcgcggattgtgtgctgggatgcttcgctgactaccgcaccatgcgtatgctgntctcatcctgactagtgcagtatgctctatcttctgcgtgcgtcatgtctctgcagtgcacgtgcgaactacagctgccgctnctcgcagtctatgngtgagtatcatacatctctcgctgaccttgtgatcttctatctatctctgctctctctctctcnctacctcnctcgatatctctgtcagtgcacttccgagcagatatatatatattatntgagagatacatacgattgcgacactatccatgtcgaccatctgctgtcgccacccagcagtcgactccncgcgctacnattcgtatcacgccatggagcgcgacggatgtgacaggagtcataaangagncgtatattgttatcgagcgcgctgatccatcnagtacctactcatgctgctntctctcatccacatactcacgtatgtctctctgcntataacacactgcatcgtatcatatcgtatacgcatatgagatgatatgtacggtatataacagatcagatggagcgcgtatactatatcctctatctggtgactagtataatgtgatatgtgacatctgatctttgatcntactctcacgagccgcgctacccacatacgagctgtcacgtcgtctcacgatctacgcgcctctcgctagccgaccgacgcgcagcgtaattgacgacagctgtactcgtatgctagcaaccttcacctgccnactgtcacgtngtgtctctactcactctgtcccatctacgtacgtcgtatctacnatcgtgcatgcgcatcaactgctacactataactctgctctcgtgactatctatcacatatgagtcgctgaaagtaacctatctcgatgcagtcagtgctctgatcgatacatatgacgtacacactcgactactactgtacatgcatcacgtgacatcantatcaactcacatcttatccagatctatcagtgactgtcagtatcatgatactatagtganancacagtagccgatatactaactgctaccctctacaacatgagaatagcagatcgcagacgcgatcgncgnatcagcgactctgataccggcaacatgcgaagttctcatcactactactgctcatcgtagacgactcatannactcatgtataacctcgatctacgatgtcatnctacccatacaacacgtcagagcactaccatcgagtcgacgtatcctctcgcgctatgcgacgggacactgctacatcgatctattcgatgcttatngtatgtggacgtagctaacantaacagttgcttgtctgagcgtcataatcgagcatcgttncctcatataaanatgtagatgcatagctcgtggtatcggataggattatgtgcgacncaatgtcgttagacntcagtaggcacgtcctatgataacgatacattgatactgtattgtttnatcacatnngancattcatnatcatgcttgtacttactgcgtgttgtctgctgcatcctntacgctgctnctactacac

SEQ ID NO: 3447 - DNA, 1419 bp, Glycine max
  misc_feature (18)..(18): n is a, c, g, or t
  misc_feature (36)..(36): n is a, c, g, or t
  misc_feature (226)..(226): n is a, c, g, or t
  misc_feature (857)..(857): n is a, c, g, or t
  misc_feature (999)..(999): n is a, c, g, or t
  misc_feature (1023)..(1023): n is a, c, g, or t
  misc_feature (1121)..(1121): n is a, c, g, or t
  misc_feature (1201)..(1201): n is a, c, g, or t
  misc_feature (1368)..(1368): n is a, c, g, or t
  Peptide Sequence Number=SeqID_6872
  Probeset Number=SeqID_13226
gggaaaagggggggaacnatatttattaataataanatatgcatattcttatgcgtgtattctattttgtcatgtggggaccgacggcccatccacaatagtcgtgatgggtgcgctatcttcttcgtaggcacagtataactgtaatgtgagagcacctctctttattatagagcagggactagggagagggggtgttatccaatcgcctagacagaggagaganggagacttgtaacgtgatgtcttcgtcgcgtctccatctatgccatatctctgagctcgtagcaaccctcccctgtcacctggcgtgcggggtgttggtcctctcatagaacagtatcctcttgtcaccagagatgattgtatatgaagtaatttaccagatgacgtattctggtcttcgtgaccgccgtgtccaccctgccagcatgcattttctcatctcgttcggcggcgtggtgacattcgggtgcggcgtgtcttgactcgtcttacccgagtatagacgagagcagaacttcatctcgagtcgcgcgcttccgctgtttcctttatcggctcctctcgtcctccgtcttctctggctgtttaccactcatagggtgtttatagaatacacaccacaactatattaacatcttatatagtcaatctcattgccacatcatggagagtgtgaggatgtgtcagacaagatatattccttaggttgtaaatggtatataagtagacgcgcagggcgcggcgagagtggacgagagaacaccaccgagcttgagccgcgcgcaccaccacctctctcactacaattacaactagcggtgtagtcgcgcgaccatcacactatcggtggngttcgggtgccggaccctctatgcggattatcgtactgtatgtgataattcgacgggtgctgggggcgacactgtctacctgcacacatacagcacaactctcggcgtctcttgttcggtgcctgttgtatccagcgacatngtgatagtctctcgctctcctgtngtgtgtttctacatagcgctctggatatcgttcgtggtgcgtagcttcgcgatctctccgtctctccgttcgagaggcgggccgcgtgcgtgagtgtnctcgggtgtgacgaagtatgattgcactccgcttatgcactctctgcgctggtatgtcgctcgtggcgatgtatatactnatcgtgtgtgtgttgtgttatacattggtacataggatgctgtgtgtggcggctgtgtgcgagtgcgtcgtagtcggcgatgctgtcgaagtgcctggcatctgctgtgttggcggcctaatataccgcctcggcattgctcacactaagcacgtccactatatagntacgttatccctctcgctcactctctcctctcatctcctcgtcgccggcaa

SEQ ID NO: 3448 - DNA, 538 bp, Glycine max
  misc_feature (290)..(290): n is a, c, g, or t
  misc_feature (374)..(374): n is a, c, g, or t
  misc_feature (419)..(419): n is a, c, g, or t
  misc_feature (489)..(489): n is a, c, g, or t
  Probeset Number=SeqID_13227
tcaaaccttctttcaccgggtcaccggacgctgctccgatggccgcctcataatcgatttcatcgctgagtcactgggacttccactgctgaaaccatatttgggaatgaagaagaaaaatgttgttgggggagcaaattttactgttattgaaaccacagcattaaacttaagcttctgtgaaaagaagggcatttctatccctacccattattctttgacagttcaattaaattggttcaaagaactacttccttctctctacaattcttccacagactaccataaantagttaaaaactcattatttcttataaataaaattaggaaaaataatttcaactatcttttatgtcaacaaagaagcatagcangaattaaaacatttatgccggatataatcagaacaataactgganctatcaacaagttgattagttgagaggctcgcgcactcatgagtgctaggaatataccatgaagatgtantatgacggatggaacagtgtgtgaaaccataggagaggagcaatataac

SEQ ID NO: 3449 - DNA, 594 bp, Glycine max
  Peptide Sequence Number=SeqID_6873
  Probeset Number=SeqID_13228
gtcactctctgcgcacaaaaacactaataaagagagagacagaaggtaccaattaattagcaaacccaaaagaaaaactcaaccttcttcgtagtagctttcatttgaagaaaccacaaaactctctcaacaccttttttacctcatcattctctctctctctctctttcccttttatttacggtgcttcttcttcttgttgctgactaactaacaccaacttctccaaaaaaaaaagactaatccatggagtatgaccttgaaaaccctcttggaaacttccacgaccatccctgctgcgatgttgcttccctcttcctcatcgaatacgaccacatccctcctccgaactactgctggagtatcaaagacagcgactactacatctctgctagaagagaagatgtcgcttcgatgaccccgcagtcctgcagcttctatcaggcgctcccttactaagctatcatctactaggagcgcttcctcgttaatcaaggaagattgttgccacagccgtggtgaaacaagcttcttgcagcctcttgctgctctccacctgctgagatgatgaaaacagagtactctgccgctgat

SEQ ID NO: 3450 - DNA, 1384 bp, Glycine max
  misc_feature (1)..(1): n is a, c, g, or t
  misc_feature (12)..(16): n is a, c, g, or t
  misc_feature (20)..(24): n is a, c, g, or t
  misc_feature (28)..(28): n is a, c, g, or t
  misc_feature (30)..(31): n is a, c, g, or t
  misc_feature (151)..(151): n is a, c, g, or t
  misc_feature (849)..(849): n is a, c, g, or t
  misc_feature (1155)..(1155): n is a, c, g, or t
  misc_feature (1311)..(1311): n is a, c, g, or t
  misc_feature (1334)..(1334): n is a, c, g, or t
  misc_feature (1384)..(1384): n is a, c, g, or t
  Peptide Sequence Number=SeqID_6874
  Probeset Number=SeqID_13229
nggggggggggnnnnngggnnnnngggngnngtggggtaagaggggtgaggcgcgacgaacaagtaaagtgggagataaacggcgatgtgcgcggtgcacgggagatgtgagggtatgaagggatgaggtgtgataagagggtggcgacgnggtgcgggactgcaggggccgggaaaccgcgatgcgaggcgacagcagagcgacgaggtcacaaacctctttaataaattaacttcgagatttaagtctacatcttctcactatgacgttttcccacgagaggtgaaggagtatagatgatgaggagaaagagaagttagatttaaatataatatcacactccatcaaatttattgcactaaactctctatacgataattaaatactaccatatatcatgaataattataagaatatataataacatcaatataaaacaaatagaggaattataacagtatagttataaataagatgatatgattggaaagagaagtagcgcacgatataagagcgggtgctgacagcggacgcgatagtgtatttaactctcatgcctctgcagctgttgtggcagtgcgcttaactgacttgggataaaggtcgtgtctcgacaatacacaatattcaatataataacgtctttatatatcatgttcttttatctctggggtgtgaggtccattcacacagcgccagcgggtgtgtgcgctaagaggtcttctacgtaacatactggagtactatgttgtcacgacttgtggacttctcgtgtgggtgcttgataaatattagggcgaatatcaaggacaaaatataaagagaggatgtatagcagaaagatgagnagtatggcgtgtagtctaataaaagagagtgtggagtatgtaaatacaattgacgcgacgatagtacagaacgcgtggggaaacagagaaaatgcgttggggtgagggaaatatacccgtgcgatgcgcagtcatgtgatgcggcgcacaactacttactctgtatatctacattacttatctaattgcactctaatcataacattaatatgatcatctacgatggtgtatagcgacggggacgaagagacatgcgacgtggtgcgttgcagctcataatatcatatccgccccgtggatataagnaacttacgagggtgagagtgggcgtatttatatctagatcaccatctccgagcggcgctcacaacgactacacacacgctgcgaacaacgatcgcgtacacagacaacgtggagacaacagagatatcatgagagcacaaacgccacagctcgtancctgacacgacaaagacagtagnaaacacgagcgcaggctatcgtatccaccgatgctgagtgacccagagan

SEQ ID NO: 3451 - DNA, 1937 bp, Glycine max
  misc_feature (68)..(68): n is a, c, g, or t
  misc_feature (78)..(78): n is a, c, g, or t
  misc_feature (97)..(97): n is a, c, g, or t
  misc_feature (149)..(149): n is a, c, g, or t
  misc_feature (160)..(160): n is a, c, g, or t
  misc_feature (175)..(175): n is a, c, g, or t
  misc_feature (223)..(223): n is a, c, g, or t
  misc_feature (265)..(265): n is a, c, g, or t
  misc_feature (408)..(408): n is a, c, g, or t
  misc_feature (441)..(441): n is a, c, g, or t
  misc_feature (494)..(494): n is a, c, g, or t
  misc_feature (508)..(508): n is a, c, g, or t
  misc_feature (582)..(582): n is a, c, g, or t
  misc_feature (584)..(584): n is a, c, g, or t
  misc_feature (634)..(634): n is a, c, g, or t
  misc_feature (667)..(667): n is a, c, g, or t
  misc_feature (699)..(699): n is a, c, g, or t
  misc_feature (711)..(711): n is a, c, g, or t
  misc_feature (772)..(772): n is a, c, g, or t
  misc_feature (955)..(955): n is a, c, g, or t
  misc_feature (963)..(963): n is a, c, g, or t
  misc_feature (1088)..(1088): n is a, c, g, or t
  misc_feature (1149)..(1149): n is a, c, g, or t
  misc_feature (1560)..(1560): n is a, c, g, or t
  misc_feature (1922)..(1922): n is a, c, g, or t
  Probeset Number=SeqID_13230
gctagcgtactgtcggttaatatcgatacgtgataaatacgagatgatgaataatcattggtgagcanctactgatangagatgatgctcgtcgatntggtagttttgttagtgtagtacgcattaatgtaagatgtatatagtagctnttcgtcacgantcgagtcactatcgntcacaaccgatctccttctcggagtaaacgcagcatcgcatatcactntttactggtcatgagcgttgagctacacagcgccacggtgcngtgtgctactggtcgtcaatgttgtgctgcacactagcgctactgtctcgtatgcgtgtcacatgtagtcaacgcatcagagcgatacgtatacgctcatacgcagcatatctcaatgctagtcagtctctcctctctggtcncgcatagtcagcgttccacatgcagagtgtagncaggctgcgcgtcctagctgacgcgatcatatgagtgatgaggaagtagcagnagtcatctcatcantacacgttatctgaatcgctcccgctcgcacggtgtagtaacatatcagcctgatcgtctcttcgatggcttantntatacgaacagacagcgcagagccggtgacgccatgcggccgcagatganagtgagagcagagagtacagcatatagtatcanatctgccgttagtcgcgtacatagatctcatnacaatgtaagtngctgtctagtatgcacgagatcacgagaacgtacgacagcgacgagatagatacatgcgtntcttaacgctctcttgcgtattacttagtggcggacgtcttgcgcggaggacggatcactggcgaggccacataggatatattacgagagacaagtataccgtgtgacaccgtctcgctagccgacgtaagaactgaagtaacgcgacactgcgagctactctctcacattctgatgagcggntctgcacntcgcacgctacgtatgagtgacgtggatcatgttcaggtggctagatcagaacactatactatcacgcgcacgctgtgcacaatgcacaatatctgaagacgacggtggtggtgtatgccattanccatgctacatggcagctcttacagataccatctgaatacttattatgtgctgttatacantattatgtagtcgtcccacctctcatattctcagtgtatatttcacatccatatccattagatgattctaacctgacaaactgtgacgtatagcaaaacaagaggtcgaggtataagatcagactgggtttgagacaagtacatggatacaatacacagagcaattaagcattccagaagtacagagactgcttgcgtgcggttgtcagagagagtagagggaccggagagcattagatctcacagtaacatgcgtgctggacagagacgagatcgaggtaccgtcacatgactctatgcgctacacggcgtacgcagcacctacgcttatcatgctagatatatcgttgctacacgagagacgattacgctacttacggctgcgcattcgagaggtacgcgacgcacaancatcagtatggcggtcgaacgcacgtttgagttcagatagtatctatcgtctccagcccttgctcgtattggctcggttcagtagtggactcgcatctatcagtctgtatcatacatgatcaccactgtcgaaggtagaactgacgaacattctgctggaaggatatatctagcagctcctccgtcatcctcaataaatcaacacagacaagtatgttatgagagggtgggtggaggctgcaccctacatactactccacacgggcggaggagggagcgccccacacaccacacacagagagtgaggatcatcttatgtttaaatattcatctcccgcgctggtggcgaggaaaggaagagngagaggggagagggg

SEQ ID NO: 3452 - DNA, 1885 bp, Glycine max
  misc_feature (1)..(1): n is a, c, g, or t
  Peptide Sequence Number=SeqID_6875
  Probeset Number=SeqID_13231
ncgatcagctacgtaggccccccccccaacaatcaataactttcctacacaaagaaaatgcttacatttacactacttggaaccatctttttgtctctgacatgtgctttgtcatttcaagactacccaatctacgaagagcatcctttccgcagcttggcccctgtccaacattctcaaggccttgctccactcatttatatgaggatcgcggaagacacttatgagccagagtgcagtttgtgcgaaacgggactcttggattatcagtttgatgaattgctcgtcgagaatggagacaatgggttctttggaaggacttatttggtcaccagcttactcactaaacgctctgaagttgtaatttcctttagaggtaccgatgacctttcggatgtcgttcaggatctcttgcttcttgtcaactctaagacaagtcagtttgagagttcagaacaatacttccagaaggcttacaaaatgttcgcaaacaactatgagatctctcttacaggtcacagtctcggtggctgcttcgcctacgttgaagcgagaaagagtggcaacatggctgtcctttttgataacccaggttgcgaacccttccttcctccaggaaactggtctgaatcttgccctttaattactcagtacgtaaaaaatcctaacatgatcaacaatttcggctactcatccttctgtggagagactttcagaattgctccttgtggtaatatggataactacaagtggctcaaattctggagggataactcctataacatccatctcgctatggttatgggctctttcttcagtgtcaatcctttatttttccttgctaaaactgctgttttctttgttctcaacagagaaattagcagtgttttagagggtcatattctcctgaattaccaggagctatttgataataaaactggcgctcctcttctctttgagaaggttgatcatgattcatggagatcatatttctccggatattcttgcttgctaaaggggctctctcataaggaagatactggttttactcctgatccttttgtgaatgctcgtttcaacgaacttctcaaaacaacggacgaggaagaaactaatgagtttgaggaaggattttcttatgagttcagctgggcagttgaagaattgccactgctaacgattctgctagtccttcacgtcatctttgaaattattcccaaattgaggatcaaacatagcacgaagaaccaagatatgacctcaggtggatggttcgatctcggcagctatgaagttaatctaaatgatgttctcaagacaccgctgttggacagattcagaagagtaccaaaatctatgataaactgtttcgttaagaagactctgggagacaagtcggctatgaagataagaaagtctggaagacttgtcagagaaactcttaaaaacagtcttttctaagcccacgttaagcgtaagcgacctatcaataaaatattagcctcttaattaggaacacttttaattattgtctattgactatattgataattagatacctgcagtaatgcagaaactcattccaggcctttaaattgttaattcaccttcttcatctcagtatatcagcatccatctatctatctatttatctatatatacatcccttttctaatcattatattctatgtttatatctggacaacgtccaacccaagcaaatagtttcaatgatcttattgtgtgcatccttctccattcttcttcgtacttgttccttgcctttggttttgatttatatatcaacaaaggacagctgatttgatagtatgctcgtttgacttgatgtcgaagaacatctcttgaaaaaaaaaaaaaaaaaaaa

SEQ ID NO: 3453 - DNA, 521 bp, Glycine max
  misc_feature (66)..(66): n is a, c, g, or t
  misc_feature (158)..(159): n is a, c, g, or t
  misc_feature (179)..(180): n is a, c, g, or t
  misc_feature (183)..(183): n is a, c, g, or t
  misc_feature (226)..(226): n is a, c, g, or t
  misc_feature (322)..(323): n is a, c, g, or t
  Probeset Number=SeqID_13232
tgggcgccattcaaaccggtctttttttattggctggcaagtgaaccggcgggggcccctcttccnccatgtggagaggagctgatttccacaggcacctttgagtggagccgaggatgttggcctgacgcggtttccaaaaagcagacggcggcgtnnggagtcggccaacccctggnnaancacggcagcattgttcgtgcaccggaacgcccggtcttggagnccgagcagtccgctgagaacgttggcgcacaccctcagggttgagcacgttgatggagcactgcccggcgttggccgtggccgtgccctcctcctnnccatggtaatggcgcggaacgacgatgggtggtgtcggcacgacgaccggcggttggcaataggtgcttccgcagccgtgggcggcgacggcggagaggaggaggctcagggcgatgaagagggcagcactgggtgccattgtgattgtgtgggtgtgctagaatgatatagctactccagtgctttgggtttgggat

SEQ ID NO: 3454 - DNA, 622 bp, Glycine max
  Peptide Sequence Number=SeqID_6876
  Probeset Number=SeqID_13233
ccacgcgtccgacagaatataccacgtgatactgatcggttcgcatgataaatctgatgttgatcatacagatagtaccgatatacactcgctaacaacattacgagcaagtcacttacacaggatgcaaacccgcaccttttgctttgcggaggagaatccacactgtataacctgtccaaggcatatactaattcacaattttgatgctttgggcggtaattcgacccgcggggatctgtacgatcatgaaaagttgacgaaagctatcaagcatgtatatgtcgtcatatccacgctagttcacctgcagtcttgccgatcagctcaagatcatcgctgacattaaggaagccgagaatgtaaagaaggcttttccctttcgtaattcggtaacgacgtgagattgtgtccatgcacgaggaagcagcaaaatctgcattagctatcaaagcccaaattcgacgcagcattgaagccgaaggcatcccctatgacgatacgtttccagcaactacttcgctggctattttcttcccacattagcacaaccaggtgcttttgctccacctacacccaaagacaaagtcattatcttgggcgatggaaatcctaaagcaat

SEQ ID NO: 3455 - DNA, 613 bp, Glycine max
  misc_feature (1)..(7): n is a, c, g, or t
  Peptide Sequence Number=SeqID_6877
  Probeset Number=SeqID_13234
nnnnnnncttccgggtgacttaggatttgaccctctgggactttcagaccctgaaggaacaggagggttcattgagccgaaatggctagcatatggtgagataatcaatggtcgttatgcaatgttgggtgcagttggtgcaatagcacctgaaattctaggcaaggctggtctgatccctcaggagacagcactcccatggttcagaacaggtgtattcccacctgcaagaacctacaactactgaacagactcctacacactgttcatgtttaagataacactaatagaatttacagatcacacaatattccaacactaagccaaaccacactctataaacaaacaatacttcctataactaaacaaagatcttataagttctaataaaccagcttatccaagaaaacctttcttcaacccactaatctttaataataataagaagtccttaataaatttgaagctcaaataagtaaacaataaaatattatctatattaacaatcttacattactttattcaagctcttatcacaagtattagcccataccaaaacctcctagatcatttaactaaccccatacacaacaacatcttgaccagtctcaat

SEQ ID NO: 3456 - DNA, 400 bp, Glycine max
  misc_feature (270)..(270): n is a, c, g, or t
  Peptide Sequence Number=SeqID_6878
  Probeset Number=SeqID_13235
ctaattcacagatcttattcactcctctttgtgtcttcgtcgttagctagcaggagaggtttgtgcggctgccatttcgattccaagagctctgaagaatggtgagaatcagtgtgcttaacgacgctcttaagagtatgtacaatgcggagaagagagggaagaggcaggttatgatcaggccttcttccaaggtcatcatcaagtttctcattgtcatgcagaaacacggttacattggcgagttcgagtacgttgatgaccacaggnctggtaagattgtggttgagcttaatggaagactgaacaaatgtggagtcataagtcctcgttttgatgttggagttaaggagatcgaaggctggaccgctcgccttcttccttccagacagtttggtta

SEQ ID NO: 3457 - DNA, 599 bp, Glycine max
  Peptide Sequence Number=SeqID_6879
  Probeset Number=SeqID_13236
ccagggttccatccgcggattggtaagaagcggattatagaaatggtttatttggatatgatttccgggggctaaaaatttcggcagagatggtcagttatagtgagcctctctcccaagtgttgattcttcggaagaggaattcgcgtggtttcacttgggcaacagtttctaagctttggttgtgttagatatcttttcttctatcggagctaatgtgggagtttccagttttcatctacctttggatacttataaacggtaatcgatataatcagagcgtcgttgagaacatgtacactcgccaatgctttggagctggatactcgccgggaaagttctgaggaggaggtttcgcggcggtgacggcttcattatttagagtggagagtgtagtaatcgtcgaggatataggcggtgaggaggatctcgattagggcgatgaggagaggggagaacctggagggagaggatgagtcttcttcgtcgagtaaggaaggaggaggtggagcgaagattaggtatcgccattacgggcagttgatattgcagactccttgagtacagtcgttgtatgagtcgtattgtgaccatgagtt

SEQ ID NO: 3458 - DNA, 1454 bp, Glycine max
  misc_feature (1)..(1): n is a, c, g, or t
  misc_feature (167)..(167): n is a, c, g, or t
  misc_feature (759)..(759): n is a, c, g, or t
  misc_feature (1023)..(1023): n is a, c, g, or t
  misc_feature (1111)..(1111): n is a, c, g, or t
  misc_feature (1235)..(1235): n is a, c, g, or t
  misc_feature (1351)..(1351): n is a, c, g, or t
  misc_feature (1354)..(1354): n is a, c, g, or t
  misc_feature (1360)..(1360): n is a, c, g, or t
  misc_feature (1368)..(1368): n is a, c, g, or t
  misc_feature (1370)..(1370): n is a, c, g, or t
  misc_feature (1374)..(1374): n is a, c, g, or t
  misc_feature (1379)..(1379): n is a, c, g, or t
  misc_feature (1384)..(1386): n is a, c, g, or t
  misc_feature (1388)..(1394): n is a, c, g, or t
  misc_feature (1400)..(1401): n is a, c, g, or t
  misc_feature (1404)..(1404): n is a, c, g, or t
  misc_feature (1414)..(1415): n is a, c, g, or t
  misc_feature (1418)..(1420): n is a, c, g, or t
  misc_feature (1432)..(1454): n is a, c, g, or t
  Peptide Sequence Number=SeqID_6880
  Probeset Number=SeqID_13237
nctagtgagtatgtggggtgatataatcgatgctatatacggttgtggttgcgtgtgagtccgacatcagtggatagcggtgatctcgggcggtgaagtgtcggcgcatattcgatcgcgcgcacgaatagacgtcatgttacgaatgtcttgtcacaacaacgcantctctgatacgtcgcctaacctacttatgcgcgggcggcggcgggtagagtacgtggctgggttatcttgagtgctaacaatgggtggggactctgcacgatgtcatcccatccctcatcaatactctcgcgtcctacaagcagagctccaaatgatatgcgccatctcccggctccacctcctctcacacgataatccttctcccacacaagtctctcaatacacatctgccacagaatcaacaaaaagactgaacatcgatcgatatgacagcatagaatagagtttatatgagaatggtcgatgacgcaggcgcaacgcgataacgcgagtagtacagacggccgtgagcgtgccaattcttactgtctctatagcgttgatacgcaccattcctctgtcacatactgcagccgcattcgatggtagattgtgcgccgactcactcaactccgctcacaagagatagacgtgggaaggggcacggaggtgttggtgtcagcacagaagtcgtataatagcagcgtccctctcgctccacacaaccgcgcggatcaagaacgtaacagacatagaatgagtgatgatagngcaaaataaaagaagagatagaggatggcgtaagaaagaacagaatatattatagtgtacaataacaataataattgcagaaattcatatatagatataacacatactcagagaattacagaataagaaaagaagaagagaataatagaatataataagatagagaatatataatataacataaagtaagcaagattgatgagagagagagacataaacgaaccacaacctgccagccccggacatgccgacacgcgcacacgngtagaggtgacacaacagcctcatatccttctactcacaaacagactcttataaatataccattatgttcttcgctctctttctaacntcacatttcattctccttttgttgttgcggggaggccgagaaggaggcgcagggagcgtgaggcgaggggagcggatgagtagagagaatgtggatagtagagagccgacacaccactcaccanccacacaccatatccttacactaacacgcctcaatcagaactatcaatacactcttaacacaaacaccacaaactcagaatcacataataaacaccatcaatctcataatcatatnatnacaccnaatattanangatnataanacaannnannnnnnnaatganngangaaggaaaannggnnnggggaaaaaaannnnnnnnnnnnnnnnnnnnnnn

SEQ ID NO: 3459 - DNA, 1733 bp, Glycine max
  misc_feature (57)..(57): n is a, c, g, or t
  misc_feature (60)..(60): n is a, c, g, or t
  misc_feature (69)..(69): n is a, c, g, or t
  misc_feature (100)..(100): n is a, c, g, or t
  misc_feature (106)..(106): n is a, c, g, or t
  misc_feature (208)..(208): n is a, c, g, or t
  misc_feature (221)..(221): n is a, c, g, or t
  misc_feature (249)..(249): n is a, c, g, or t
  misc_feature (312)..(312): n is a, c, g, or t
  misc_feature (331)..(331): n is a, c, g, or t
  misc_feature (375)..(375): n is a, c, g, or t
  misc_feature (660)..(660): n is a, c, g, or t
  misc_feature (1369)..(1369): n is a, c, g, or t
  Probeset Number=SeqID_13238
gcagacagcgcatacagatatacgagtcactcacgtataaacatagtacgtagtctncantgtgtgagntggacagctcagacagtgcggcagtcatgangacacntagcaatcatgagagtcggcgagatcgagttgagacatcatatcggcatccgcatactagtcacagagaacggcagatgcgcggtgcggagcagcatgagangataccgtacgtngcggtgagtcaacagctgcatatatcanagactcagatgcagcatgtcgtatgcgtagatactatatccatagtatccacatggcgaatgngttatatcgtgagtacacntgtgtgtagatgtgtcgacgtgatagtgacactccgcctgacancattgaatatgctactgcgccaagcacggtcgcagagagattcttagctcgtagcagctgaggcgcgcgtgcgggcagtagtgaacatagtggtgtgctcgtagcttggatcacgatcggctcgattctactgcaagacgtataatgtgcgacgtcgtcatgtcggcagatgatgcagtagcaaatcacgctatgcgcacagatatgctacgcatcccacgcaaatacaatcagtgatatctttctgtcagcgccaatgtactagatccaccaccgagcgtgcgncaatagggacggtgcaattgaaggacacggtgtggtgcaagactagaacgtcgagtactagatcgagtcgcaagatgcgtgagtacaacacacaacatcacggtatgcgccgagacaagacgcgtcatctcagagagacacacagagggaagagtgcgcatgagactcgaactagcctagcgagtctaataatgttggctaagccgcgctgcagcgcggtacctgtgcgtaatcgagctgcgtagtatatcagcgctcgcggcgaatagtacggtgcacgcgagccattacagcgaaccaatcgtgtctggggcgatgctcgtgcggagacgacagatcatgctgctgcgacgcacgtatatggtatactaataacgtacagtcgagaggtcgtcttggcgagaccacgcctcgattaatcatgaggcgtcaacttggtgcgattatgtgagcgtcgcggttgtcagacgacgcatgcgcacacagacagagcgaagaggggacatacaacaaatcacagcgtggcaagagagaggcacccactttaggatgtagagtgaaagggcgtaatatcttgagtaagagggatatttgtacatatatccggaggacatgcgtctgcatactgacgacgcaaatgcgctgagcctccattatcatagtctgcctctatattcacagggtaagttttgtcctaactcactgtgcntgtcattgattgtacatcgggtctcttagaaatgcaacaacgccccccagagatcagacgacaacatgtactatatagatcagtctctgcgcgtagctagtgaaggctgtggcactgaactctaggtgctctcgcgagcagcttcttactctcgcggtatttttggttatggagaagatctacaagagggacagggaggaaatagcgatggaattacgcgcactcagcttccgcgggaactacacctatatattacgaaggcgcggcgcccggtccggggggtgagagtggctatatcttaagtagccgttggggcagctattgtgtcagtgtagtagggctcgcagggtaggtagacactacg

SEQ ID NO: 3460 - DNA, 1819 bp, Glycine max
  misc_feature (1)..(218): n is a, c, g, or t
  misc_feature (336)..(336): n is a, c, g, or t
  misc_feature (588)..(588): n is a, c, g, or t
  Peptide Sequence Number=SeqID_6881
  Probeset Number=SeqID_13239
nnnnnnnnnnnnnnnnnnnnnnnnnnnnnnnnnnnnnnnnnnnnnnnnnnnnnnnnnnnnnnnnnnnnnnnnnnnnnnnnnnnnnnnnnnnnnnnnnnnnnnnnnnnnnnnnnnnnnnnnnnnnnnnnnnnnnnnnnnnnnnnnnnnnnnnnnnnnnnnnnnnnnnnnnnnnnnnnnnnnnnnnnnnnnnnnnnnnnnnnnnnnnnnnnnnnnnnnnnaaagctgccctaagcttactcctggagcagcagcagcatgaagtctgacgatgattttgacacatacggttagtagctcgtcagtgtagccagtatagtgcttcaagctgctgtcgcngaaacggctcattcatagggtacactgaggcatcaatacagcagaagcagcgattagacaagagtcagtaaaagatgacagtaggattgtggatcaaagatacttcagcaaggaaatatggcatgtgtaacatctccataacaggtggagtggagccttcgatatagcaatccaggtaagccctaggatgttggaactgttaagtactattcaagcttcctaagagatggcttctccatcatcaacacctgnttcactgacataagcaatgtctgataagcacacaaagtcattaacctgtaggaagcaatatgaccattcttgcttatgtcagaaattctttgtcctggggcagacttgtcaaagagacaatttcatgactgcaatcagccttctgttcgtgactttctctgacttatacccagtggaaacatatttggcaacattctaggaattgcaggatttgccccaatggcatgacctgcaaacagagcagtgatggtgttgaggacgtgaagcgcaatgacgaggtcaccgggctccgccaccttagtcacctttcggtcaccgtctccatcgccaattaacgtcaacggaagagtcgctttgttcatgtcgcagtttctctctctccttctccgatatgaattaaacgcagaaaggaaagggaaaaaatgagggatccggtagaagagttatgattagtcgttggtttgaacgcgaatgaagcggatccaaaagaggaagcaatgaagatcggtgaactgaatcgaagtggaacaagactagcaaattccaggttgaaaagagaaattttatgttcagttgttcaattggttttgcaataagagggaaagttacaaatagcagaggatataaaaatagatttggaggtcgttactcaaagtcatttggttcgctttcacgaagaaggaggagaagaaagagaaggagaaggagaaggagaagaaggggaggaagagtattggcatgacggagaggttcaattgcagggccaaggatttgtatgaaattttgatggatgagaataggtggaagggttttacacagagcaatgcgagaattagtaaggaggttggcggtgagtttagcatttttgatgggtcggtgaccggaactaatttggagttgcaggaggctaagttaattgttcagagatggaggtttgggagctggaatgatggagttcaatccacagtgaggcttgtgtttgaggagcctgaagccggtgttacggttgttaagctgacacatactgatgtgcctgaagaggataggtatgggaatgctaccgtggtggagaacacggaaaggggatggcgggatcttattttccagaggatacgtgcggtttttggttttggaatttgatatttttcttgttgtatttcctgcgttgtagaattcgcggattttgacatttattagtaaggaacgattaatggattgttgacattattgg

SEQ ID NO: 3461 - DNA, 551 bp, Glycine max
  misc_feature (12)..(12): n is a, c, g, or t
  misc_feature (17)..(17): n is a, c, g, or t
  misc_feature (21)..(21): n is a, c, g, or t
  misc_feature (48)..(48): n is a, c, g, or t
  misc_feature (61)..(61): n is a, c, g, or t
  misc_feature (65)..(66): n is a, c, g, or t
  misc_feature (72)..(73): n is a, c, g, or t
  misc_feature (94)..(94): n is a, c, g, or t
  misc_feature (110)..(110): n is a, c, g, or t
  misc_feature (114)..(114): n is a, c, g, or t
  misc_feature (362)..(362): n is a, c, g, or t
  misc_feature (365)..(365): n is a, c, g, or t
  misc_feature (368)..(368): n is a, c, g, or t
  Peptide Sequence Number=SeqID_6882
  Probeset Number=SeqID_13240
ggagtccccggncgggntggnccgggccggcttcctagaaacttaagntggggatcccccncggnngggggnnccttggggcccaagggggggnaaaatttttcccgggnccancgcggaaagaggaaaccccccatttttttggggccccccccttttaaaggaaaaaccaattccccctttaaattccaaaaaaaaaatttgtattgtggaaaaggccccttctctaagaatctgaaacttggtattcatgaggattctcagaacaagacaaaacttgctgaattgctcaggtatcactccaccaagagtggtgatgagatgaccagccctcagggactatgtaccccaggatgaggaanggncanaatgacatctactacattactgggtgaaagcaagaaagctggttgagaatttcccctttcccttgaaaaagcttaagaaagaaggggtttccgaggtttcccctacatggttggaggcttttttgacccaatttggctgggttgggccaccttttaagggaaattttgggggggaaaaaaaat

SEQ ID NO: 3462 - DNA, 1770 bp, Glycine max
  misc_feature (94)..(94): n is a, c, g, or t
  misc_feature (175)..(175): n is a, c, g, or t
  misc_feature (204)..(204): n is a, c, g, or t
  misc_feature (216)..(216): n is a, c, g, or t
  misc_feature (240)..(240): n is a, c, g, or t
  misc_feature (246)..(246): n is a, c, g, or t
  misc_feature (461)..(461): n is a, c, g, or t
  misc_feature (466)..(466): n is a, c, g, or t
  misc_feature (547)..(547): n is a, c, g, or t
  misc_feature (610)..(610): n is a, c, g, or t
  misc_feature (660)..(660): n is a, c, g, or t
  misc_feature (669)..(669): n is a, c, g, or t
  misc_feature (708)..(708): n is a, c, g, or t
  misc_feature (775)..(775): n is a, c, g, or t
  misc_feature (804)..(804): n is a, c, g, or t
  misc_feature (827)..(827): n is a, c, g, or t
  misc_feature (1460)..(1461): n is a, c, g, or t
  misc_feature (1485)..(1485): n is a, c, g, or t
  misc_feature (1488)..(1488): n is a, c, g, or t
  misc_feature (1501)..(1501): n is a, c, g, or t
  misc_feature (1562)..(1562): n is a, c, g, or t
  misc_feature (1619)..(1620): n is a, c, g, or t
  misc_feature (1639)..(1639): n is a, c, g, or t
  misc_feature (1723)..(1723): n is a, c, g, or t
  misc_feature (1735)..(1735): n is a, c, g, or t
  misc_feature (1739)..(1742): n is a, c, g, or t
  misc_feature (1744)..(1744): n is a, c, g, or t
  misc_feature (1746)..(1755): n is a, c, g, or t
  misc_feature (1757)..(1757): n is a, c, g, or t
  Peptide Sequence Number=SeqID_6883
  Probeset Number=SeqID_13241
gacgagcagcgacgcagtcgaaggcgagagcgagggcgatatacgtgcgttctgtggtatctcgcgtcgccatatctcgtccgcgtgcatatantttgtgtcggatacacatgcctgtcgtgtgcattacaggcatcagacagcacgcatgtgatcagagtatctacaccggtgngagactgatagaacgatgacgtagggagngatagcaccggnagacaagaatgtatcgaatgtagnacgatngcgaatgtacaatattgtgtagtgcgtgaggaccggtcagatgtgcataagcggtacagggatgagggagaggtagaagacaggtctgtatagactacatgacacatgtagtcagcacgtgtcgcgagatgtgtgtatctcatcgtcaaacgcgcgccagctcactcagagaagacctcgtatatatatgcgcggtaggcgtagaggcgtgcgcntagtnatatgtgcgagggaaattgcgtgatatctgtgcgagcgttgtgcgtcgttgatgtttactgagtctcacgtgtgactatantattctcgatctgacgtgctggatgtcgagaacgacactctccgcgctcgcgcacaccacgangctcgctcagcgtctgcaccgtcggcgttgatagtgcataacgtgaatancatatcgtnaatacatggcgtggcactcctagccgatgttatccatgncagtacacgcgtatcatggtagtccactcgtgctccaccacctcatgctcgcatactcgctagaccnctcgcaccgctatcatccgtcatagtgcncccctcacgcgctgctgtaccgngcgataataagagatatatgataggtggagtgctgtagttatagagatgtagatggtgtgaccatctatcgaagttagttggtatgctctatcttgatctccactgagtctcgcgtttacatgagagggtgggtggtcataacacatcgcgtgtacccttcaatatgttggtatctacctatctgatcgctgtaacgccgcagccatcgcccgagacaaactacgtagatccatcgctgcgaggaactgtgacaacgcataacaatacaccatatagcatacggctcacgcactcgagtgctatcattcctcgctagcatcgagttgggcggcgggtacaaacatatcgagaggggggaacggcgtgaggggaggcgtggggctgagagaacataccactatcaaaaccatagccagcctccacacaccaaccacatcttgtagtacattgtgtgggtgctggatattcgtgcttttctgttcttgatttgtcgtaggttgacttaggttttcttgatggttgtgtggagagagctctgagcttcatcgtataaattgtcctactttatatttactatatatctctgttgtctggcacgctatccgatccgacgttcgtcagcacgaccaacnncacacacacaccacacgaccacantgnacagccagtcacngcaccacccttgtttcgacgcgacacttcgtgcctcgtgtgttggccgttatggtaggatngagtatagttgtggatagtgatgagaggagaagggaacgcctggtgcaaataggcannagggggtgcgctaggcacnttaactctaccttttcctcgccgctcgtgcgaccgtccgtccggggtgggcgtcacgaggggtgcttgcatgagggatgcaganagaagaggggtngagnnnngngnnnnnnnnnngnagggggagggggc

SEQ ID NO: 3463 - DNA, 492 bp, Glycine max
  Probeset Number=SeqID_13242
ctagccggctagacctcgcgatccaatccacatctaacccacccgtagagatttcggcggccgatgtctccgctgtcgccgccgcggtctccacgccccctctcctactagcagtcagccagcaacctccctcacagcctaaaaatccacgccgtaacgacgactcgagggtcggacggcaggcggccatgagcagcgcgttcagcgaggagatactcgccgacaagctcgccaagctcaacaacacgcagcagtgcatcgaaacgctgtcgcattggtgcatttaccatcggaaggatgcagagctaattgtccaaacatgggccaagcagttccataattctggaaatgaacaaaaggtccctttcctttatctggctaatgacatcctacagaacagtaagcgcaatggcaccgagtttgtagaagaattctgggaaacatagctccaagttgaaattgatggacatcactgagccctttgcgttgaga

SEQ ID NO: 3464 - DNA, 1723 bp, Glycine max
  misc_feature (15)..(15): n is a, c, g, or t
  misc_feature (20)..(20): n is a, c, g, or t
  misc_feature (35)..(35): n is a, c, g, or t
  misc_feature (58)..(58): n is a, c, g, or t
  misc_feature (62)..(62): n is a, c, g, or t
  misc_feature (107)..(108): n is a, c, g, or t
  misc_feature (121)..(121): n is a, c, g, or t
  misc_feature (150)..(150): n is a, c, g, or t
  misc_feature (152)..(152): n is a, c, g, or t
  misc_feature (173)..(174): n is a, c, g, or t
  misc_feature (191)..(191): n is a, c, g, or t
  misc_feature (197)..(200): n is a, c, g, or t
  misc_feature (203)..(203): n is a, c, g, or t
  misc_feature (210)..(210): n is a, c, g, or t
  misc_feature (218)..(218): n is a, c, g, or t
  misc_feature (221)..(222): n is a, c, g, or t
  misc_feature (238)..(239): n is a, c, g, or t
  misc_feature (241)..(241): n is a, c, g, or t
  misc_feature (243)..(246): n is a, c, g, or t
  misc_feature (252)..(252): n is a, c, g, or t
  misc_feature (255)..(255): n is a, c, g, or t
  misc_feature (257)..(257): n is a, c, g, or t
  misc_feature (259)..(259): n is a, c, g, or t
  misc_feature (262)..(262): n is a, c, g, or t
  misc_feature (264)..(264): n is a, c, g, or t
  misc_feature (270)..(271): n is a, c, g, or t
  misc_feature (273)..(275): n is a, c, g, or t
  misc_feature (277)..(277): n is a, c, g, or t
  misc_feature (460)..(460): n is a, c, g, or t
  misc_feature (763)..(763): n is a, c, g, or t
  misc_feature (828)..(828): n is a, c, g, or t
  misc_feature (946)..(946): n is a, c, g, or t
  misc_feature (1126)..(1126): n is a, c, g, or t
  misc_feature (1229)..(1229): n is a, c, g, or t
  misc_feature (1271)..(1271): n is a, c, g, or t
  misc_feature (1432)..(1432): n is a, c, g, or t
  misc_feature (1541)..(1541): n is a, c, g, or t
  misc_feature (1663)..(1663): n is a, c, g, or t
  misc_feature (1719)..(1719): n is a, c, g, or t
  Peptide Sequence Number=SeqID_6884
  Probeset Number=SeqID_13243
tcccccccctcctcntcctngcccccgccgtcgcncgccgcctgtttcttgttctctntttnttgtgcccttttcttcttctcgctggtgggtgtgtcccccccccnncctccgccgccgntcgcgccacgcgagccgcatcccggcgcngngcgcgccgcgccccaccgcgnntctatgtctggtttctnttgttnnnntcnctcattntcctcttntcnntgtccttgttagcgcnncncnnnntctctnttntncntcncnctttcnntnnntntgcattcttcgttctctctcgtctatcttgcgatttctcttatcgcgtgtatcatagtgcctcggccgcagtctgaacgagcatgatgctgctcatgatgcgtggtcggctctcaactttctttacagccttacacattcctctcctctacgtctattattactatcctatctgattctcatntgccgttattgtagttctgtcgcggtcttatcgatatcttatcctggtgtgattgtccgttcactgcacctgaatacaaacatacgatcctccaacacatctccaacccacaaacctctccacatcactctagaagtattatgtattaatatatatacttagagattgtatgttttgaccatgacgagtagaatattctcattgtacagtctctacggcaaccaatcacacacaaatataagatatactagtatttttatatagatatactgtcgtctctcctcctcgccctccacacagtangtgcttctctgttgtacttgttactctatcctgttcgtctttctgtctgttcgtgttctcgccgncacacgtcctatcttctctctggctgacacatccgacgtatatgacatgcgatgtgcgattgctagacattcgtgttcgatgtcctgtgagcctctacacatcttatctatctctttntactctcttcctatctgtattacactcacacacttccactctatcactagtatattgttactaatagctgtctagttgagcacttggtgtacgtgatatctctatgccacacccacacaccccacctcttcagccgcgtccagatctaccacgctactacatgactcactacctctattnaatatcgatatgagtcgtgctgaatgagaatgagtgagcgactgatcacaggcatgtgatcgatcagtacatactactagcatatctatctatagtcacctanatattactgctctactccgcgctccgtccctccgcgccctgnccggtcgccctctgtgtacccgcccccccccacaccttctactctctcctcttcacatcgtgtgattgtctgtccttcgctgtatatgacggatagcggtagatatatagatatatttctatctttgatctctatctctatagatactgtccatatacaanaccgaactaacatatcaacacgtctgtctctctcgtctgtcgtgatagtactctgtcgagcatctgtgtttgtgttgttgtctgtgttatgtgtgtatacgtatgcctntataacctccagtctacatgatgtaatcgtcgacgctgtcgttgacataccaagccggcgcatacatgaagtagtctgttatgttgcagttatttgaagagtcgcgcctgcgaccttgatantcacacgatagcacattactacgagtgtttattgctgagatgctatgtgtacttantact

SEQ ID NO: 3465 - DNA, 1696 bp, Glycine max
  misc_feature (24)..(24): n is a, c, g, or t
  misc_feature (43)..(43): n is a, c, g, or t
  misc_feature (46)..(46): n is a, c, g, or t
  misc_feature (57)..(57): n is a, c, g, or t
  misc_feature (102)..(102): n is a, c, g, or t
  misc_feature (143)..(143): n is a, c, g, or t
  misc_feature (150)..(150): n is a, c, g, or t
  misc_feature (189)..(189): n is a, c, g, or t
  misc_feature (225)..(225): n is a, c, g, or t
  misc_feature (320)..(320): n is a, c, g, or t
  misc_feature (323)..(323): n is a, c, g, or t
  misc_feature (331)..(331): n is a, c, g, or t
  misc_feature (340)..(340): n is a, c, g, or t
  misc_feature (364)..(364): n is a, c, g, or t
  misc_feature (404)..(404): n is a, c, g, or t
  misc_feature (638)..(638): n is a, c, g, or t
  misc_feature (1442)..(1442): n is a, c, g, or t
  misc_feature (1587)..(1587): n is a, c, g, or t
  misc_feature (1661)..(1661): n is a, c, g, or t
  Probeset Number=SeqID_13244
ccccacacactgcgcgtgcatatncacactcgcgatctatatnatnaaactaatccntcatacgccgtcgcgaccttcgaaggcgcctatcgctaaatatancacacgctcgtgctcgctattactatccagctgcgcgacgnaccagcnccattcgtagcccagccttcatattatctacacgatacnacgtgcgccgcgcccgctctgcgtcgtcgatcacantaattacgctcgacgcggcgtagactaacatatctcgacaagtgtgatgaggatcagcaggtatatcataagatatttacacgtgcctgctcacnaantatcgccngcgcacgcnccagtactcattctgtcccggacncgtctacatatacaccacacacccgccctattctccgtcntcatagcagcgtcactcgtataatcatttatagatagtcgcggtgtgctcggccccgaccgtgaatatattattatatatgcgcgcgcccagacgtcataaataatcagtgaccgccgccgcggctactgtcacgcacatatattaattctatacattccgtcccacactccctgtgcgccgtctctactttctcgctccgtttattatattcttatatatctatatactaatntagacgcacctgagccgcgtagcgcgtagtcttcacgtgctctcatacagcatacaccagcacgcgcgcatttataaataatcattatctatctcctactccatcttcacgcctactctttccagctgccgccgtaaacaacagttgcaagcccctgtctctcaactcactttcgcgctactaatttactgcgactcgcactacaatacatatagctacctcatatcaatgcggcgggccgcgagtcgctatgatgtcgtattgcgcgcgcgatacaatacatcaccgcgcgacacatcgtgctcaccagctctgctccttcaagcgtcatatataataacgatcaaatattatcgcgcgcgcgcggcggctattcgcttatacaacaataatccgcggtaataacgacgcgcgcaccataatatatacgcttcgcccgcgcatcatcatatcgtcgcgtccactctaattcacctgtaaatatctacatccgtcactcgcgtgtacgcgactcataatcaacatcgaaccgcggccattataacacacgcgttggtcgctaatcacaacgttaaatatctgtatcttgccctccttctctcattctgttgatccatagtgttgcgttatggtataataatataatcaattatactcgggtgcgcggtctaatcgtcataaatacaccataatgtataaacgcggcgctcgaaaaacggccggtgcggccaattcacgcatattctatatcttccacacgtgtctcttacacacatcctcgcgtcgggagtgtctcttacatancagtcctctatatcagtcgaccgctagtcgcgacataacaccactcaaaacaaaacgcgggccgcttattatcataagcatatatagctttgctagcggctgtgtctaccccttctttttgaggaaatacggcccgccggtcggnggcgcctctccccgtcctcgctcatatctcctctcataccccgctccacacacataataccttaaatctcacancacaccatctaacctcccgcctgctctcctctcat

SEQ ID NO: 3466 - DNA, 449 bp, Glycine max
  Peptide Sequence Number=SeqID_6885
  Probeset Number=SeqID_13245
gtgaaaaaggagagatggcagctgcaacatctagtgctgtgttaaacgggtttggatctcacttcttgtgtggaggaaagaggagccatgcccttcttgctgctagcgttggagggaaagttggtgcttctgttactcctaaaagagttattgtggcagttgctgctgccccaaagaagtcatggctccccgctgtcaaaggtggggggagtttcatatccccagcatggcttggtggcttcctccccggtggctttggttcttgccctctgtggcttgggtgcgcgccggtatttctggcctggggttcgtcgtctccctctcttccggggggctggcctgtggtggccttgtgttgctttcccttcgggctgccgtgcgctttggtgctttggctcgggctgggccgtgctcgtggccccgcgcgtttctctttgggccttctcttg

SEQ ID NO: 3467 - DNA, 581 bp, Glycine max
  misc_feature (572)..(572): n is a, c, g, or t
  Peptide Sequence Number=SeqID_6886
  Probeset Number=SeqID_13246
tcagctacgtaggccccccccccatggcccgtcaatctgctaggcctcaacttggacagaacaggactatccctgcgtcgacacgaggcttcgctaccacagcatcacgctcaatggacacgactaaccccaacccgccatacggtatcaagcacaagcacatggactaccccgccaaggttgcgttgattggtgcgcgaggatacacagggcaggctcttattgagctgcttaacaagcaccccaacatggacctgcgccatgtgtcatcacgtgaactcaatggcaagaagctcgaaggttacaccaagcgacaaatcacctacgagaacctgtcagccgaggatgtcgagaagatggccgagaacagcgaagtcgactgctgggtcatggcccttcccaatggcgtatgcaagccctttgttgatgccatcaacaaaagtggcaaagacactgtcatcgtggatctgagcgctgactaccgtttcgacgagacatggacctacggtctaccggagctgattgatcgctccaagatttctgacgctacacgcatcgcaaacccgggttgntacgccact

SEQ ID NO: 3468 - DNA, 1027 bp, Glycine max
  misc_feature (1027)..(1027): n is a, c, g, or t
  Peptide Sequence Number=SeqID_6887
  Probeset Number=SeqID_13247
aagcttcagacagattcgtgagttgtctctcttcgaaccaaagctcctttttgttctcgagagatgtctgtctttgacgattccttcgttatactcggagatgacgcatctgagtctgttccagtctcaggctcattcgacaccactactgatcactccttctcagcctacgacggctctggtcaagtagatgactccatcgacgatgttttcgcggcgccgtcttccgactacgaagcttactcgaacggagacgacgtcttcggatccaacgggtggacacgacgggcccatcttgccaccgccgtcggagatggaatctgatgaggggtctgctcttagagaatggagaagacaaaatgcaattcaacttgaggagaaggagaagaaagaaaaggagttgcggaaccaaatcattgaagaggcaaatcaattcaaagaggatttccatagaaggagggagttaacctgtgaaaacaacaaagccgctaacagagagaaggaaaagctgtatatggagacgcaagagaagttctatgcggaagccagcaagaactactggaaggcaatagcagagttagttcctaaagaggttccaactatagagaaaaggagagggaagaaagagcaagaccctaagaagccaacaatctctgtcattcaaggtccaaagcctggtaagccaaccgatctctcaagaatgagacagatattgctgaagctcaaacagaacccgccagctcacctgaaactcgctcctcaacctccaccagaggcggctgctgctactactactgctgctactcctccaaagaatgttcctgaaaccaagcccaccgaggcagttactgctgcttaagaaaccctcttttgttttttcccattgctttcatgtatgtgattctctctttgcattccattacgtgtgtgatataaacagcttatgtcctatctgattatactttatgacattcatgtttgaattcaaataagcgaagttgttaaaataacaaaaaaaaaaaaaaan

SEQ ID NO: 3469 - DNA, 416 bp, Glycine max
  misc_feature (107)..(107): n is a, c, g, or t
  misc_feature (110)..(110): n is a, c, g, or t
  misc_feature (112)..(113): n is a, c, g, or t
  misc_feature (317)..(317): n is a, c, g, or t
  misc_feature (399)..(400): n is a, c, g, or t
  Peptide Sequence Number=SeqID_6912
  Probeset Number=SeqID_13248
gtactttgtttgacaatgtcttaattactgatgatcctgagtatgctaagcagctggttgaagaaacatggggcaagcacaaggatgctgagaaggcagcatttgangangnngagaggaggagggggggggaagggacccaaatggacccaattgagggtcgcttaaggcccctttattgacaattttttaaaagggaaaagacctgggaaaaccttgactcatagacggaagctggagaagacaccaaggaagagggtgtacatgatgaacgcttgtaccaagtgaagtttatgttgtgtgagcattattaggtntatgtgaggctgtgagaccatgtataagaagcatatggtatccttgaagtggataagattactgtgaacctgtgataaaccnnttgatggtaaaaaaaa

SEQ ID NO: 3470 - DNA, 1426 bp, Glycine max
  misc_feature (51)..(51): n is a, c, g, or t
  misc_feature (202)..(202): n is a, c, g, or t
  misc_feature (517)..(517): n is a, c, g, or t
  misc_feature (877)..(877): n is a, c, g, or t
  misc_feature (911)..(911): n is a, c, g, or t
  misc_feature (1157)..(1157): n is a, c, g, or t
  misc_feature (1174)..(1174): n is a, c, g, or t
  misc_feature (1238)..(1238): n is a, c, g, or t
  misc_feature (1309)..(1309): n is a, c, g, or t
  misc_feature (1319)..(1319): n is a, c, g, or t
  misc_feature (1385)..(1385): n is a, c, g, or t
  misc_feature (1413)..(1413): n is a, c, g, or t
  misc_feature (1426)..(1426): n is a, c, g, or t
  Peptide Sequence Number=SeqID_6913
  Probeset Number=SeqID_13249
gttgttctttctcctttctactctacctctattcacgcgcgagaacagagnggaggctgtgggacttatagactatataaagtatgtattaccactccccgcgacgacagaaattagattctcgtgtgagatggggcattcgcctccacgagagagcaatgcgagaggacgtgatgtggataatatatagtatctgtaacgnaaacaatgtgatatgagtagtctaggtgtgtgtggtatgtgtttgttattttactacttcactaactattatgataatacgtatctccgtgttaccgtcaccctctagtgataacggcattggtagagtaacttcgagtctctcgagtgcggagtggctatgacagctggcttcgtatttacgagcgtgtcatgctactatgtgtgacgaatacatacgaagagcagatcgtaggtgtaagacgtcagcagctattgcatatagatcatgtctgttcgtgacgtctactaattgctctgtattacttatagaaangtagaagtacgaagcagtgatgggatgctgtggaacgcgaagaagatactaccgttcatactgatctagttgccctagcgtacttcgtacatacctcaccgtacagattgagtattatcagcagctgtcgggtgtccagcaggaggtcggtgcagcagcacagctcactgtactcactgcgtctcgtgttggtatccctcgccctctcatccagcatcatatctctcagtattaaagagactgcgtgaacgcatacatagtgtggtacatacgggattacacgctctgatcacgcgagaccgagtcgtgtgatagcgacgagatgagactcacagctctatgtctgtcagaatacatctntatgctaatgatgttgtgcgagagtacacgtganagagtctcgatcggtgttgctggcttccatcgaggatgtctgactgcgctatgctacaattgctgagtgtcacgtctcgcgtcttgctgtacagactattctacactcacatagtaagacttgtaagcgtactatgcgtcgcgtcagcttgatcgtcacgacgaagcgtacgtaatgagtaggtggatcatatacggtgcggctggagcgtaggagcgctacacccgatactaggagccgatatantagacaatgcgaccatnctgacctgcatcgcagctgcctgacgtgacgtgcgcgcgcgctcgaatgcgcggcgagcagagntatgtcaacagaaggagtatcgtactgtcataagatatatcatggtgcagtaatgacgctatgcgtatgcntagtgggagncgtcagtgcacgagctggagttctcgtgctatattacagctgacgcgtcaccgactgaatgatctngtcatcacgagtgcgacattaattatantccatgataatgn

SEQ ID NO: 3471 - DNA, 570 bp, Glycine max
  Probeset Number=SeqID_13250
cttttaaggaaaattattctgtttcagcctgtgtcatttttgaaaaccaagaaaatgtgacttttttttttatcgttatcaactttatctcttgatattttgactataaatggaaggagtgaggaccctgatggagtgacaattttttaaagataaaatagtccaatgctcttacattttcaataattgaggtgattcagtaactttttaatccttttgcaaatacattaaataacatataatttaaaatgcagggagtattttctcatgttttatatttttatttacgaatatattgtgaattattttcgttagtcatctatactttatttattgtccttaattagatatcgggtgccaatgttgttgtccatgagcctcgtcccggaacaagtgacaggattattgtcatatccggtacaccagatgaaacccaagcagcgcagagcctcctccaagcatttattcttagtggctcatgacatatctcctttccaattgcccattatttagttttgttcactgtattgtttttctgttttcctttttctctccacccgaaatcatgta

SEQ ID NO: 3472 - DNA, 975 bp, Glycine max
  misc_feature (975)..(975): n is a, c, g, or t
  Peptide Sequence Number=SeqID_6914
  Probeset Number=SeqID_13251
ttttttttttttttttactagaaaaccaatcactgtcacactgtcattgtctgcttacacaaattacaatattttacaacatgtactgtagtgtattgtatcccaaacctgcccgattttcgattcaatcggccacactcccgccctgattgaacccaaaaaaactctacacatagaaaccactgcagctaaccgcttaactaccccacctcccctccatctcgacccaaataaacagcgaccacagttgatgcaccccgcccctctcacacttgcatgaaggaacgtcccctcatccccatgagctgcccaaccctgatgtacacgaactttccactcaccgactgccggccatcctccaaccacgaccacccttgcttcttccttctggaacgccgttttattctcccaccctggtttaccgtcaattcccctctcctccctccttcccccaccaagaatccccacttgtttttccctccctcccaccactgaccctcttccgtttcctgttttatattaaaactcaaccctttccatccgttcccccccaacaaagccgcacaaatatgtaccctcacatatcgagtaccctcctttctatatactttttattacccctcctccccgtcacggggcgcgcgttctaaccgccccctcccaacccattttatttgcattctcctctcctatgagcgtttttttccctctctctccattttattctcccaccccccatggagaccttcttcttgtaagtaagaaaatctctcgttaccgtgacctttacatatataaaaacacaataaattccttctctattatccttctgctatcttcctattggctctcccccaccctccctaccccacctcctcccaccccacaccaagcagtacaatctctcctcacctcaactctaccttaaaaacaacccacatatctacttttcacaccaatatcctcacactttcn

SEQ ID NO: 3473 - DNA, 954 bp, Glycine max
  misc_feature (58)..(58): n is a, c, g, or t
  misc_feature (751)..(751): n is a, c, g, or t
  misc_feature (872)..(872): n is a, c, g, or t
  misc_feature (931)..(931): n is a, c, g, or t
  misc_feature (940)..(940): n is a, c, g, or t
  Probeset Number=SeqID_13252
ctacctaagctctttattcgctcgggcgctggggggcgcgggggggaatgttctttanatgattcaagtgtcagcaaagtatttcttgtcttcgaatatgtaccaaatggcacgctcatgaattggatctctgatgagcatgctagaaaatccttgagttggactcaacacataggagctgcaattggagggggggagaggaatccattttttgcatacagggattgtccctggtgtatattccaatgatctgaagatagaagatgttttattggatcagaatcttgttgcaaaaatcagcagttaccacctgcctttgttatctaacatgggaaaggttcggtgtggaaattcttccagtggattaagaaaatctcgcaatagtaaaagtgtaaagcatgaagataaggctgatatatccgcctttggagtgatactcctcgacctcattctaggaagcccaataaaaccacgcaaatgacgcagatgcttttagggatctgtcgcccgcaagcttaggagctgatgaagagggtaggaggagcgttgttgatccacgcatttcgcaaggcatgcttggctcactcattgaagacaatgatggagatttgtgtgaggtgcctggttaaagaccacgccgatagcccatctatagaagatgttttgtggacctcgcagtttgcctctcaagcacaagacgcatggagaggggattctcaaagtagtgaagggtccccaggctcagaatctngagggcccccctctcccattagtctcaccccacaggttctcacttttctcccccccttgtatatctcactatacccctaaaagattaaatggtcggggataccgccccctcacaatagtantagttctttatgtggtcaccccttcgctaaaaaaatctgtggagcttttaatgaaaaantatgttgtnggagcttgcactac

SEQ ID NO: 3474 - DNA, 866 bp, Glycine max
  Peptide Sequence Number=SeqID_6915
  Probeset Number=SeqID_13253
aaagaaacattctagagctccgctccactcccagtaatggcggcgacatggacttgttttgtaacttcgttgtgtatttcttcaccttcttataaaccatcgtcgttgcacggtctgtctttccggaggcaagcagtgaccagaacgaacagattttttaccaggatatatgcgctgtctagcaacgacatcaaagtcgggacaagcatagaagtcgatggtgctccgtggcgtgttctggagtttctgcatgtgaagccaggcaaaggtgctgcttttgtcagaaccaaaatcaggaactacgtcaatggtagcacagtcgagagaacctttcgtgctgggattactatagaagaggccaatgtctccaaggagactaagcaattcacttataaagacggctctcagtttgttttcatggacttgagcagttatgaggaaacacgtttaaacgaggctgatatgggcgacaagaccaaatggcttaaagagggaatggactgcaatttgctctactggaaggacaaggtcatcgattttgaacttcccattacagttcagcttaaaatagttgacgttgatcctggtctccgaggtgacactgcacaaggtggaactaaacctgccacactcgagactggtgcagttgtcaatgtacccctctttgtcaatgttggtgaagatattatggtggacacgagaaccggtacgtacatgagccgggtctgacacttcttccctattgctaacgactaaggaatgtgatatttaatgagcggttttgcttagactactctgattagttgagtgaacgcccagaattgctactattggtttccctaataatgattctgtattattttaag

SEQ ID NO: 3475 - DNA, 2606 bp, Glycine max
  misc_feature (1)..(1): n is a, c, g, or t
  misc_feature (24)..(24): n is a, c, g, or t
  misc_feature (38)..(38): n is a, c, g, or t
  misc_feature (41)..(41): n is a, c, g, or t
  misc_feature (48)..(48): n is a, c, g, or t
  misc_feature (50)..(50): n is a, c, g, or t
  misc_feature (67)..(67): n is a, c, g, or t
  misc_feature (75)..(75): n is a, c, g, or t
  misc_feature (81)..(81): n is a, c, g, or t
  misc_feature (86)..(86): n is a, c, g, or t
  misc_feature (97)..(97): n is a, c, g, or t
  misc_feature (100)..(100): n is a, c, g, or t
  misc_feature (113)..(113): n is a, c, g, or t
  misc_feature (145)..(145): n is a, c, g, or t
  misc_feature (169)..(170): n is a, c, g, or t
  misc_feature (179)..(179): n is a, c, g, or t
  misc_feature (185)..(185): n is a, c, g, or t
  misc_feature (187)..(187): n is a, c, g, or t
  misc_feature (193)..(193): n is a, c, g, or t
  misc_feature (223)..(224): n is a, c, g, or t
  misc_feature (226)..(226): n is a, c, g, or t
  misc_feature (242)..(242): n is a, c, g, or t
  misc_feature (248)..(248): n is a, c, g, or t
  misc_feature (280)..(280): n is a, c, g, or t
  misc_feature (290)..(290): n is a, c, g, or t
  misc_feature (294)..(294): n is a, c, g, or t
  misc_feature (304)..(304): n is a, c, g, or t
  misc_feature (307)..(307): n is a, c, g, or t
  misc_feature (335)..(335): n is a, c, g, or t
  misc_feature (339)..(339): n is a, c, g, or t
  misc_feature (342)..(342): n is a, c, g, or t
  misc_feature (350)..(350): n is a, c, g, or t
  misc_feature (358)..(358): n is a, c, g, or t
  misc_feature (365)..(365): n is a, c, g, or t
  misc_feature (381)..(381): n is a, c, g, or t
  misc_feature (399)..(399): n is a, c, g, or t
  misc_feature (401)..(401): n is a, c, g, or t
  misc_feature (423)..(423): n is a, c, g, or t
  misc_feature (442)..(442): n is a, c, g, or t
  misc_feature (454)..(454): n is a, c, g, or t
  misc_feature (483)..(483): n is a, c, g, or t
  misc_feature (542)..(542): n is a, c, g, or t
  misc_feature (551)..(552): n is a, c, g, or t
  misc_feature (564)..(564): n is a, c, g, or t
  misc_feature (576)..(576): n is a, c, g, or t
  misc_feature (584)..(584): n is a, c, g, or t
  misc_feature (614)..(614): n is a, c, g, or t
  misc_feature (621)..(621): n is a, c, g, or t
  misc_feature (623)..(623): n is a, c, g, or t
  misc_feature (646)..(646): n is a, c, g, or t
  misc_feature (661)..(661): n is a, c, g, or t
  misc_feature (669)..(669): n is a, c, g, or t
  misc_feature (677)..(677): n is a, c, g, or t
  misc_feature (690)..(690): n is a, c, g, or t
  misc_feature (710)..(710): n is a, c, g, or t
  misc_feature (728)..(728): n is a, c, g, or t
  misc_feature (758)..(758): n is a, c, g, or t
  misc_feature (795)..(795): n is a, c, g, or t
  misc_feature (804)..(804): n is a, c, g, or t
  misc_feature (827)..(827): n is a, c, g, or t
  misc_feature (874)..(874): n is a, c, g, or t
  misc_feature (891)..(891): n is a, c, g, or t
  misc_feature (894)..(894): n is a, c, g, or t
  misc_feature (907)..(907): n is a, c, g, or t
  misc_feature (909)..(909): n is a, c, g, or t
  misc_feature (916)..(916): n is a, c, g, or t
  misc_feature (921)..(921): n is a, c, g, or t
  misc_feature (975)..(975): n is a, c, g, or t
  misc_feature (1063)..(1063): n is a, c, g, or t
  misc_feature (1078)..(1078): n is a, c, g, or t
  misc_feature (1108)..(1108): n is a, c, g, or t
  misc_feature (1123)..(1123): n is a, c, g, or t
  misc_feature (1125)..(1125): n is a, c, g, or t
  misc_feature (1130)..(1130): n is a, c, g, or t
  misc_feature (1140)..(1140): n is a, c, g, or t
  misc_feature (1144)..(1144): n is a, c, g, or t
  misc_feature (1148)..(1148): n is a, c, g, or t
  misc_feature (1159)..(1159): n is a, c, g, or t
  misc_feature (1163)..(1163): n is a, c, g, or t
  misc_feature (1183)..(1183): n is a, c, g, or t
  misc_feature (1201)..(1201): n is a, c, g, or t
  misc_feature (1246)..(1246): n is a, c, g, or t
  misc_feature (1250)..(1250): n is a, c, g, or t
  misc_feature (1256)..(1256): n is a, c, g, or t
  misc_feature (1259)..(1259): n is a, c, g, or t
  misc_feature (1310)..(1310): n is a, c, g, or t
  misc_feature (1352)..(1352): n is a, c, g, or t
  misc_feature (1379)..(1379): n is a, c, g, or t
  misc_feature (1391)..(1391): n is a, c, g, or t
  misc_feature (1400)..(1400): n is a, c, g, or t
  misc_feature (1402)..(1402): n is a, c, g, or t
  misc_feature (1434)..(1434): n is a, c, g, or t
  misc_feature (1469)..(1469): n is a, c, g, or t
  misc_feature (1498)..(1498): n is a, c, g, or t
  misc_feature (1501)..(1501): n is a, c, g, or t
  misc_feature (1507)..(1507): n is a, c, g, or t
  misc_feature (1517)..(1517): n is a, c, g, or t
  misc_feature (1530)..(1530): n is a, c, g, or t
  misc_feature (1567)..(1567): n is a, c, g, or t
  misc_feature (1595)..(1595): n is a, c, g, or t
  misc_feature (1597)..(1597): n is a, c, g, or t
  misc_feature (1625)..(1625): n is a, c, g, or t
  misc_feature (1630)..(1630): n is a, c, g, or t
  misc_feature (1635)..(1635): n is a, c, g, or t
  misc_feature (1756)..(1756): n is a, c, g, or t
  misc_feature (1780)..(1780): n is a, c, g, or t
  misc_feature (1806)..(1806): n is a, c, g, or t
  misc_feature (1836)..(1836): n is a, c, g, or t
  misc_feature (1841)..(1841): n is a, c, g, or t
  misc_feature (1926)..(1927): n is a, c, g, or t
  misc_feature (1952)..(1952): n is a, c, g, or t
  misc_feature (1954)..(1955): n is a, c, g, or t
  misc_feature (1965)..(1966): n is a, c, g, or t
  misc_feature (1968)..(1968): n is a, c, g, or t
  misc_feature (1970)..(1970): n is a, c, g, or t
  misc_feature (1974)..(1976): n is a, c, g, or t
  misc_feature (1982)..(1984): n is a, c, g, or t
  misc_feature (1986)..(1987): n is a, c, g, or t
  misc_feature (1995)..(1995): n is a, c, g, or t
  misc_feature (1997)..(1997): n is a, c, g, or t
  misc_feature (1999)..(2000): n is a, c, g, or t
  misc_feature (2004)..(2004): n is a, c, g, or t
  misc_feature (2006)..(2006): n is a, c, g, or t
  misc_feature (2008)..(2010): n is a, c, g, or t
  misc_feature (2013)..(2014): n is a, c, g, or t
  misc_feature (2016)..(2016): n is a, c, g, or t
  misc_feature (2020)..(2020): n is a, c, g, or t
  misc_feature (2040)..(2041): n is a, c, g, or t
  misc_feature (2046)..(2046): n is a, c, g, or t
  misc_feature (2050)..(2050): n is a, c, g, or t
  misc_feature (2059)..(2059): n is a, c, g, or t
  misc_feature (2068)..(2068): n is a, c, g, or t
  misc_feature (2072)..(2072): n is a, c, g, or t
  misc_feature (2077)..(2077): n is a, c, g, or t
  misc_feature (2086)..(2086): n is a, c, g, or t
  misc_feature (2100)..(2100): n is a, c, g, or t
  misc_feature (2122)..(2122): n is a, c, g, or t
  misc_feature (2127)..(2127): n is a, c, g, or t
  misc_feature (2139)..(2139): n is a, c, g, or t
  misc_feature (2142)..(2142): n is a, c, g, or t
  misc_feature (2155)..(2156): n is a, c, g, or t
  misc_feature (2163)..(2163): n is a, c, g, or t
  misc_feature (2165)..(2165): n is a, c, g, or t
  misc_feature (2197)..(2197): n is a, c, g, or t
  misc_feature (2202)..(2202): n is a, c, g, or t
  misc_feature (2261)..(2261): n is a, c, g, or t
  misc_feature (2264)..(2264): n is a, c, g, or t
  misc_feature (2304)..(2304): n is a, c, g, or t
  misc_feature (2313)..(2313): n is a, c, g, or t
  misc_feature (2326)..(2326): n is a, c, g, or t
  misc_feature (2365)..(2368): n is a, c, g, or t
  misc_feature (2373)..(2373): n is a, c, g, or t
  misc_feature (2375)..(2377): n is a, c, g, or t
  misc_feature (2381)..(2381): n is a, c, g, or t
  misc_feature (2385)..(2385): n is a, c, g, or t
  misc_feature (2387)..(2387): n is a, c, g, or t
  misc_feature (2394)..(2394): n is a, c, g, or t
  misc_feature (2415)..(2415): n is a, c, g, or t
  misc_feature (2447)..(2447): n is a, c, g, or t
  misc_feature (2455)..(2455): n is a, c, g, or t
  misc_feature (2457)..(2457): n is a, c, g, or t
  misc_feature (2461)..(2462): n is a, c, g, or t
  misc_feature (2481)..(2481): n is a, c, g, or t
  misc_feature (2484)..(2484): n is a, c, g, or t
  misc_feature (2491)..(2491): n is a, c, g, or t
  misc_feature (2497)..(2497): n is a, c, g, or t
  misc_feature (2499)..(2500): n is a, c, g, or t
  misc_feature (2502)..(2502): n is a, c, g, or t
  misc_feature (2505)..(2506): n is a, c, g, or t
  misc_feature (2511)..(2511): n is a, c, g, or t
  misc_feature (2517)..(2517): n is a, c, g, or t
  misc_feature (2524)..(2524): n is a, c, g, or t
  misc_feature (2530)..(2533): n is a, c, g, or t
  misc_feature (2535)..(2535): n is a, c, g, or t
  misc_feature (2537)..(2540): n is a, c, g, or t
  misc_feature (2543)..(2543): n is a, c, g, or t
  misc_feature (2546)..(2547): n is a, c, g, or t
  misc_feature (2551)..(2553): n is a, c, g, or t
  misc_feature (2556)..(2556): n is a, c, g, or t
  misc_feature (2558)..(2558): n is a, c, g, or t
  misc_feature (2560)..(2560): n is a, c, g, or t
  misc_feature (2562)..(2564): n is a, c, g, or t
  misc_feature (2568)..(2568): n is a, c, g, or t
  misc_feature (2571)..(2572): n is a, c, g, or t
  misc_feature (2575)..(2576): n is a, c, g, or t
  misc_feature (2578)..(2578): n is a, c, g, or t
  misc_feature (2583)..(2583): n is a, c, g, or t
  misc_feature (2586)..(2586): n is a, c, g, or t
  misc_feature (2590)..(2590): n is a, c, g, or t
  misc_feature (2606)..(2606): n is a, c, g, or t
  Peptide Sequence Number=SeqID_6916
  Probeset Number=SeqID_13254
ncgagcagtcatacgatcggtgantggtggtagtgcgngtngtcagtngnctgcatattgtttctgnatctgatnatatcngaggncgtcgtctatntgngtagtatatacgnagttcgtgcttgagtgtcatcgtagcaacgtngcgcaccagtcgacagactgaganngcacagcgncgggtnangtctgntgtctagcatccgcgtgtcgattattatgnntngtgtcactctttagtnctttantgattgttgatgtgtggtagactactagttgnagtcgtaaantatngatcatattnatngagtcaatgatcagtatatatagtatcngtcncgntcttactntcagtcgncagtagngtcgatttgatcaatncatgagtcgagttcccangntcagatctatacttatcgtagnttagctcgttctcagagtngtagtcgtcganccgtgtcacgtacgatgtatagccagtantacagtaagcgatccactacgagactggtgatctctagtcccgccttgatttatcacangtcagactnntagtgcatggancaggctatatgnttgatgtntcgctgtgagcagatggcgatgatctactnatactancngcggcagtcggcacgtcaggcangcgcgaccgactcantgatcgcngagcgtgntgatcgttggtancggctacgacgagtgcgtcnaatctactacacagcagnagagagtagctctagtgcgtagtgcagtancagactgatgacgggctcagcgtcgccgacacatcgntaactaaangtttactattgatcagtatgagncggtggtgacgtatgatgagatgatactagacgctacagctcgtccngatactaacacacgctnacntcgtactacgtcntncgtcgtncgtantatatcatcaatcatcacagtgctgatgactgatttgcgatggtacgatgagtnattagtataatgtatatcatatatgagtgagtatcgatctgtacgtactcgtagtatacatacatagcactgtagtagtactcattangcaattgtacgatgntattatagtccgtatataagtcgtcagtcnatctgaccgtcagtntntatgnatcagtaaantatnatgntaggaataatnagtnagtgtacagtatacaaacgnatgatatgcatctattcnctagtctacgtatgtatactagcagtgtaatgaccttccgtcctncacnactctntcntatcgtgctactactacgcactacttataatactatgctgcaccagactancgtacgatacatagctcagtgtcgtcgtcatcgatcatgctngcgtgctgtagtgctgttcgcgtgtanacacgtcgctcngctcatcangncgcagctatcagctgcgatatcagcatcatantattgcaacgtagagcagtacgtcatatacgtgtnctgtagtgcgatacagtaagtcgatagtnagncgcatntatcatcgantagtgagtccgcnagccgagagcacagatgtgagtgatctcgcgacgganacgatcatacattgatactcacgaacgntnacaagtcatatctatctctcatacactnatctncatancacacacgtcgtatttacgctgtcgagagcggactcgtcggagcactatggctagtagatcactgatctcatcttctcgatcacactatcatcgtatcactagactatcagatcgtagtantagcgactacgtgatagtatagtnggtgctacgcgtggatgcgtgcagantgacagcgagatttagatgatcatgctgtncaatngtatatgatatatctgtatgtgactactatctctctagactataatcatgagatagtcaatgagtgctatattgctgacgacganncgactactagctgcagtagcgtatnanngaggtgatgnngntncatnnngccgtnnncnncaagcgananannaagnangnnnagnnangctnttatattatttaaagttagnnatgtnggtntgtgtcgantgtaacatnattntatancgatatatnattaatatatactnatttaatgatgatatatatgtnaaatnatgcatcgtacntanactatgcgacgannacacatntnattctctatagtatatgtatgctatctatctncagtnactctctctagcatgacactagtctcactgctagatctatagtcactcttatctcattnttngcgtgcgtcgtatgtgatagagtaaagcagacgagacgancggcagagnagatgcagctgancagcgtacgctctatcgctgacgtcgcggtctctagcgnnnnggcgntnnnagtnccgntncctctanctctcacataccagacaaagntccgagcacgatcacacaacgattcgcacgancaggatgntngtgnntgccgatagactcagtctnctngatactngacagntnntnccnnacatnataacnagcagcncaatannnntngnnnncanagnnaaannnaanananannnaaanaannaannanaaaanaanaaanaaaaaaaaaaaaaaan

SEQ ID NO: 3476 - DNA, 1667 bp, Glycine max
  misc_feature (23)..(23): n is a, c, g, or t
  misc_feature (56)..(56): n is a, c, g, or t
  misc_feature (1027)..(1027): n is a, c, g, or t
  misc_feature (1180)..(1180): n is a, c, g, or t
  misc_feature (1259)..(1259): n is a, c, g, or t
  misc_feature (1261)..(1261): n is a, c, g, or t
  misc_feature (1310)..(1310): n is a, c, g, or t
  misc_feature (1320)..(1320): n is a, c, g, or t
  misc_feature (1341)..(1341): n is a, c, g, or t
  misc_feature (1384)..(1384): n is a, c, g, or t
  misc_feature (1389)..(1389): n is a, c, g, or t
  misc_feature (1485)..(1485): n is a, c, g, or t
  misc_feature (1558)..(1558): n is a, c, g, or t
  misc_feature (1631)..(1631): n is a, c, g, or t
  misc_feature (1642)..(1642): n is a, c, g, or t
  Probeset Number=SeqID_13255
actcaccctctctttctctactnttttgcagacctcggcgcaatcaatataacaancaaaaagcgaagtgggggggaccgcccccccagcagggcggaggaggggacggagaacaggacttctctttttcttctttcggtctgtgggagaggaggcttatgacttgttgcggctgtatagatattctagccaggcgctctaccttcctctacgaacctacacatatcagttatttagatagaccactccatccataccctggtattctgcaagtaacaacagaccctcttcatcgattaccgcgtcgacctcaatcttcgcatatagaaatccgccacatacactccctcgttcctaacgccgccagcacgctcttattaaactccaccacagatccgcctctcgagcggctctaggatcgatcggatcccgcgcctcgggaaattggccattatccttcgacctggcgcttacgcgagtcagtcagctcccctatctatgcttacggaagacgccgactctcggcccatatgcacgcccagtgccgatctgctcttgctctgtacggtttatcgtccccgcactgcgccgcatcctataacatggcgctctcacacaatctctgcgcgcatgcaatgaggcgcgagccgtcatcctacagatcggtcaacgacacctctcccatagctctcacaaccaatacccctgcttaagtatcgttctgaccgtgtcagcacagcaattacagcctccgcaccctctcaggtcctacgagtgatgcatgggcgacgtgcggtgtatcccgcatgctacgcgatggaccttcgacagcacagcgtactgtgcgcaactcacgaaatatacaagactgtgtctcttttatacgttgtggagacacgtcatgcggcggattccttcactcactcgattacatctcagactggcttgagtacgcgcacacacgatctaggaaacgtagagatacacttcacctctcatcgctaacacgcctatcaatgccgcatgntcgtcgctcacactatccgcacgaatggattatgacttccactccaccagctgaggcgatatacactcatgcctcagtagaatatgattctatagtcgtcatcgcgacctagttcgacaccagtcgaatatcttgagcgcagaaggaatacantcatgtactacgaagcggccgactatcaggactactcttgtatggtttatcagacttagatacgcggcgtcatctcgtntnaataatacatcacagcggatattcatatagtactctcgattgctctganccatcactcncacgctcctctagctagcgancagtgtaccgacactccctaatatcaccactgacgcgcactcncatgngacgtgtcgttcgctcgcagcatcgtagagagataggagtcgacgacatcatctatactctcgtatatcgtctgtttacattacaatcgataagtnagtaccatatattgctcatattcactcacgcctcgcagatggtgatcttgtcgtgctgtgatggcatgtgcgnagtgtgttactactgaaagactagaagagccgcgagtcgtgtagaacgatgtacacagcgacatgtaatatcncatcacacgcnggagccacgtatagtctagaaatag

SEQ ID NO: 3477 - DNA, 527 bp, Glycine max
  Peptide Sequence Number=SeqID_6917
  Probeset Number=SeqID_13256
gagaaatttttttatgaaggggagttgaagaaaagaatttctgtatataatatacatcaccctttccaatacaaagtaaaaaaaaaaaaaattaaatccccgaattcttcaatcaatttccatttccatttccattttcaattctttcattttctctctgtacggacttagggaaatacttttcctttgtttgaggtgagtcttcccttttctcaatttgggtgcccccaaaataattccaattctttttttcttagatttcctaaagggtatcagaaaaactgtgacttcaccaccatttattccgtttcgttcaagttcgggattgaaaaatccgaaaaagtgaaaaccctaatttgtgatttcgtgacccctttctcatggcggtttctacgatagccttgtacgcgagtccacccagcggcgtgtgttccacgtcgcaccagatcaactgccacgctggctacgacttcgaattggggtcgcgatcttcgtcgccccgccggccttcctttctacacacaatt

SEQ ID NO: 3478 - DNA, 1541 bp, Glycine max
  misc_feature (15)..(15): n is a, c, g, or t
  misc_feature (24)..(25): n is a, c, g, or t
  misc_feature (27)..(27): n is a, c, g, or t
  misc_feature (30)..(32): n is a, c, g, or t
  misc_feature (37)..(37): n is a, c, g, or t
  misc_feature (41)..(41): n is a, c, g, or t
  misc_feature (47)..(47): n is a, c, g, or t
  misc_feature (56)..(56): n is a, c, g, or t
  misc_feature (78)..(78): n is a, c, g, or t
  misc_feature (87)..(87): n is a, c, g, or t
  misc_feature (103)..(103): n is a, c, g, or t
  misc_feature (129)..(129): n is a, c, g, or t
  misc_feature (171)..(171): n is a, c, g, or t
  misc_feature (300)..(300): n is a, c, g, or t
  misc_feature (404)..(404): n is a, c, g, or t
  misc_feature (468)..(468): n is a, c, g, or t
  misc_feature (1145)..(1145): n is a, c, g, or t
  misc_feature (1501)..(1501): n is a, c, g, or t
  misc_feature (1541)..(1541): n is a, c, g, or t
  Peptide Sequence Number=SeqID_6918
  Probeset Number=SeqID_13257
aagtagttgtagaantatagttgnngnggnnnggggngggnggcgcngcgtagggngcgctgggcgcgccgccacggngccccgggncgcgcggcggcccgcnatcgctgtgtgaatcatacacaacanaaaaacgagattatatctttcatatctatcgtctctctcgantaccgctcagagcaatctcactcacgctaccagagcagccccaccaccacgtaatacatataacgaaccactcgtcatacaccgtcatgaccatatgtggtgatatacgtgtctggtgcacaattacgntgcatactatcttcttatgtttatcatctttatagaacgtagttctcacgataaatactatctctgttaggtggtgatctaggcgacctacctcgcacactctnacgtgtgtgtctaatgatgcgtatgctactatgtgactacctgtactcttatgtccgcactcgncgtgaccacactacgcacacatctggggcatattctactcttcacgctcctcactattgttctctcttttgtcgcgctcttctttctattactaccacagcgcgtcttccacacgtcacatagtgacatactcgccatacgctctatagtcattctatgtttatcatgatacccttatcactggatgtttctcatactttcatgtcgatatagttcacacatgtggtagtgggcggtgaggtcagaagtcgcgtgggtggtgtgttaaataaagtagcgtaagaaagtgaatgcccgatgatggacgaacatacacaagcgggagcccacaagacacctcacgggagaccgctccaacatcaactacacgagatatacctacacctcagagccttgactcgcgcactatttgtttaacgcacacgtgcgcgcaactctgccatctcactcgcgtggcgtatcatctacacacacatcgcgatcctatactctacaacgactacgccacgcgcctacctatctctacacaatgagggttataacccgtctacgccgagtccacctaacactctcagagactcactatatactcacacatacgacaccgacgctatcctcgcgcgacgtctccgcatgcgtacatcgctcgcacactacataggacagcgctcgcagcncacccaccgtaaacacgatatacacacatcgcgcgcgacggatcatcacaagacgatctacatcacgacgcaggggctaacacacaaatcactcacatcgtcgtggacggatcataacaaactatatactaagacgatatagagataaccagtacagatgacaaacaaccacactacatagactacacggtcatcactcgtctcccatacatgtgcgcgttcagaaaaacacgaaacactgatacacatccgcatgtcgtggtcgctctctcctcactctacatctactccccatccgacacaacctatcgctcaccgtcactaacgcgcagccaaccacacgtacaccccacacntcacacccacatcacattgcacgtcaaacatctaccctcn

SEQ ID NO: 3479 - DNA, 221 bp, Glycine max
  Probeset Number=SeqID_13258
gctggtaggttatgtctatagtagaaaggcagctctatgtggcacataatataaaggctggtctactggtatgaggcaaaatctcatgacgggagaaatgactgtgggtcagataaccgctctttttaaggatcagatatcggctggctcggacaagtccacgcccgttcatatagatacaggtctccagcaaggggtgcgcatcccagatgcaactgcag

SEQ ID NO: 3480 - DNA, 564 bp, Glycine max
  Peptide Sequence Number=SeqID_6919
  Probeset Number=SeqID_13259
gagagaactagtctcaatttctcttttcattctcctctttctctgttccgagagtgtgtcctctcaaaatgtatccgagagtgagcagcagcaagctagcattcctccaagaggttggaactcctatgattccttttgctggacaatttctgaagaagaattcttacagagtgctgaaatagtttctcaacgtctccgttacgttcgtccagttgctttgcgtgtggtgtcaggtatttccattcagtcattctttattttttgttattatttattttgtttaattgcagtttggttgtgcagctggactttggaattggaatattgaattcttgagttcgaaacttgcatacttaaatattaacaagaggcagaaataattgacatatttagataccctatggcctatgcacgaaggaggactctttcgcatgatttcggaaacaggacaagaggaaataaacaatattgaaaaacattacattaaataaaattcatttaagtgaaataatccaattttaagagtatgcatgaaggaaggaacacaatgtcgtatgaattcga

SEQ ID NO: 3481 - DNA, 1383 bp, Glycine max
  misc_feature (47)..(47): n is a, c, g, or t
  misc_feature (114)..(114): n is a, c, g, or t
  misc_feature (420)..(420): n is a, c, g, or t
  misc_feature (439)..(439): n is a, c, g, or t
  misc_feature (588)..(588): n is a, c, g, or t
  misc_feature (1204)..(1204): n is a, c, g, or t
  misc_feature (1283)..(1283): n is a, c, g, or t
  misc_feature (1343)..(1344): n is a, c, g, or t
  misc_feature (1352)..(1354): n is a, c, g, or t
  Peptide Sequence Number=SeqID_8096
  Probeset Number=SeqID_13260
cagtgaaggtagtgaggatgtgagtgtagagagagatatagaggagnaatgcgctagagaggatgagtggtatgaaaagagggagatcagagtaagtatgcgcaatgaagctgngggttagaagtagacagaatgaaataagatggagatgtgaggtgatattatatgtgtgtatgatttatgtgtgtgtgttgtgcgtggtgtcgtgacagtcgatgtgggacagagagtgtgatgtgagaatagaaagtttatattgttttatatatataatgagggtaagcatgagaaggagatattatatttcatgttatcttttaaagaggcgagcgagacggataatactgtcgcggagttttgattatcgtgagaatttgaggtgtgggatagaggcgtgtgtgtgataggttagggtggtanagagtagtagttagatgtntggtatgtgtacgtggtgcgcgtatagtatcaacagctcgtggagatgggcgtgtatagtgaatatattagtagtccagcaacggagataagacgagagccagagtatgagttagtatatttgtgagaggtggcgctagttatatgtgnggaggcgacaattaatatattgttagagtgttgtgggtgttgtgatattgtcacggtacggagtttttatattttgagcattgagccatgatgtatgatagttgcgtagtcgttatgcgtgtgaagtgctatataggagtaacggcgacaggtaaaagatagattgtggtgtatatgttgttagtgtgtcgttatttttagttatactgcattctatatatcttcatctcgtcaactttatggttagtgatttttatatgtagaacggtgagttgtagatatatgagtaggagaggaaagatgcttctctgatactcacaattccgtattgtaagtcttatataaagtaaagaaagagagggggaagggaagttcaaaagagggcggggaggcgacaggataatgagcgcgtctatcaatctcctggagtccgggtaaattttcttgttgttgagtaggaggggtgatgtataaacttgatatgttgaatttgatagagtggtgagagattaatgagtgtagatttaataatgaagaatattaaataaaagttggttatattagggtagaataaatatcgagagattgagggtagtgggagagagagggagagggngttgtttttgttgtatctttctaatttcacttcctcccattttgtcgttttttctattactaataatgtagactatagntatcgtttattatattaattatagatagaatagaggagaagagaggagaaaataaagggnnagaaagannnaaaaaaataaaaaaaaaaggggaaggacc

SEQ ID NO: 3482 - DNA, 1891 bp, Glycine max
  misc_feature (1)..(1): n is a, c, g, or t
  misc_feature (32)..(32): n is a, c, g, or t
  misc_feature (52)..(52): n is a, c, g, or t
  misc_feature (63)..(63): n is a, c, g, or t
  misc_feature (87)..(87): n is a, c, g, or t
  misc_feature (132)..(132): n is a, c, g, or t
  misc_feature (170)..(170): n is a, c, g, or t
  misc_feature (206)..(206): n is a, c, g, or t
  misc_feature (240)..(240): n is a, c, g, or t
  misc_feature (243)..(243): n is a, c, g, or t
  misc_feature (254)..(254): n is a, c, g, or t
  misc_feature (275)..(275): n is a, c, g, or t
  misc_feature (277)..(277): n is a, c, g, or t
  misc_feature (279)..(279): n is a, c, g, or t
  misc_feature (281)..(281): n is a, c, g, or t
  misc_feature (290)..(290): n is a, c, g, or t
  misc_feature (361)..(361): n is a, c, g, or t
  misc_feature (405)..(405): n is a, c, g, or t
  misc_feature (411)..(411): n is a, c, g, or t
  misc_feature (535)..(535): n is a, c, g, or t
  misc_feature (841)..(841): n is a, c, g, or t
  misc_feature (927)..(927): n is a, c, g, or t
  misc_feature (943)..(943): n is a, c, g, or t
  misc_feature (948)..(948): n is a, c, g, or t
  misc_feature (952)..(952): n is a, c, g, or t
  misc_feature (1200)..(1200): n is a, c, g, or t
  misc_feature (1257)..(1257): n is a, c, g, or t
  misc_feature (1381)..(1381): n is a, c, g, or t
  misc_feature (1393)..(1393): n is a, c, g, or t
  misc_feature (1616)..(1616): n is a, c, g, or t
  misc_feature (1627)..(1627): n is a, c, g, or t
  misc_feature (1655)..(1655): n is a, c, g, or t
  misc_feature (1781)..(1781): n is a, c, g, or t
  misc_feature (1818)..(1818): n is a, c, g, or t
  misc_feature (1842)..(1842): n is a, c, g, or t
  misc_feature (1853)..(1854): n is a, c, g, or t
  misc_feature (1859)..(1869): n is a, c, g, or t
  misc_feature (1874)..(1876): n is a, c, g, or t
  misc_feature (1885)..(1891): n is a, c, g, or t
  Probeset Number=SeqID_13261
ncgagtcgtctccaatgatctgctaacacaantctcagtagtagtcagatgncttgatgtttnaatgagactgatacaatgatatangtaatgattatatgactcttctaataaacagagtcgtcccttacnagatgcacactatatcagtcgcgttcattcttagtacncctcgacgtactactagacgacatacatgcagctcnatcctatatatcacgtagcgtagacgcaggaagnaanggtacgagganaatagatggtcgagtaactantntnantgagagtgntatattggcagtacaatatgatcaatcatcgcgcatatagacatagatatgtgatataagaatcagagctntattgtgtcgctagtgtaagtagagtagattgaggatagtgagngtcccncctactcaagtcctatagtatcactgatcgagttatgcgctctcgagaagatgatggagatgatagagagcgatgcatagatgaagtgtgtcgtctcacacatcctgacacatccgacgaacgnagatgcatgctacgagtgcatagtacaagcaacgtcgatggcagaggtcttctagcattgcgtgtctcacgagtacaacacagagagtcggacggaagttcacgagcttacgatgaagtacgtgtggacgtagggcgatgctgtgttcagactgaatatatagattagccagcgatcactaatcgatcaccagttctgtcctcggatgtctgcgtcatgtagtagatgtagtagaatcgtctaacatcttctcatgatgtacatacaacagtcgcgtaggagagatgaagaggacgaagcgacagncccgacatattcgaagtatgtgatgccgacggctatcaagagtcctcgcgcgaagtatagactgccctgatactcacctctctccntctcgacacgtgtcgngaggnagangagggtgcgatagtctatgtaataatgactagtagtttataatataactgactacaacaacgaatacatcgagagttgcgcatggatggagttctgtggtggtgcaagagagatagatctagagaatgctgtagatcatggccatctatgttgtaccctcgatccgctcgagcggtcagcggtgtgcgctgacgcctgcgctgtcgcgcgccccatggagatcatcttctcttctgtgttgtatcgtntttgtagatgccgtttgtgtatgtagtgtatcttcaactcccaccatgttaatcacnactttcaactcgtacattcccattcatctgtctctattacactcattcatcatgcgcgcgtggcgccctcctagaccgacgtatacgagagtcgctgcggatcagaagccacactcaaaggagncgcgctacgtanatgtagtagtcgattagtatctattcgattactatctacttcgattcaatctacgctaatggattagaagaatatatagtagaatgtagaaagtataaataagtgaatcatataaataggatataatgaacttacgatgactagcatatgatatagcgtcttatatctcagacgtcttacgcgcgaggcgaatcacgggagcagagagcgacacacaatacgnaacaactcacngtatcatctaaacatctcacctcgtaanacaggcggagagagcactcatctctgatgtgacttagtactcagatatcatcgatacaacaaccacaagattcacaataatatcaactaccactctctccgctccaataagaaaacatatgccgtnatagcccaagcgagaggtcggagaaggcggcgggggnaagagtaagaagagaggggcagtncgcgcaagatnnggggnnnnnnnnnnnaaaannnggggaaaannnnnnn

SEQ ID NO: 3483 - DNA, 1461 bp, Glycine max
  Peptide Sequence Number=SeqID_8097
  Probeset Number=SeqID_13262
atgatttgagaaacaatattcaagaatatgggttcaatggccaattgcagcgataacagtcgaagaacatagcagcataattactgaaataaacgcactttccgttctgttgttgagtgagtgtcaaacgacaaacgattatcatacacaattcgagtatccacgaggtcgactatcaaaaatactcattgtaaccaaatataaattagaggataacgccgacgaacgcacagtagcaatatcggtgaaatgacacactttcgaccgatttgtttaatgccattgtccgtttcaaacaatgccgacagaatagtaagcgtgccgccgattagacagaagaatgcgaaaaaagacattttgaaaatctacaaaccaatcaaaacaaaattccgcaaaaagttaacatcggtgcgtcgccgatcggcgttcgtaatatttcaagccataaaaccactattgaatgctggcaaactattaacgggcggagatgcaacgaaacaggcaacaatatcaaaaccattgctggccaaggtcaacaataaaacggaagcgacacaggacacaagcgatatgttcgaaacgggcgattcaccggaagaactgaggaacgaccaccaaacacacaccggccgatcacagaagaatacaaaaactgtacaaacacgtaaaacgtctgctaaatgctgtgattcaacgaaaacaacgcgcagtaaccgcgaaaaaatgttacaagaaaaagaagactttcaattagcgaaaatgttacaggaatgcattggcacgacggatgcgccgtcacggtattcattgcgtagtcgaaacaaatcatcggtatcatctctatcatcgacatcatcatcacaagaactgtttcacagcaaaggatatgcggtgggcgcaacgccaaagttcaagaaaaccatgccattcgctgattcaacaacaactacaaaagatttggtgggtcgttcacagcgcaacaacggcaacacaaatgataaattcagtgattttagctttcagaaattgactcgaagccgacgaatcgcaatgactatgtccggcgtatgaattcattaaaacataaatctatatatatatatacaaatataatgatgaaaaagaaagtccgtcgctcattacgaagcagtgcaaatggaaaagaaaacttaacttaattttgtattttttttctctcttgtttattattatcaataacaacaacaaaaaaactttacacgtaggatattaaattcaaattattctctatatttttttttcgaattgaaaacaattttttctttgtattaacatttaatattagaaattcgtacatcgtgtagttctattcactgcatttgccaacaaatgcattggttgtgctcattttcatattaaaaactccttagaaggaacaacaacaacaacaataaaacatatttcggtgtaaaaccccttttc

SEQ ID NO: 3484 - DNA, 330 bp, Glycine max
  misc_feature (47)..(47): n is a, c, g, or t
  misc_feature (50)..(50): n is a, c, g, or t
  misc_feature (62)..(62): n is a, c, g, or t
  misc_feature (253)..(253): n is a, c, g, or t
  misc_feature (264)..(264): n is a, c, g, or t
  misc_feature (267)..(267): n is a, c, g, or t
  misc_feature (286)..(286): n is a, c, g, or t
  Probeset Number=SeqID_13263
atccactcactcgatcccctctcgctctccccatctgcagcgctgcngcnagagccaccgcntcccgcctcgccggacccggcgccgccgcacctccgacacctctcccacctctcccggaccgggcgccgccgcaccatctgctcccagatccagagatctcaagttccatcacctgttagcagtacaggcagaatggatggaacagtgcagactccaagcggcacgtgccacgtgttgctgcccaccctancgtgaacggcnacngcgctgccaggcacttgcntgatgaatggctggaagagtatgaagctggcgttttcatgaagc

SEQ ID NO: 3485 - DNA, 1548 bp, Glycine max
  misc_feature (1)..(1): n is a, c, g, or t
  Peptide Sequence Number=SeqID_8098
  Probeset Number=SeqID_13264
ncccccccgagagactacgtcagtagctgtctcattagtcacagtcactcactataccgtaccccacatccagatggcgcgtcccgtcgcgtacaccgcacttatcacaatgtaagtccatgagtccaaccggtaagtgtctgcaaacaatatagcacctgcgctccatgtgcttgtcgttcacaacacagacaacacggtgcgagccatcgtgaatacgacagatgcatcatccgtcccgtacgcagacctaaccatagcctgcagtagcggcgacacaaaccataaggagaggcgcgtcaccacacccatcaggcggcacgccgtccacggcgttgcagatatcactcacacatgatatatcatacacactggcgaagacgtactaatagtgtcaccggatagtacatctcgagtgtactgcgatgtatagtatgacattcatagagtggtagatgcactgcaatatcgcctcatcatcatactactctctatgatagagtcagataactagtgcagtgatcatgtataccgtgaatatagttcctaataatcgatccatatatattcaacgtctcggtgcttaaatacatcactcgccagcgcatgacgggcacgtagcgaatcacaacacaaccgactcgcatttctcacctcccagctcgttacactcccaccctcaccccacacatatccatactgtcgccttctagtgcacgtcaatagcggtcacgcccatactccgtcatcgctcagccgcccagccttatattatacaatagagctataaaccgcgtcgcgctgacgtgcctcgttcagcccacctgagaaggagatcacatctggtattgcatcacttgcccgttagttctcggctacccgacacaatcgcgcagagccggaattctctattagtacgatccccaatcactcactccaaaacaccatgcctcgggaccccacgacgcctccgctacttatccaacatccagccatcgcgaccggctgcctataatagagtaacagcagcgtttgagctatcctgacgcgcgcacacaccaccggcactacctcctagcggcaacatcgacctgccgacgctcgtccctccccctatacccattcgcttacctgcaccccccgctccaattaccttttcaactgctatgtacactcccacaatccgacacccctccatcgcgcgctgtatctgggagcccactcctaatacacaaactcacacacctgcgtacggcaagcacaccgtagagacagcggaccgcagacgatcatctcgctcgccgtgggcagaaaaaatacaaacgccgcggccacaagaatcgagaattacacttctcctgccttttcctcttctcccctttgtgggaaaaacacctctccatgacgctaacaacctctctcttttaaaaaatcctcatgtcaccgtccctaccttgcagatcctacacttagttctggtcgcgcccccacaattcccactcttcaacgcgctcggcgcgcgcgcacttctatcttcatcgttccctc

SEQ ID NO: 3486 - DNA, 361 bp, Glycine max
  Probeset Number=SeqID_13265
gcatatacgtcaggagctattccatggcatactgagagtgattctctgggcggtacacgggctcatatctcaggttgccatgctactattacgtgagtggaggattcccagctccccatttgggagtttgtggagtacatcaggatgatatacctagacggtgatatcccagcttgtgacaaccttgaccaccttttttacttgcctgaaaactacttgtatgcggggatagactgtatctggaagccaactttgagacacactaaacaatattagatcagatactgccagcaccgcccccataaggttcagtggcccactcactttgggcccaaaaccacggtctatttcaatgctggca

SEQ ID NO: 3487 - DNA, 1565 bp, Glycine max
  misc_feature (1)..(1): n is a, c, g, or t
  misc_feature (11)..(11): n is a, c, g, or t
  misc_feature (15)..(15): n is a, c, g, or t
  misc_feature (52)..(52): n is a, c, g, or t
  misc_feature (229)..(229): n is a, c, g, or t
  misc_feature (523)..(523): n is a, c, g, or t
  misc_feature (853)..(853): n is a, c, g, or t
  misc_feature (905)..(905): n is a, c, g, or t
  misc_feature (1108)..(1108): n is a, c, g, or t
  misc_feature (1350)..(1350): n is a, c, g, or t
  misc_feature (1511)..(1511): n is a, c, g, or t
  Peptide Sequence Number=SeqID_8099
  Probeset Number=SeqID_13266
ncgagtagcantcgncacgtcgcacggtcgacagactgacgacatcgtcatnatagtgacacggtgccgtaccatcagcacgtctgtcgcagacatatagctggcaactagtctcactacaccgaacgcagcatcatacgtatcgttgagttggacagtcgcacgtgagactgcatctatatcgaggtgagtgatagagatcttatgatcttggcgaagtgatcgttgnctatggaataggacaatatattacgtctatgagttgtctagcatcacatagtgctgtagattgtagcttgtatattgtgacagtaatttgctacagtgattatatgatatattgtttctgctcaatttacatcgtcagtctgacttctcgacatcgggtaccacatgtctcatctcgtcgtccacatcaatcctacatcacacaaacattcatagtcggagccggtagcgcgatctcccatatcatcctctgccgctctcgatgtatacatttgcgtatatcgtgcgctcaacnatgaatattgaaataaacgtcgcgcgcggctacacagtacagacaccgtaatctgcacactggataacgtcgctcgttgtctactcaaatcttactctcacaacctgtacacacacatacaatcagcgcatgttcgagtcgcgttcgatgcagcaataagaacccagatgtgcattgttacaaaggctcgaagcgctcgcgtctccaacgcatatatgatatcattatgactaattcctgtctctctgttctatatagacctactctctaccacttaataatatctaagtgtcgttgtgactagatgtgaaccagtcgcgttctatatanttattactatgtctttctccttcgttttttccaattatacagttaatatganacgttacgcatgtgatagttagttctatctcttcctccacttctcgtctataactcttactcatgatatacacgtaggtcgtcagagaacaaggcgcgacatcacatgtataatatgtatgacgcgctggtaggatagttatctgaacagtgatagtgtattctcaacgatgtgctggtgtgagaggatgagacgagcgtganctcgtagttggagtataatcgtagtccctacctcatcagatcacaccctacacgcacgtatagaactagcgtcgcagcgtatcaggcggatgatgcatacgagaacacaagaggagataaacgatgacgctcgcagaggcagcatgggcagacgagggatgtgggttagcgagatgagaatagatctgtcacaatgctgtgaagaaacaccgagcggctcaagatatactatcagatacccncctcgtggattagtatcggtacatcatgccatctttcccgacgcccctccccctcctacactcgcccgtggtgttagatgtcgtttgacaatatatctatctgtttgacgtatgataagatggtgggtgtctgtcacataacatatatgttgaatagtgtnctgtgcagcgcctcagatgcacgctcaacaacacaaccgcgcatacagtggtag

SEQ ID NO: 3488 - DNA, 1899 bp, Glycine max
  misc_feature (22)..(26): n is a, c, g, or t
  misc_feature (31)..(31): n is a, c, g, or t
  misc_feature (33)..(33): n is a, c, g, or t
  misc_feature (57)..(57): n is a, c, g, or t
  misc_feature (60)..(61): n is a, c, g, or t
  misc_feature (72)..(72): n is a, c, g, or t
  misc_feature (119)..(125): n is a, c, g, or t
  misc_feature (127)..(128): n is a, c, g, or t
  misc_feature (130)..(130): n is a, c, g, or t
  misc_feature (133)..(135): n is a, c, g, or t
  misc_feature (148)..(148): n is a, c, g, or t
  misc_feature (154)..(155): n is a, c, g, or t
  misc_feature (230)..(230): n is a, c, g, or t
  misc_feature (280)..(280): n is a, c, g, or t
  misc_feature (351)..(351): n is a, c, g, or t
  misc_feature (415)..(415): n is a, c, g, or t
  misc_feature (530)..(530): n is a, c, g, or t
  misc_feature (619)..(619): n is a, c, g, or t
  misc_feature (726)..(726): n is a, c, g, or t
  misc_feature (755)..(755): n is a, c, g, or t
  misc_feature (860)..(860): n is a, c, g, or t
  misc_feature (1051)..(1051): n is a, c, g, or t
  misc_feature (1094)..(1094): n is a, c, g, or t
  misc_feature (1119)..(1119): n is a, c, g, or t
  misc_feature (1134)..(1134): n is a, c, g, or t
  misc_feature (1167)..(1167): n is a, c, g, or t
  misc_feature (1192)..(1192): n is a, c, g, or t
  misc_feature (1232)..(1232): n is a, c, g, or t
  misc_feature (1234)..(1234): n is a, c, g, or t
  misc_feature (1279)..(1279): n is a, c, g, or t
  misc_feature (1333)..(1333): n is a, c, g, or t
  misc_feature (1419)..(1419): n is a, c, g, or t
  misc_feature (1425)..(1425): n is a, c, g, or t
  misc_feature (1453)..(1453): n is a, c, g, or t
  misc_feature (1459)..(1459): n is a, c, g, or t
  misc_feature (1461)..(1461): n is a, c, g, or t
  misc_feature (1465)..(1465): n is a, c, g, or t
  misc_feature (1467)..(1467): n is a, c, g, or t
  misc_feature (1498)..(1498): n is a, c, g, or t
  misc_feature (1503)..(1503): n is a, c, g, or t
  misc_feature (1548)..(1548): n is a, c, g, or t
  misc_feature (1550)..(1550): n is a, c, g, or t
  misc_feature (1564)..(1564): n is a, c, g, or t
  misc_feature (1624)..(1624): n is a, c, g, or t
  misc_feature (1635)..(1635): n is a, c, g, or t
  misc_feature (1638)..(1638): n is a, c, g, or t
  misc_feature (1669)..(1669): n is a, c, g, or t
  misc_feature (1671)..(1672): n is a, c, g, or t
  misc_feature (1678)..(1678): n is a, c, g, or t
  misc_feature (1688)..(1688): n is a, c, g, or t
  misc_feature (1712)..(1712): n is a, c, g, or t
  misc_feature (1722)..(1722): n is a, c, g, or t
  misc_feature (1741)..(1741): n is a, c, g, or t
  misc_feature (1744)..(1744): n is a, c, g, or t
  misc_feature (1766)..(1766): n is a, c, g, or t
  misc_feature (1774)..(1774): n is a, c, g, or t
  misc_feature (1788)..(1788): n is a, c, g, or t
  misc_feature (1795)..(1795): n is a, c, g, or t
  misc_feature (1842)..(1843): n is a, c, g, or t
  misc_feature (1849)..(1849): n is a, c, g, or t
  misc_feature (1861)..(1861): n is a, c, g, or t
  misc_feature (1872)..(1872): n is a, c, g, or t
  misc_feature (1899)..(1899): n is a, c, g, or t
  Probeset Number=SeqID_13267
aaaaaacagaagagtagaagannnnntttcntngtgtctttcccggtggttgcgctntannataaccgcaantcaatcgctcgcgtcaatgtaagtcgtatcagttgtgcaaccaaaannnnnnnannanacnnncggcgcgcgcccngacccnnagaaacaccgtacctcaaccatcaacacagtgtgtcagaagcgaagatgcagtactgtatatatacagtagtgangagaagagaaagtcgataagttaatacttgtcctaagagtctacttatanctgtctatacatagatatcgatacaaaaactacacttagctgtatcgagagaggagcgcacaacagtgagnatagtagacgcggcagagaatgagagatctacatacacacactgacggtagtgcgtcaacaacngtaggagtagtgactacgcagcgtgcatgatctgtgtatggtcatgttcgagcagccactctctcatgtatgcgcgcagacgcgactctctaggttgacggtgtcgtagtttgantagtgacatcatggccattgttgtgtaattctgctggctacacacgcggagtgtggtgtacgtgtcgactctcatcctgtctgatatcnacctgtcgtgctgctactgactatcacgcattcttctcgcgtcgccgacgtgtcgtcacgcctctgctggagcttagctgcagctgtgtcgtgtggtgtagtgatgnagtggcggttgatcgtgttgttgtgagtncataccgacgacacacaccacacatctatgatacacgttgttatagttgacagcccacgcgcaccgatgtatacgatgtggagagaatagagagtgcctagatantatgtgatatagagatgaggatcatcacgatatagcactattcttcaacatcatatgatagacggcacacactgcctagaagcagcatacatgaggtgtcatcgacgcacgtctacacggcgtatatagtgataggactagtcatgctactgctattagtgtatcacccagcacatgcccacctagcagcnctgagagcaaccacgcactacgtactaaccacgcagcttcgcncgaatattgaagagcgtacgctacntagcagatccagtantgatagtatagcatggaatcattatcatacgantcgcgcgactcgatcgtcgctgcancgagcgcacccacccccaacgacactgcgtggcatagcgntngctgtacgatagtatgtcatgcgtgtcatatactgatacgagtancaatccgaactagacacgacaccgtccgatgactctctcaggcttgctgtcgtnctatcacgatgtgctcacacatcaacctcgctacgacgactcagcgcagaatgaatctctagtgcgtcactgccgcctacgctgangtgctncgtcgcgctgctcgctgaccatctccgnagctcntngtangnagctgatctatcgacatgctcagactgcatncgcgngcgtgcgctcacatcggcatacgtcgtcggactgtgctcgatgcntngacgagagtgcacntgatcctcacacgacacgcgctcgatactatgactatgatagtgcaacgtgctaccagtntatcgtacaantantcacatcatcataccacactagtgagaaacngnntactgnagatgctganatattgatgccacaagtgcatcanacactcagcngcagctactatcatctcantancatatacggtctacatagctantgctactngatcagcgacgtangtcgacncgatcagcgtgcagactataatcatcgtcacactcatatgcactccnnctctcntgctcctttcgnattcatcgacngctcgtgcatctgacacgacacagcgn

SEQ ID NO: 3489 - DNA, 797 bp, Glycine max
  Peptide Sequence Number=SeqID_8100
  Probeset Number=SeqID_13268
aaatcgccattgttgctgcaccactctgattcatttcgattgagctttctttttttttcctgctaatggctcgtcggtctggagactgcatgagatgcctggtgatcttcgcggtggtatctgctttagtagtgtgcggacctgctctttactggagattcaacaaaggtttcgttggatccactcgtaaaagctctgtttgtcctccttgcgtctgtgattgcccacctcctgtatccctcctcgagatcgctcctgggcttgcaaatctcaccgttacagattgtggaggcgatgatccggagctcaagcaggaaatggagaagcagtttgtggaccttctgaccgaagagctgaagctgcaagaagcagttgcagatgagcatagccgtcacatgaacgttacactcttagaagctaagagagttgcgtctcagtaccaaaaggaagctgagaaatgcaacgccgccactgagatctgtgagtcagctagggagagagctgaagctttgctgatcaaggagaggaagatcactgctttgtgggagaagagagctcgtcaatcagggtgggaaggtgagtaaaaaactgattgcccccttctcatgtcaaaccctgaagtgtttttgtctgagaaaccgattttttcaaggaaaagtcctttatgttccacgtttctccatatatgtagtttttttttttttttgtttttgcctttggaatctgaatgtagctaaagaatggcttgtggccttgtattgactttctcttcaaaatatataattgtccatttctct

SEQ ID NO: 3490 - DNA, 621 bp, Glycine max
  Peptide Sequence Number=SeqID_8101
  Probeset Number=SeqID_13269
tgtagtattacccataatatttgaagcattggagaaaaacattcacagtcaagccgtgaacagcctggttccggcttgactctgaatgttcggaaaatgtttgtagaaatggttgcagaattgtttgatgagtgtcagaggcagtttgacgagagggaggctatagcaagagcattagaagtgcagagggaattgaattggaaaagactggcagaggcagcttcacagaatagggtggatatggtcgcaccttagtagaattcctttactgccctaatcgggagtgttaattggatagctgaaggattgtatgcgctccgtgccactttcatgccgtgattaatcggtttctttctttcccatttattttctttttcccctatattttatcagttgtttaatcagcgagtttcattaagcagtgattaatgtagctttatagcgcagttggactattcgcgtcgcagtctgttatcattgtatgcagactgtgcagctgcggtaggttccacctgtcgactctctgttatcgttgacgactgtctgataggacatacgttccgtagtcagagggacagagcctgagtgtgatagagacagtatagtagctcgagccgaact

SEQ ID NO: 3491 - DNA, 616 bp, Glycine max
  Peptide Sequence Number=SeqID_8102
  Probeset Number=SeqID_13270
agtacagaggaaacaaacgcctccagggttgtccttctgaaacacagcgatggcggcgagaaatgctctgcttcgatacctaagagtcaacgtcaatccatcacctgcactcccttcgagctctgtacttcttcgtcgtttctcggaggaagtaagaggatcgtttctagacaaatctgacgtgacagatcgcgttatctctgtcgtcaaaaactttcaaagagtcgatccctcaaaggtaacaccaaaagcccattttattaacgatctcgggttagacagtttggacaatgtggaggttgtgatggcattggaggaagagtttgggtttgagatccctgataatgatgctgacaagatccagtccgttgatcttgctgttgactttatcgcttctcatcctcaggctacgtaagaagagattcaaaactctttcaatgtcatgcatcatgcctccagctgtgtctacagattttgattagccttaataagaacagaaacaaacatgttttttttttttttgctttcataagtatytgatgtgttcctcctgcatgattttacgagatctttcaagaaactttgtttttcttgatattcttatcaaatataattc

SEQ ID NO: 3492 - DNA, 1344 bp, Glycine max
  misc_feature (553)..(553): n is a, c, g, or t
  misc_feature (699)..(699): n is a, c, g, or t
  misc_feature (889)..(889): n is a, c, g, or t
  misc_feature (1040)..(1040): n is a, c, g, or t
  misc_feature (1061)..(1061): n is a, c, g, or t
  misc_feature (1084)..(1084): n is a, c, g, or t
  misc_feature (1104)..(1104): n is a, c, g, or t
  misc_feature (1134)..(1134): n is a, c, g, or t
  misc_feature (1145)..(1145): n is a, c, g, or t
  misc_feature (1178)..(1178): n is a, c, g, or t
  misc_feature (1228)..(1228): n is a, c, g, or t
  misc_feature (1258)..(1258): n is a, c, g, or t
  misc_feature (1280)..(1280): n is a, c, g, or t
  misc_feature (1318)..(1318): n is a, c, g, or t
  Peptide Sequence Number=SeqID_8103
  Probeset Number=SeqID_13271
gggagagctggagcactaaatatatcaagtgctgatagagtggcgcgcgtggcccccccccccccccacgacaacaggggcattgaagaaacatttatggggagggtggggggcgagggtatgtattcgatctgcgtacccgggcaaataatcaggctctcacaacgcatacggtgtattatgagagtaaattgatccttgcccacgagtcttgttgccctcgtgcgtaagcattacagagatgagtaacaaacacaacgtacctactagtctgagaatggtgagttgccatacagaacagtccaaagccaacgcgaccttttataatgaaataataaagtgagacacgttgaaccacttacgacatgtaatgtgacacttgtgctcatcaatctcagaagtaataattatgcattcaaactacacgtctaacgaataagcgcacttctcctgacgacaaaaccccgcacacagaaatgatctaaatcggtatgtacggaggaacgcgcggaggtggaagcgaatacgcgggaagaactacacattgttgatngtgcgacgctggggtatccagttaacaccggaccgctagctgtattccttgtatcagtgtgtaacgctatgcgcgggagtggtccgtcgatgttatcgacatcaatgattgcggtacgtcactgcgcccccgtgctgttcagtcgnatctgtagatttacaacttcattaattccataccagccttcagtgaccgctgtattatacatacacccgttctgccgctgtgttcgtctaatctttatcacgctcgcgacggttcgaacccccacctactccactatggggtgttcccctgttagcgatacacatatacatatcggccgccgccgcggtntgttatgatatgatgtagtgaagaggtagtaggagagggaaactccccgcgtgcatgctcctgcgatcgagacgaccatattgacaccactctcgcgccgtactctctccgcgtcgcttatccggagtgataaaactatcatacaattgantacgcgatttacgggacgcgngatacgtcgcagtagctatatantagcagccgcctggtgtggncggtatatcgttatcggatatggatattanttaatgtaacnccgctgtgtgtgcgtatgcgtcggtatgcgtcngagtcggcctagaacgtatatcacggtatgatgtagcaccggatacatantagtgccggccactagtatactcagagtcncgcatgcagtatgtgatatgangatgttccgtacaccgtgcgcgctaatgagttccaagntgactagtaatatctctgccgcgtag

SEQ ID NO: 3493 - DNA, 1899 bp, Glycine max
  misc_feature (20)..(20): n is a, c, g, or t
  misc_feature (28)..(28): n is a, c, g, or t
  misc_feature (129)..(129): n is a, c, g, or t
  misc_feature (154)..(154): n is a, c, g, or t
  misc_feature (212)..(212): n is a, c, g, or t
  misc_feature (276)..(276): n is a, c, g, or t
  misc_feature (440)..(440): n is a, c, g, or t
  misc_feature (717)..(717): n is a, c, g, or t
  misc_feature (744)..(744): n is a, c, g, or t
  misc_feature (805)..(805): n is a, c, g, or t
  misc_feature (1405)..(1405): n is a, c, g, or t
  misc_feature (1410)..(1410): n is a, c, g, or t
  misc_feature (1414)..(1414): n is a, c, g, or t
  misc_feature (1450)..(1450): n is a, c, g, or t
  misc_feature (1452)..(1452): n is a, c, g, or t
  misc_feature (1462)..(1462): n is a, c, g, or t
  misc_feature (1496)..(1496): n is a, c, g, or t
  misc_feature (1534)..(1534): n is a, c, g, or t
  misc_feature (1542)..(1542): n is a, c, g, or t
  misc_feature (1573)..(1573): n is a, c, g, or t
  misc_feature (1592)..(1592): n is a, c, g, or t
  misc_feature (1635)..(1635): n is a, c, g, or t
  misc_feature (1689)..(1689): n is a, c, g, or t
  misc_feature (1736)..(1736): n is a, c, g, or t
  misc_feature (1759)..(1759): n is a, c, g, or t
  misc_feature (1764)..(1764): n is a, c, g, or t
  misc_feature (1776)..(1776): n is a, c, g, or t
  misc_feature (1785)..(1785): n is a, c, g, or t
  misc_feature (1836)..(1836): n is a, c, g, or t
  misc_feature (1852)..(1852): n is a, c, g, or t
  misc_feature (1871)..(1871): n is a, c, g, or t
  misc_feature (1881)..(1882): n is a, c, g, or t
  Peptide Sequence Number=SeqID_8104
  Probeset Number=SeqID_13272
aagagaataattattaatgnggcgatgngggcgtagtctatcaatactcctattcaattactgattatcttcatcttccctcttccctctcatttcatttattataccttatgttcctctaccctggcncgttcctctgttctgtattaacganactgtgttcggcttgcttgttgttattctcaacacgtcctatctctacactatactcngaaagtttgtatcacgctgccacttgtatcggtctacagctcacaatcgcacgacattctcacnatatgtctcgctccactctatgtctctactccaccgactcatttgactgtcttatctcttatacactctatatatatcaacttcacgcacgaatcaactaccgaccaatcatgcatccatctctgacctcacacacaccacacacacacctacacataatcgcntctctctctctctaactatatattctatttatacacacctacccacacctctgtctctctctactctgctgaatttatgttgttctatattgtatgcactcgacacattactcagtgatttatatttaatcctggtggtgtatatatggtcggagtttgtatttctttacactgctgattaatggtaaagtaaatacaatggtgtgtatattatacgcaggtagctctggatgtgtgtgctgtaccgaccttcaatctactcataacactgttaccnctcagtcggatgaatacaccactcatntgtgctggctggtacacataataaatataggatgagtgcgctggtgtggcgacacggccanactactgctgttctattatattatgtgagtgtcgaactcctaggtgtgtgttgtgacgtcacattatgatcatgcatacacctacaaacacgtgtgaatcacacacatctggataccgcacacaatggtgtccaatataacaacgagagaacgcacatgtcatcactccgtgttctttactatatactatctttgtgatcaataataatatcatatcacacctatatgtgattaatatataatatctatggatgcagtccatggtgactgctgtgtgttgttcgctgctgtgctgtctgtggtgtatgctgtaggaccgacctcttattcaactactaatatatgggtgtgtaacactgcttggacttaatgcgtgtaattacacttaacacacaccaccacttgtctgactctccacacatcatactcacatatttgatgaattatatcccactcgactcgtcctcgtttgctctccgcacgctcttatactcttcgtattataatatgcacaactgctatttcagaacatcacaccacatactatctatctaatcttcatgatatcatcattcctcatctctacatgtgacactcacntctanctcnactcttgtgacgtagagagcaaggatgagatgtaancncgtgatgtangtgaattgtgcgtgctgcactcttatatctgacntccttcactacactacatacctctgcgcatgataatanacacttanatacttatctccactcacatgatactaattnattcacccacagacacatnaagataccaatagctcataggatcacgcgcggcgcggtgacangtcacacagactctcttactagttggagtgtgcatatgactgcgtgtcgactgncactctatctcatcatacacgagtacaaccatgtgggggatgtgccncagcagacctactactatatcanccacngtacgtcattgntgtcatatngactcataactcgttccgctcatgatctacttgaatatatatatacgcgtngactgtagtatatgtntataaatcttaatcacatntctgtcgacnntcgatctttgattttgt

SEQ ID NO: 3494 - DNA, 1388 bp, Glycine max
  misc_feature (637)..(637): n is a, c, g, or t
  misc_feature (951)..(951): n is a, c, g, or t
  misc_feature (958)..(958): n is a, c, g, or t
  misc_feature (992)..(992): n is a, c, g, or t
  misc_feature (994)..(994): n is a, c, g, or t
  misc_feature (1147)..(1147): n is a, c, g, or t
  misc_feature (1184)..(1184): n is a, c, g, or t
  misc_feature (1335)..(1335): n is a, c, g, or t
  Probeset Number=SeqID_13273
atggcgtgtgagttgggtggtggtgtctgatgcaggagacaaaacacacacattagaaaagtgacatcgtgctggcggtagggagcgcggaaccacccgtatatacaaacaggcacacgacctcgtactccgatgcgggtgacccgatcgcgggcgagggtggtgggtggggatcgacctacatgctgagtccttatataactctttttcccctgcttcctgcttcttgtttgtcgcgggcgcggggccttctcatcctccccccatgtatgtattatactgattgaagtctgcttcgcgttcacgcgtggtggctgatagcacaacgtataaaagacgagagtagacttatgctcagcgaactggataatacacgaaacacacgccgcgatcgtgttacgtcgtcatagctattatcttcaaaacatgacggccatcttcgctgccgtgcgctccacacatcacttgcaaacatcacagagtaagtacagccctcctatccgaagaccgaaacgaataggtagacaatgatctacaccgcaaaacgggaattgcatgtggaaatacgacatcgtacaaattgcttagagtaatgataatataatgatgattgttaaatagtacaatttagataatnatcaaataataaaatccagattacaacccctcgcacacagcactctcccacccacccaccctccaactattacagtcgtgaaggactgcgcagtcccgccaccttactaaatgatagtatattgtgtagatatgtggcatcaggttgagcccgacactctacagacacacagcgattacataatatggctctgcagctcaggcgtccgagtgacaagagactgggagtacatgggcgcatgcagaatagcgatccagatagtactacgtatctatatctactgcaactcgcgctctactacatccgaaagcaancagagcngtatctaagtcgactctgggtgtgtatagagatngngtgagcgacatcagagtgctgcgcaccacgataatcgacgagcgagacgtaggactctaacatacagacacgatcaatctcgacaatgtgtcgctggagctcattcgagtacatcgctcgcatactgctcgcagcgtaatatctatggcacantgtgccgcgtactgtgtgcatcgctattggtgaggcnatgacccgagtgcgcgcgtgtgccgacttgtgtgtgatgtaagacgcataccgtctcatgcgactcatccctaacttcatcatgtataggtgagacacgcgctcgctcggcagtcggactaagactccgactatgtaactatggagtatgnagtcacgccgacctagcccgcatatcagcttcgcactacatacgtgatcaacc

SEQ ID NO: 3495 - DNA, 465 bp, Glycine max
  misc_feature (394)..(394): n is a, c, g, or t
  misc_feature (396)..(396): n is a, c, g, or t
  misc_feature (427)..(428): n is a, c, g, or t
  misc_feature (436)..(438): n is a, c, g, or t
  misc_feature (446)..(446): n is a, c, g, or t
  misc_feature (448)..(448): n is a, c, g, or t
  misc_feature (456)..(456): n is a, c, g, or t
  Peptide Sequence Number=SeqID_8105
  Probeset Number=SeqID_13274
gagacggcacacaagggatgggactcccggctcagtttagatctggagaggcggacaagctccccgccagtccaccactgctcctgctcgtcgcacttttccggttgccgtcgactagcccacaatagaggaggcgacctccctttaccccgcaccatcacggcgccagaagaggatgagccccaggagcggccagagaggaggagaaagaagaggggaaggagatggaagtttcagatccaaaaaaatggatgaaaaaaatctgctcctcaaattcgcccaaagagtcctagatcggggatggccagaggaggaagacgacggggagcatagacacctccggatctccaatccgcttctccccccgaggctgtcgtaatgctcctcgtctccnanaactcctcaccaggctcctaccaccagtcgnncagcttgnnnaagtacananagttctangtcgctctc

SEQ ID NO: 3496 - DNA, 1388 bp, Glycine max
  misc_feature (39)..(39): n is a, c, g, or t
  misc_feature (91)..(91): n is a, c, g, or t
  misc_feature (97)..(98): n is a, c, g, or t
  misc_feature (109)..(109): n is a, c, g, or t
  misc_feature (152)..(152): n is a, c, g, or t
  misc_feature (188)..(188): n is a, c, g, or t
  misc_feature (192)..(192): n is a, c, g, or t
  misc_feature (239)..(241): n is a, c, g, or t
  misc_feature (244)..(245): n is a, c, g, or t
  misc_feature (248)..(248): n is a, c, g, or t
  misc_feature (252)..(252): n is a, c, g, or t
  misc_feature (293)..(293): n is a, c, g, or t
  misc_feature (311)..(311): n is a, c, g, or t
  misc_feature (316)..(316): n is a, c, g, or t
  misc_feature (358)..(358): n is a, c, g, or t
  misc_feature (362)..(362): n is a, c, g, or t
  misc_feature (369)..(369): n is a, c, g, or t
  misc_feature (427)..(427): n is a, c, g, or t
  misc_feature (429)..(429): n is a, c, g, or t
  misc_feature (432)..(432): n is a, c, g, or t
  misc_feature (482)..(482): n is a, c, g, or t
  misc_feature (507)..(508): n is a, c, g, or t
  misc_feature (621)..(621): n is a, c, g, or t
  misc_feature (633)..(634): n is a, c, g, or t
  misc_feature (688)..(688): n is a, c, g, or t
  misc_feature (747)..(747): n is a, c, g, or t
  misc_feature (750)..(751): n is a, c, g, or t
  misc_feature (937)..(937): n is a, c, g, or t
  misc_feature (1037)..(1038): n is a, c, g, or t
  misc_feature (1174)..(1174): n is a, c, g, or t
  misc_feature (1281)..(1281): n is a, c, g, or t
  misc_feature (1361)..(1361): n is a, c, g, or t
  misc_feature (1370)..(1370): n is a, c, g, or t
  Probeset Number=SeqID_13275
agtgtcgtgcgcgaggtcgctatccagttcctcgatagnactagctcactgataagatgtatactatatcatgtcgtcgctccatacaganaattannaatctaatgangtagcgcagatcacacacaagcaccaggagtatcatatcaatngcgtaaacatcatctcgatagcagacgatagtaggncganacacacacagcgatattgctgatcactccagtcgtaatacgtgatgnnnggnntgncgtnctgcgctgacgctcggaccgtcagcgtagttcatttccttngaaatacgcatgtagtgncacanaagcgccacctctcatgccgagcgctcacacgagcggagacngagnggcggtnggtctccccaccgtcacagcagacgcaaccgcagactcgcgacgatcgagagcgcgananagnggtggatagtcgcgaggtattcggcgtcgtagtaaatcagttgaaccggnacatcagtgatacggcgaccgcggnnagggacatgagcgattatgatacatgatactaaatcgtagcagtgtggcgtacagcaccagcgacgtgcgactcctctcagttcttcacaaattcaatatagcattcattatncaagctggtggnntcacgtgttagtactccatcactatagatcttagaatagggttcatgagccganatcggtggtgcgatccgtagctgagtgctcgcgcggacgtgagagacatgcctccaacnccnncggtttcatgtcatatctgtgtcctcatctacatgctgcgggaatgcttagtgttcgggtggcagcgtcgccggcacatgtatactatgacgatgacgtgatattgtagcgggtcttcttgagttgtacggtggatgagaaacgcagcagacagaccacgtctgctgcacggatctagagcgcggngggatggtaggatcggcggtgtcttgagtcatatggatggttgtatataaggagtgagccagtaagtctgagataaggtcccgagcaggcaggggtgggnngcgtatatgcgcggagtgagcgggtgtgtgctgggggacgaagataaagaaagtgtttgagaaagggttggtgggctatttgcgagtgatttacaatattatgtatttcatattcgtgagaatgtgcatgaggagnatttattcatgtatatataaagtgattggtggcgtgtggtggagcggatgtcggtgagcggggttgttgttgtatatataatctcgtattgatcatttatcgctcgnctcgtctgtcagcatactacggcctctcatctctctaaatttacaacaaaagagaagaaacacagacatattttttcgtngattaatanttaagaagagaataacaa

SEQ ID NO: 3497 - DNA, 2089 bp, Glycine max
  misc_feature (1)..(2): n is a, c, g, or t
  misc_feature (7)..(7): n is a, c, g, or t
  misc_feature (19)..(19): n is a, c, g, or t
  misc_feature (85)..(85): n is a, c, g, or t
  misc_feature (103)..(103): n is a, c, g, or t
  misc_feature (106)..(106): n is a, c, g, or t
  misc_feature (110)..(110): n is a, c, g, or t
  misc_feature (123)..(123): n is a, c, g, or t
  misc_feature (188)..(188): n is a, c, g, or t
  misc_feature (193)..(194): n is a, c, g, or t
  misc_feature (209)..(209): n is a, c, g, or t
  misc_feature (229)..(229): n is a, c, g, or t
  misc_feature (269)..(269): n is a, c, g, or t
  misc_feature (291)..(291): n is a, c, g, or t
  misc_feature (305)..(305): n is a, c, g, or t
  misc_feature (343)..(343): n is a, c, g, or t
  misc_feature (348)..(348): n is a, c, g, or t
  misc_feature (365)..(365): n is a, c, g, or t
  misc_feature (477)..(477): n is a, c, g, or t
  misc_feature (586)..(586): n is a, c, g, or t
  misc_feature (593)..(593): n is a, c, g, or t
  misc_feature (649)..(649): n is a, c, g, or t
  misc_feature (653)..(653): n is a, c, g, or t
  misc_feature (665)..(665): n is a, c, g, or t
  misc_feature (690)..(690): n is a, c, g, or t
  misc_feature (718)..(718): n is a, c, g, or t
  misc_feature (740)..(740): n is a, c, g, or t
  misc_feature (756)..(756): n is a, c, g, or t
  misc_feature (773)..(773): n is a, c, g, or t
  misc_feature (797)..(797): n is a, c, g, or t
  misc_feature (856)..(856): n is a, c, g, or t
  misc_feature (859)..(859): n is a, c, g, or t
  misc_feature (901)..(901): n is a, c, g, or t
  misc_feature (927)..(927): n is a, c, g, or t
  misc_feature (944)..(944): n is a, c, g, or t
  misc_feature (946)..(946): n is a, c, g, or t
  misc_feature (1027)..(1027): n is a, c, g, or t
  misc_feature (1073)..(1073): n is a, c, g, or t
  misc_feature (1093)..(1093): n is a, c, g, or t
  misc_feature (1108)..(1112): n is a, c, g, or t
  misc_feature (1124)..(1125): n is a, c, g, or t
  misc_feature (1184)..(1184): n is a, c, g, or t
  misc_feature (1187)..(1187): n is a, c, g, or t
  misc_feature (1213)..(1213): n is a, c, g, or t
  misc_feature (1217)..(1217): n is a, c, g, or t
  misc_feature (1219)..(1219): n is a, c, g, or t
  misc_feature (1265)..(1265): n is a, c, g, or t
  misc_feature (1273)..(1273): n is a, c, g, or t
  misc_feature (1304)..(1304): n is a, c, g, or t
  misc_feature (1309)..(1309): n is a, c, g, or t
  misc_feature (1349)..(1349): n is a, c, g, or t
  misc_feature (1372)..(1372): n is a, c, g, or t
  misc_feature (1375)..(1375): n is a, c, g, or t
  misc_feature (1384)..(1384): n is a, c, g, or t
  misc_feature (1395)..(1395): n is a, c, g, or t
  misc_feature (1405)..(1405): n is a, c, g, or t
  misc_feature (1438)..(1438): n is a, c, g, or t
  misc_feature (1441)..(1441): n is a, c, g, or t
  misc_feature (1446)..(1446): n is a, c, g, or t
  misc_feature (1456)..(1456): n is a, c, g, or t
  misc_feature (1459)..(1459): n is a, c, g, or t
  misc_feature (1486)..(1486): n is a, c, g, or t
  misc_feature (1517)..(1517): n is a, c, g, or t
  misc_feature (1591)..(1591): n is a, c, g, or t
  misc_feature (1593)..(1593): n is a, c, g, or t
  misc_feature (1623)..(1623): n is a, c, g, or t
  misc_feature (1628)..(1630): n is a, c, g, or t
  misc_feature (1665)..(1665): n is a, c, g, or t
  misc_feature (1678)..(1678): n is a, c, g, or t
  misc_feature (1680)..(1680): n is a, c, g, or t
  misc_feature (1682)..(1682): n is a, c, g, or t
  misc_feature (1705)..(1705): n is a, c, g, or t
  misc_feature (1709)..(1709): n is a, c, g, or t
  misc_feature (1718)..(1718): n is a, c, g, or t
  misc_feature (1726)..(1726): n is a, c, g, or t
  misc_feature (1754)..(1754): n is a, c, g, or t
  misc_feature (1758)..(1758): n is a, c, g, or t
  misc_feature (1762)..(1762): n is a, c, g, or t
  misc_feature (1770)..(1770): n is a, c, g, or t
  misc_feature (1832)..(1832): n is a, c, g, or t
  misc_feature (1835)..(1835): n is a, c, g, or t
  misc_feature (1838)..(1838): n is a, c, g, or t
  misc_feature (1847)..(1847): n is a, c, g, or t
  misc_feature (1877)..(1877): n is a, c, g, or t
  misc_feature (1891)..(1891): n is a, c, g, or t
  misc_feature (1932)..(1932): n is a, c, g, or t
  misc_feature (1942)..(1943): n is a, c, g, or t
  misc_feature (1970)..(1971): n is a, c, g, or t
  misc_feature (2013)..(2013): n is a, c, g, or t
  misc_feature (2062)..(2062): n is a, c, g, or t
  misc_feature (2088)..(2088): n is a, c, g, or t
  Peptide Sequence Number=SeqID_8106
  Probeset Number=SeqID_13276
nnggggnttttttccgggnctggccgcggacgcgcggcccgccgccgtcttcttgtgtcacccgctcacagtcgtcgtcgtcgtntctcgttatggttttgtnacncatnattatttctttcnaccatatatctattatagtcctctaggtggtatcactcacctcaacatttcgggtaggtattatnataannaaattgcaaacaganacaacaccagccgctatccnctaactataatctacatatagactatatgtgtaatagtantaggcgagtcggagcagcaganactttaacacggtngctgtatatcgtctagtattattagtatatatctctcntacangtacatcgtactatctnagttcgtcttagtatgtagtacgtcttatattgactcaattttcactgtctccgtttctcttctcgatttcgtgcaatcctcgcctctccgcttcgtgagttgcatgtgtgntcggctgcggctcgcgcgtcctacccctctcctcgcctgtgcgacgcttctgttctgttgttgtctactgattgactctctacgacctacgtctgctgacgaggtcttncgattancgtcgcgacactccgtgacgtatgtcgtacaagcacagatcaaccacatgttatgnagangatcacacgcancactacgaactcagtcacccgcggncgcgacgagcgccgtactttatcataantaacgcagcagcacacgtaaancaacagcggtcgtcanctatcacgcgcccgacnatctcctcgcctctctcatctaanacagtgagcgacgtcacaacgcatatcagtgacgacaagagacgggagagacgcgatancancgcgtgcggagcgaacgtctctgcagcgcagcgcggcgctgnactgacctcccgtagcgacgtagcgngccgcgtcggcgctgantncacatactcgtcggacggctaggcagacgcgtgatgacataggcgtgatgcagaacgatcgtgcgatgtgtgcgatctggntgtgtggttgcggttgcgctcgattagtgatttagtagtgcgattnatataggcatgtgatgaggntgtgtgtattgattnnnnntttatctagctnnagagttatagacgagtgacgcgggtgatcgaatcatacacttagatttctggtgatggntgntgattactgagtgttatatagtaggngcgntngttctgcttctgtctgtcttctgtatctccacaccccacccgcccncgcacacnctcactgtcgacgtcatatgttatgtgctangagtnactgtctgtgcgtagtcgatctgtctgtctacagacttcncgctcgcgtcgcccgctccaacnacncaattagtncacatcacacnacactcaccncaggagatacgcgtctactatgcgagaagcgcnctncaccntgtgtttgtnacntctctcgcctctacttccctgagactnacgtcgcgctgcatcacgtgatgtgattgtncgcacaactatacgacactagctgtcggatgacgcgtgacagtcgtcactcattctcatcatgtacgtagaganangtgagcatacgtagtgtagcgcgtgtgagnatgannnaccccgatcagatacgcgtagtcagagcgtagcgntaccactgtcganangnagcacacactgtctgtcactgcnactnggttgtagntactagantagtcacactgtctagatgcttgtcgcngctntacngactccanaagtactactttggcatatgactacgtctatctacctcattaatgcatgctagatcagacgntantantcactctanctcccattcattcatagaatcagttcgtcncagtacagatcagngtcagaagatagtctccctcgtctctcatgtcatcattacncccgtctgtnnacagcatgcaaatctactgctattcannagttgagatcacgtactccattcatccttctgcttgtcgtcntgctgtgatactgctactgacttgctatactgctcgtgatcgtttccgntcgctcatgtgtccatcactttagtng

SEQ ID NO: 3498 - DNA, 1620 bp, Glycine max
  misc_feature (1)..(9): n is a, c, g, or t
  misc_feature (16)..(22): n is a, c, g, or t
  misc_feature (30)..(30): n is a, c, g, or t
  misc_feature (51)..(51): n is a, c, g, or t
  misc_feature (92)..(92): n is a, c, g, or t
  misc_feature (95)..(95): n is a, c, g, or t
  misc_feature (116)..(116): n is a, c, g, or t
  misc_feature (127)..(127): n is a, c, g, or t
  misc_feature (140)..(140): n is a, c, g, or t
  misc_feature (248)..(248): n is a, c, g, or t
  misc_feature (254)..(254): n is a, c, g, or t
  misc_feature (320)..(320): n is a, c, g, or t
  misc_feature (355)..(355): n is a, c, g, or t
  misc_feature (695)..(695): n is a, c, g, or t
  misc_feature (741)..(741): n is a, c, g, or t
  misc_feature (866)..(866): n is a, c, g, or t
  misc_feature (930)..(930): n is a, c, g, or t
  misc_feature (978)..(978): n is a, c, g, or t
  misc_feature (986)..(986): n is a, c, g, or t
  misc_feature (1107)..(1107): n is a, c, g, or t
  misc_feature (1262)..(1262): n is a, c, g, or t
  misc_feature (1343)..(1343): n is a, c, g, or t
  misc_feature (1381)..(1381): n is a, c, g, or t
  misc_feature (1502)..(1502): n is a, c, g, or t
  misc_feature (1517)..(1517): n is a, c, g, or t
  misc_feature (1537)..(1537): n is a, c, g, or t
  misc_feature (1539)..(1539): n is a, c, g, or t
  misc_feature (1564)..(1564): n is a, c, g, or t
  misc_feature (1582)..(1582): n is a, c, g, or t
  misc_feature (1602)..(1602): n is a, c, g, or t
  misc_feature (1607)..(1607): n is a, c, g, or t
  Probeset Number=SeqID_13277
nnnnnnnnnttttttnnnnnnntttttttnttttaaaacatctttttaatntctataatttatatattatatatcttataataaattctttntcncttactccattttatacatgnagacggcgtangctaataatctcntaaatatattttcactactatatatactaattaacatcatcttctctaaataatatgtcatcgtataatttcatcacacatctacgtcctgtccgctactcgcgcggnggcggngattcgtgctccttctttctggctctgcctgtcttgcgcgctccctctgtcaatcacttatcgaanagcgtggctcgcgaccctctctcaagctaccgtgngctacgatcggtatagtgtatatagtagtagtcttatttagcggctacataaggatgagagttagaatatagtagtagacgtcactaccttctctccactcccgtatatcatcttctacttctctgatatatatatctaatacttctaatactacactctagttgatcgattcagtaatagtaatcggcatctgtgtgtggttgtgtggcgactcgtctctgttacacacgttactatactacatatacgagatatatgcacgactccgcatgtcatcactccagtacgcgtactcgcgtcattgtacgctagcatgcgcgactcctgcgtctcacactncttgatgtcatcgctaatatctcatgtaccacaactcccgatcgtncctcatgcaatcgtcgccctgcgctgcgtactcgtcattctcacataagtcatagccctatagtcgctgcctaccgccactccgctcgcgtacgcacgtcgcgcattccgctctcgttctcatgncgtatacgcatatgcgtctactcatcatcctatatctgcagtatctctagcatatatagtatantatgatatcaccatgcacccgacagatctgataacgcgctcgcgctancaagatancagacggcaatatacgcgacgcgtgaggcgcatatacgacgagctctctatcactcatactcacgatcatcgcatgactgcgcgtctgctatgctctcacagcgtccatacgtacatattnagtaccttatagcgattgtcttcctgactcgcgacctgcacacgcaatcagcgctcatgtgcacgtctgctcgctctactgcactctcgatctcatcactgtgcttgcaggtgcgcaaatgtgtcgcgtctcatagtgtgaactatgtctatctnctataatctactccctcatacgcctcgctgtgtgtccatctctctctcgtacattctcatgtctatctctatgacgtagcnacaccgacacgtgggacacgatatgccaaatgactgangctatcacgcacctctcctgctctatatcctgcttcgtctcatcgcgccggctctctcatataccgacactcctccatctatatactcacccgacgctcgtcgtcacacgctctcgtgccntcgtactacagtganactcagtgagactggctcanantgagacgagcaacgcgagcgcgctntgcgtagtatagtgtgtncacgagtcgcgactctaganaggcngctacgtcagcag

SEQ ID NO: 3499 - DNA, 1498 bp, Glycine max
  misc_feature (5)..(8): n is a, c, g, or t
  misc_feature (16)..(16): n is a, c, g, or t
  misc_feature (19)..(19): n is a, c, g, or t
  misc_feature (45)..(45): n is a, c, g, or t
  misc_feature (47)..(47): n is a, c, g, or t
  misc_feature (88)..(89): n is a, c, g, or t
  misc_feature (93)..(93): n is a, c, g, or t
  misc_feature (95)..(96): n is a, c, g, or t
  misc_feature (618)..(618): n is a, c, g, or t
  misc_feature (620)..(620): n is a, c, g, or t
  misc_feature (633)..(633): n is a, c, g, or t
  misc_feature (650)..(652): n is a, c, g, or t
  misc_feature (656)..(656): n is a, c, g, or t
  misc_feature (660)..(660): n is a, c, g, or t
  misc_feature (670)..(670): n is a, c, g, or t
  misc_feature (673)..(673): n is a, c, g, or t
  misc_feature (811)..(811): n is a, c, g, or t
  misc_feature (819)..(819): n is a, c, g, or t
  misc_feature (903)..(903): n is a, c, g, or t
  misc_feature (1013)..(1013): n is a, c, g, or t
  misc_feature (1023)..(1023): n is a, c, g, or t
  misc_feature (1076)..(1076): n is a, c, g, or t
  misc_feature (1102)..(1102): n is a, c, g, or t
  misc_feature (1201)..(1201): n is a, c, g, or t
  misc_feature (1222)..(1222): n is a, c, g, or t
  misc_feature (1255)..(1255): n is a, c, g, or t
  misc_feature (1365)..(1365): n is a, c, g, or t
  misc_feature (1377)..(1377): n is a, c, g, or t
  misc_feature (1394)..(1394): n is a, c, g, or t
  misc_feature (1396)..(1396): n is a, c, g, or t
  misc_feature (1401)..(1401): n is a, c, g, or t
  misc_feature (1425)..(1425): n is a, c, g, or t
  misc_feature (1457)..(1457): n is a, c, g, or t
  Peptide Sequence Number=SeqID_8107
  Probeset Number=SeqID_13278
aaaannnnaaaaattnaanaagtcggagagattatattttatatnanacaaacacaaaaacagtggggcgcgctccgttccctaaaannaaantnntgagtgggaaatagtgatagtagtcttgttgtgtttttgtatgtaacaatgtaatcaaccaccgggtggcgacaaaaatatcgcgcttcatacatatatatttcgtttattataacatcttctgttttactaccgcgtgtattagagtggagagggatatctctacacacaccagacgtgagatgacatagtagggcgatagagaatggagtgggatgagatagaccgaagtctaaagtatagaagggtgtgtactataaacatcaaacacacgagatacgatacatctattttcaatataatatcgcgtgcttacaactattctatataaaaacctactttataatgataatttaatcttctcttcctatctcaatctgtcgcggccgtggcgcccgctagtctgtcggtgtggctagactagtccgtccctcgctgatactcgtccttcttttcttttctgcgcttcttatgcttcgtgtttgctgcgtgtcgtctcatatgtcatcatatgcgtttctnanaattatttactanataaagagaaaaattgnnnaaanatanacatagaatnacnacaaatataaaataacgcgccgctggcaacaacgcatgcgtcgccactcctcaatcgcggtgcactacactgacgatgagtgtgtggtagtgtcatagacaggtatgttcacattttcggctgtagaattataatggngaagattngggtgggtctctgcctcgccacccgcgctctgcgtggctttggttgtgctgttgtcttctgcagcgccacactcaaatacaccngcagcacagatgcgaacaaacgcgagggcagacacctatacaatatcatagtgttcgcgcatgatgatcgtcgatactagtctccgttgtccttcctctctctccgctcntctgtccgtntctattgtgtgctgacgagtgcgcgcggcgcgtggcgctgtacgctgtacggngcctgtatcgtggtgcggtgtcgggngacactgtgacgggcgcgacatactcctgtcggctgactctctgtgttgttgcatcatcatctttggtctgcgtggcgcccgtcgccagacatcagaancggctgtcgcatcatctctantcacgcatgcgtgtcgctccatatgcaccgttncatatctcatacggactgacgtctatcgtatgccgcgcgccgatactcctgtcagacgtgcgttgtatcgtatgtcaatggaggcatgcgcagggtggcggtgtgcgtanacgtcgcacgcncaacaacagactcatancngacgncgcgctgtgactcacactgacccncggtgtgcgctgcgtgggctttgccatgtctncgactgtctcacggtctgctctcacgcatctcgtgagcgcg

SEQ ID NO: 3500 - DNA, 1855 bp, Glycine max
  misc_feature (1)..(1): n is a, c, g, or t
  misc_feature (84)..(84): n is a, c, g, or t
  misc_feature (131)..(131): n is a, c, g, or t
  misc_feature (172)..(172): n is a, c, g, or t
  misc_feature (258)..(258): n is a, c, g, or t
  misc_feature (282)..(282): n is a, c, g, or t
  misc_feature (295)..(295): n is a, c, g, or t
  misc_feature (326)..(326): n is a, c, g, or t
  misc_feature (379)..(379): n is a, c, g, or t
  misc_feature (415)..(415): n is a, c, g, or t
  misc_feature (420)..(420): n is a, c, g, or t
  misc_feature (464)..(464): n is a, c, g, or t
  misc_feature (556)..(556): n is a, c, g, or t
  misc_feature (802)..(802): n is a, c, g, or t
  misc_feature (1467)..(1467): n is a, c, g, or t
  misc_feature (1469)..(1469): n is a, c, g, or t
  misc_feature (1516)..(1516): n is a, c, g, or t
  misc_feature (1786)..(1787): n is a, c, g, or t
  misc_feature (1794)..(1794): n is a, c, g, or t
  misc_feature (1796)..(1796): n is a, c, g, or t
  misc_feature (1808)..(1808): n is a, c, g, or t
  misc_feature (1820)..(1828): n is a, c, g, or t
  misc_feature (1831)..(1831): n is a, c, g, or t
  misc_feature (1833)..(1835): n is a, c, g, or t
  misc_feature (1837)..(1839): n is a, c, g, or t
  misc_feature (1849)..(1855): n is a, c, g, or t
  Probeset Number=SeqID_13279
ngtggcgtgtagtgtgattcaatgatgaaatatgagatagtggtggtcggggttttcgtgcaacgtactactcttattcgtgtnccgcatactgatgcagatcgccggcgtcgacaccacggccgcgacgngggcggcacagaacgacgcgcggggaccatgccacgcacgngacgtccttctgcatgcgctcgctgcgcttcatgccgatcatcgtctgttctgatacgcgtcgcgtgtcgtcggtatcccgctcancccatcgtgtgagttgcgcgcacnaccaacgacggcncgacatatcatactaatttcgttgtcactanatatatactagtcgactgctgtgtatatatgactatacacgcttacagatttncactgatactggtgatctttgcgtgacatgttattnatcanttcaatgtgctcacctctcacttgacacacatcaactatacatnataatacatataggtagaaagaatatctaatagatcctaacacagatgcagacttcacagatcatagtatcaacagtcgatagaatagtcangagcaactcgctgatcgtgcgtcctcgcatcttatcgagcttgacttctacccatacttccacgacgtgccggaaacgaccgcacatagtattgaactgtatgacatcgagcagtgcgtgagtatgcgatgccgctgcagcacgcctcgctgcccgtgtgcgcgtccttgatgtgtagtaccgggacgcgtgcgagagattgaaggaggagagcaaagagtataataagaacgctactacacaagnaatgtatatctaatcatgcagacagcagcagcagatagagacacgatcagatcatccatcatcttcagatgaagcccgctacaatcacggttcgcagaatctgtccgcaaccagatcctgcatctggcgtagctgggtggtttgctccgcgctcgctcgcgtgttacatcttctctatacaccacgcccaagcatcaagcagcgcgagctcgcggagtgagagaatgttgcgtgtgtgtgggcgtcgagaaaatccaccataaatccctcccaacgagccaccgcagacgcacggctggtactagagttcccctcctctgtggctgcgtgtcgccgcttctctgactgacacctaacgcacgcgccgtgcggacttatttactactcacgtcctgcacgtgtcctggctcttggcgcactgcgaacccgccgccgccccgagtcggcatggccgctttcgttatcggtcacgcactgcccgtgctgttcccccgctcctgcctgttgggggtgtccgtagctctgcacggcgggcggcgccggcccgagctggcgtaccggcgactctggcacgacctcttctccgccgctcacgctccgcttccctttctttcttctcctctctcctcccttccccgctcttttacccttctcgctaatatccncncccacatctcttctcaagcccgtttcgtgccgccgacctgttacacnttccccgtcaatttattcttatttctattacacataaccctatcgtatattagattcattcaacccaccataccacaccctccatctccagaacgctacggcagtggtgcgtagaggagagaaagaggttcagtcgtattggtgagatttactctcgctacgctcgcggggaggttgtgcgctgctgttgtttcttgaggaggacgttgcgccggcctctcccgtgacttgaagtatccctcccgactattatttgtaaatattaattanntgggaangntgaataaataanattcttaattannnnnnnnnatnannnannnggtataaaannnnnnn

SEQ ID NO: 3501 - DNA, 620 bp, Glycine max
  Peptide Sequence Number=SeqID_8108
  Probeset Number=SeqID_13280
actacttgtagtagaatataataataacaaataataatttagatataaataatgggaagagcatatgtggatacaacagtgattgtgataaagagagcagagaatggagaatctcaatttttatttgtagaaaagaaacaatggcccaaattaccagtttgggaattaccctcagaggaagttatcatgggagagaaaattgaagatgcagcaaagagggcagtatacaaacaagcgaatgttgaaatcaagttggagggagttttcactctaagacacacatctcagatgcttggaagcgtaagagcaattatagtcgcatcaccaattgaccctaatactattaaaacaacaaaaaatggagaaccacttgaagtaaaatgggtttcattatttgagttggattctcttccccacttctatgtagaggaagttagttatattagacaaattgctgcaggcgcccagatccaccctttgtccgtaattaccgagagcgaatactcactaggaagaccaacgaaatttctcagcatgctcaccagcccatggtggtatgcgacccttggttttgtaattggaattatagctagaaatgctataaaaatatcaattacatc

SEQ ID NO: 3502 - DNA, 535 bp, Glycine max
  Probeset Number=SeqID_13281
atcaaaatcacaaaacactatattcgaaatccaaaagaagatcgtaaagtgaaagtgaagaaaagatgagttctacaagcaaagcctggacggtggcggttagcatcggagtagtagagacgttgaaagaccagttgggtctttgtcggtggaactacatgttccggtcggtgaatcagcatctccggaacaatgtcagaactgtttctcaggggaaaaggttctcgtcttctgttgccgccgctaactcgtctggtgagagtgaaaaggcaaagcagtgtgaagaatcgcttagaacggttatgtatttgagctgttggggtcctaattgattaggacttagtttataatgtatagttctgtaatttctaagatggcttggagaaatggagttttaatataatttttggttcgaaaaagaaaaatgtcaatgaaatatgagatgagccgatccaatcacccaaacaaaaagcaacaacaaaaaataaatgtatgaaatttgtaagaatacagcttaaagcaaagctttcaactt

SEQ ID NO: 3503 - DNA, 494 bp, Glycine max
  misc_feature (461)..(461): n is a, c, g, or t
  misc_feature (467)..(467): n is a, c, g, or t
  misc_feature (474)..(474): n is a, c, g, or t
  misc_feature (476)..(476): n is a, c, g, or t
  misc_feature (478)..(478): n is a, c, g, or t
  misc_feature (480)..(480): n is a, c, g, or t
  misc_feature (484)..(484): n is a, c, g, or t
  misc_feature (490)..(494): n is a, c, g, or t
  Peptide Sequence Number=SeqID_8109
  Probeset Number=SeqID_13282
atttgagtcgattaagtgtgttccgtggcatacggaattcagggttctcgagtgtcttcacgccgttcatcttcgtctgctagtttcgaacgtcgcgaggattcgaaaaccatgggtttcgcagcgatcgggaactctccccccaagacgtacgggcggaaatccggctcctcccgtgtgggcggaaactcgcacgtgctgatgaggatgcatgcacttaactgctgtagaaagtgcttccgtcgcaaagcctagaaaatcggatttatctgttacagttaaaaaatctggagttggttttgcagttgaatttattttttttttttttcttatagatttttagatttttatgttgtactggatcttataaatgttttatgattctgtcgtttaacatctgaacttttatcaaaaatcttggttctacttctagatactttaggaaaaagcttaaaaaaagnttatcnataccgncnancnccangggggnnnnn

SEQ ID NO: 3504 - DNA, 641 bp, Glycine max
  misc_feature (363)..(363): n is a, c, g, or t
  misc_feature (464)..(464): n is a, c, g, or t
  misc_feature (538)..(538): n is a, c, g, or t
  misc_feature (641)..(641): n is a, c, g, or t
  Probeset Number=SeqID_13283
acactgaagtcatattaccatttcttgttattatcttgtggcatcactgacacactgattggtgtgagcgcggctatcactggaacagcggctgagtgtgcgatcgacaaagcagagaaatggggttggcaatcggcgggagatttagcgattcacgtgattctcagtacgctaggagcccaagacactgccagagtcgcgcgtgtgagcaaaaggttctgttcttccgcttcccacgacactctctggatccctcactgcttccacgccctcgctctgacacaagccctcgatcatctcggaaaaccctctctcttcctccgaggaatgctatcaagcatggccgaggagcttttggtatgnatcctcggtctcttgttaaccctgcaaaaaggcgccgccctacaataacaccctggttgaccaataattttcctcaagctcaggccactctttgtccaggngctactgcaacccgactttcccccactcgggggaagtattcaaagccggaaattggcccctttccctccacggnatcctttttctcgtttttccaatttgggtaattaaattgccttacgcctcatcctgaataattatttactctctgcccggtctcttttggagcccaaaatccn

SEQ ID NO: 3505 - DNA, 431 bp, Glycine max
  Peptide Sequence Number=SeqID_8110
  Probeset Number=SeqID_13284
cgcgagccgaataaactatacgtcacactttactacaacacagattttgatgaattgctgcgaacacttgaaggcagtgaatgaaccaacgcacttcacgccccaactttttctacctccactgctaagcgagaaaactcacctagagaaatgacacgagttcagactcctaatctacctggtctttctgatgatcttgctgttacttgaatgattcgagtaccccgtatcgagcacaggaaactacatttagtctacaagagatggcgccaccttctgtctgaagacttcttttattcactcatgaaaagtcttggaatggcagaagagtggttatatgtcatcaaagcagaccgtgctggaagaatttcagtgcatgcttttgatcccatctaccaactatggcaacctcttacccctgttcctggaga

SEQ ID NO: 3506 - DNA, 551 bp, Glycine max
  misc_feature (450)..(450): n is a, c, g, or t
  misc_feature (520)..(520): n is a, c, g, or t
  Peptide Sequence Number=SeqID_8111
  Probeset Number=SeqID_13285
cccctccccacatcgccccctccccccccggggccggctctctataagcggggttcccgcccgtttttcccccgggaaaagggcccggggcccccccccccttaaatggggtttgcccccccttttgccccccccgggtttcccctttttctttccggccttttttttttggggaatttgggggggaaaacattttccccccggaacccctttttcccccttttaaaacaaaccggaattttcccccccctaagggggccaaaaatgggggccccccccggggggggccccctttaaaatttgggggtcccccggggcccgggaattttttttttttttttttttttttttttttttttttttttttttttttttttttttttttttttttttttttttttttttttttttttttttttttttttttttttgggttttattttttttttntaaaagttaaagatgaataacaatcataaaaatgttttaacgcgataaagtcttaaactgaccccttttntgatgacttatgccaataaagtcttaactgc

SEQ ID NO: 3507 - DNA, 899 bp, Glycine max
  misc_feature (1)..(295): n is a, c, g, or t
  misc_feature (896)..(899): n is a, c, g, or t
  Probeset Number=SeqID_13286
nnnnnnnnnnnnnnnnnnnnnnnnnnnnnnnnnnnnnnnnnnnnnnnnnnnnnnnnnnnnnnnnnnnnnnnnnnnnnnnnnnnnnnnnnnnnnnnnnnnnnnnnnnnnnnnnnnnnnnnnnnnnnnnnnnnnnnnnnnnnnnnnnnnnnnnnnnnnnnnnnnnnnnnnnnnnnnnnnnnnnnnnnnnnnnnnnnnnnnnnnnnnnnnnnnnnnnnnnnnnnnnnnnnnnnnnnnnnnnnnnnnnnnnnnnnnnnnnnnnnnnnnnnnnnnnnnnnnnnnnnnnnnnnnnnnnnnnaggaggatgcccctcttttcggaacggttgtggctatggacgaccctttcaccgtggggccggaacaggactcaaaacttgttggcaaggaagacacaaggttacacttcaatatcgcaggaagagaagggacgaataatggtgatgacgatggcgttcaccgatggagatttctacggcagcaccatcagcgtgttggggaggaacatgatgatgagtgaacactgttagggaaatggctattgttggtggcactggggcttttcgttttgcacgtggctacgctcaggccaggcaatactctgttgatttcaccaaaggagacgctatcgtggaatacgatgtattcgttaaccattattaagttctacgcaccccttttatagtggaatacgataataggtgatagctgcttagaacacctgtattcgtgaaataggtgatagctgcttagaacaccttgcataagacttaaatttctttgggtctttgttctaaattccctaatgttattttcttgacattattgttagctagtccctccccctgatgtttccttcttaactttttccttattgttagctagtccctccctaatacnnnn

SEQ ID NO: 3508 - DNA, 1543 bp, Glycine max
  misc_feature (88)..(88): n is a, c, g, or t
  misc_feature (103)..(103): n is a, c, g, or t
  misc_feature (231)..(231): n is a, c, g, or t
  misc_feature (236)..(236): n is a, c, g, or t
  misc_feature (346)..(346): n is a, c, g, or t
  misc_feature (412)..(412): n is a, c, g, or t
  misc_feature (554)..(554): n is a, c, g, or t
  misc_feature (611)..(611): n is a, c, g, or t
  misc_feature (710)..(710): n is a, c, g, or t
  misc_feature (741)..(741): n is a, c, g, or t
  misc_feature (1317)..(1317): n is a, c, g, or t
  misc_feature (1514)..(1514): n is a, c, g, or t
  misc_feature (1543)..(1543): n is a, c, g, or t
  Peptide Sequence Number=SeqID_8112
  Probeset Number=SeqID_13287
agcgtgctcgataaacgttgtcaactggtgaacactcgatccaatcacgtcgccgacgtgatacagcagagatactgctagattagtntaagaaacgatccanttcataacgcgaacattcaatacatgtgcatacagtactcgatgatcagcatacattaagagcgcggagcactacggacgcaagatagcctcgtcagcgcgtgcgaccactcaagaataatgccggcngacancggaggtcgatagctcagacaattaacagtcataacataggacagtacgcgactacgtccgacgaccgccgctatattgctgcacgcacaccggacgcggtattgtgcgnttcgagacaccatgctgataataactcagtcgcggtacttgttgcattgagtacgacgcataccgncgccacacaacgtactgctgcgtcatagtatacgagtacacacacgcagctgcgcgcgtccggcgtacagggatgtgacgtatgtagcggccgcataagagagatatgaatatatgatcgcgcagagagaatatgcagacgnaaatcctaagacagcggatatagtcatgacattgatgtaatgagagacggaaagtgnagcagtagctgtggacactcggaattgcacacaaactccgaatcgaacggagcacaccgcggcagacacgcgtagcacatcacagagagagagatgagnaccaggatcgacagcgagcaggcgcgagcantacgcagacagcagtgatcagacacgtgtctctagttacagagcgtgcgagttcaccagctactcgctagtagacgcatcataagacacgagcagagggtgcgcgcgcggcagagaaggcggaatgatacgtgggagtaaggtggaatgtgaaccaacatacgtgggcacgtcatagtaacggtggagcgagagaggcaaacacgggagagagaggacagagaggcgggatagatatggtgcacgcgcagagggtggcgacgaggggaggagggacatagaaggatgggacaccgcggaccgcataagacaggcgcgtcaggtacgtgaataacaagtatctgagatcaacccacacccgcagaattgcgagttgcgcgactggaagcgccgtatagacgtcgtggcgcgctccctacgcaaccagagtgtatttgagctggatacgcgttaagtagatgagaggacgaaatctttctcatccgcaggctcgcctgcctgacagcagcttagtcactcgcccacgccactcttcgatctgttgtgagatatcactagcatgccaacaatcctcatngcttatcggagcaccccgacacagccgcacataaacccgccgaacctctcatagcataccgacgtcggccggcggggcggagtgagcgccacgtacacggtcacgagtcacaaatcgacggacagctccccagtcgcacgcaatgaaaagcactgagtcagagcattgagcgcgtaagagcgaaagccgaaaaaagngaaagaggggggaggggggcgtagggaan

SEQ ID NO: 3509 - DNA, 761 bp, Glycine max
  misc_feature (1)..(1): n is a, c, g, or t
  Probeset Number=SeqID_13288
naatgtcttgcccaatatctgacgagggatcgtcgaaactgtaggaagcttccgttgcttgaatacctcgaggttacatacggcgcaatgtcaggagaggtctgaaagttgcaggccatctttgtccgaatctgaagaaactgaggctaaactccgaaactaaccggcagtctaatgacgaagagcttaatgacaaaaaagctctagggattgctgaaagcatgcctgagctacgccacctccagctcgttgggaacacattaaccaacaggggcttgaccgccattctcgacggttgtcctcacctggaacaccttgatttacgcaagtgtttcaacgtaagacttgaaggggatctggagaagagatgctccgagaggatcagagagttgagacgcccggatgagtcaaccgctgatcacccatatggatttaacattgaggatttattaggccccaacaactattattgggatgacttaagcgctggttacccttatggagctaacgtctatgatttatcagactgcagcgattattattcggatgagttctactaagtctactagatactgaacaatgcagaggcacatgtggttttcgcttgccttgttcagattcctctgttctttctgtttagtagtctctttaactctcgtttgaacaatgtgatgatgtttttctttttcattggtgccaaggagttgtgttaaacggtatttaatttaatagatctcttctgacgaaaaaaaaaaaaaaaa

SEQ ID NO: 3510 - DNA, 468 bp, Glycine max
  misc_feature (105)..(105): n is a, c, g, or t
  misc_feature (348)..(348): n is a, c, g, or t
  Peptide Sequence Number=SeqID_8113
  Probeset Number=SeqID_13289
gcccttacacacctccaccacctctcttaccattttcaaaattcaatacacacaccaatcacatgtgccactttcgcccaagatgttctagaaggaagaacaaangcttcacaagaacacaatcacaagcatcaacccctaatatttagaccaactagccttataaatagaaacataacaactgagagagaaaaaatggcagctcaagtcttccaacctagtcataagatgccaactatgagcattgaagaagccaggctaaaagaaatggaaataataaacaaatggcaagaaaaaaatgtcaaactcataaaagaagtcaattcatcttagcacaatgatagaaantcaaagctgaaacaagacgataataatgaaaatgatgatacgtgacaggacaaaacaagggcttgggatgactgggaaaatgataatccacggtgggctggggatcacaccactacccct

SEQ ID NO: 3511 - DNA, 423 bp, Glycine max
  Peptide Sequence Number=SeqID_8114
  Probeset Number=SeqID_13290
gcatcatatatcttcatggtgagtttcggtggcatcaatttcacaggaagaagttgaagtgcacttggccatacctgattgaatcgattttctcaaacaacattcaaatctcaaatctaactgtcctcaattccacattatggaacgttcatactgtttacagtatttattcttttgtgcaaggcatcaccatacttgtctctgtcacatcttctaccactgatggcatcaatccactattcttgctcatatgtaataataaaagattgctatatcatttctggtgatgtctgtctggctgtctactagtggtatgggatgacttcccgataaaattttgttgtgccactcaactgctaatgatatgaaggctaacatgcatttcaccatacagtgcacccattgccttgggaagtgagatgt

SEQ ID NO: 3512 - DNA, 787 bp, Glycine max
  Peptide Sequence Number=SeqID_8115
  Probeset Number=SeqID_13291
aattaaataattaaatttaaatactaacctcatcactaacagtaaatctcagcttgaacataatggaaaacttcgaagactctgaattttttaatgctatcgccagctcccttgctactgctcaaagagactttgacgagtatgctgaacactttgatgatgagcctgaacaggaagacttgggtgacttcttgatgaaccacaatcttggagatgaagaacccttaactcctgaagaaaaggaagatattctacatggactcaagagattacctccccaatacttaaaaggtatgtggaatgtcgtcactggacttattcaaactcctgaagatgaagaacagtccccaacccttaagctcagacaattggatagttacttaaagagaaaaactaatattattttccaagaagaacaaccaggacaacaggatgatgatgaataaatcatcgaacgctatgctgactttttaaaagaaggtcagaaaatagtaagtaacctctgccctaataggttgagagaaagagaaacaagtgaacacaacaaactaattactcttaatgaaattatttaacaaataacagagacaaatttgatgagtgtggttcggtttataaagagctcatttgtcgtttttgatttgacagtaaatttttttataagggatatttctgtctttgttataaggtcttatgagagattgcatcaatagcttttattattacctcgtaatctttccatataaataattagtaagtaaatcggaaaataataacttcaatcact

SEQ ID NO: 3513 - DNA, 1435 bp, Glycine max
  misc_feature (29)..(29): n is a, c, g, or t
  misc_feature (87)..(87): n is a, c, g, or t
  misc_feature (92)..(92): n is a, c, g, or t
  misc_feature (127)..(127): n is a, c, g, or t
  misc_feature (141)..(141): n is a, c, g, or t
  misc_feature (149)..(149): n is a, c, g, or t
  misc_feature (152)..(152): n is a, c, g, or t
  misc_feature (166)..(166): n is a, c, g, or t
  misc_feature (177)..(177): n is a, c, g, or t
  misc_feature (197)..(197): n is a, c, g, or t
  misc_feature (201)..(201): n is a, c, g, or t
  misc_feature (250)..(250): n is a, c, g, or t
  misc_feature (386)..(386): n is a, c, g, or t
  misc_feature (479)..(479): n is a, c, g, or t
  misc_feature (545)..(545): n is a, c, g, or t
  misc_feature (557)..(557): n is a, c, g, or t
  misc_feature (721)..(721): n is a, c, g, or t
  misc_feature (723)..(723): n is a, c, g, or t
  misc_feature (822)..(822): n is a, c, g, or t
  misc_feature (824)..(824): n is a, c, g, or t
  misc_feature (937)..(937): n is a, c, g, or t
  misc_feature (957)..(957): n is a, c, g, or t
  misc_feature (982)..(982): n is a, c, g, or t
  misc_feature (1113)..(1113): n is a, c, g, or t
  misc_feature (1141)..(1141): n is a, c, g, or t
  misc_feature (1188)..(1188): n is a, c, g, or t
  misc_feature (1194)..(1194): n is a, c, g, or t
  misc_feature (1196)..(1196): n is a, c, g, or t
  misc_feature (1206)..(1206): n is a, c, g, or t
  misc_feature (1222)..(1222): n is a, c, g, or t
  misc_feature (1254)..(1254): n is a, c, g, or t
  misc_feature (1261)..(1261): n is a, c, g, or t
  misc_feature (1277)..(1277): n is a, c, g, or t
  misc_feature (1298)..(1298): n is a, c, g, or t
  misc_feature (1300)..(1301): n is a, c, g, or t
  misc_feature (1359)..(1359): n is a, c, g, or t
  misc_feature (1367)..(1367): n is a, c, g, or t
  misc_feature (1398)..(1399): n is a, c, g, or t
  misc_feature (1406)..(1406): n is a, c, g, or t
  misc_feature (1408)..(1408): n is a, c, g, or t
  misc_feature (1410)..(1410): n is a, c, g, or t
  misc_feature (1412)..(1412): n is a, c, g, or t
  Probeset Number=SeqID_13292
catatgacttatcacgtactgatcacacngatgcgacgtgcgtctgtcgtagctgtcgacgcactgtagtcatgtgttgaacgaccntcctnaacgtatctgatgatatactgacgctataggtgtnattcagcgtgtgtnacgatgtntcngtactattcatcgncgtgctcgtantcggaatctagtcgtactcngacngacactctgatatctatacgcagtgcaccatgcacacactgagatagtnagtacatttcgagtacgagacgcagcgcacggacgtagtctcgcgacgtcgctgtgtgtgacgtcgatggtatggtctcgtcacgagacgagtatagcgattatagtctagtatagtgatcgatgtcgcagtagangtctcatatctctgtacatgctgtatgtcatactgctagcgtattacgcatatgtgtgcggggtcgcattcactatcctgtagctacacactntagtgtgatgctgtcagtgtcggtcgagttgagttcgtgtgtatggtgttgaagtcgtgtacgcgntgtgatgctatntcactcatgtatctatatatgtatatatcatcaacacatagtgtatcgaggacgaggcacagtcacacctgcgcacttacatcgcaacggagcagcgcctagcgcgagcagcgcgactgcatcgacacagacgatgtagctcgctcgtcatatcacattattantntcgtgaatttcgcatctcattcactagtgtcattccttacactcttcgtatatcgttatatctcttcacgtatagtggcgatgagtcagtatagagacnantagcattgtatatgctattgtatgcatgaggaatgagtatagtagaggtcggatgtgaccaagtacgcgtgcgagagtcctcgtgagtgtgagctctgagtagagaacgttgngtatgtaggaagattgatangacgactgtatgcttccgcgcagcnctcagcttcgcatattgagtagcgtgagacgcagctcattgagagcgtagaagtatgagagtagatgcggcatcgatgaggctgacttgacgttccatatgatgacatgcgtaatacagcagcgcgtgctncagctaacagagcatgacgatcagctantgatagtgagcacacgccctgctcgacatcagccgctcgcatacgtncttatntnatctttagcnttcatatgattcttcntgagatatactctaccgtcgcgtggagtgcgngggtagncgcgtacgagtgcagngagaatacactcacatcatcncnncacaccctcttgttgtcgctcgtcatgtgttgtctttgatattaattactatatagtntccgacgncggcggcgcgcagcgcacgcagagaaagaanncagcagnanananagccgcgcagcgcggaaaaaaac

SEQ ID NO: 3514 - DNA, 279 bp, Glycine max
  misc_feature (129)..(133): n is a, c, g, or t
  Peptide Sequence Number=SeqID_8116
  Probeset Number=SeqID_13293
cttgaatcaaatgcgtgcagcggtttgtatatgtgacatggtgacagttgcttgacggttgaatcattggttgttccagagcttgataagaaatcattttcgccagaccctggtaattttgaggacagnnnnnatgcgagacatttcattgattctctacaagatgaagttcgaaagtcaaaagagtgcccaaaaggattagtaggaaaagtgaatactctaccctgaagatgcctcctgttagctggtcaaatgaaaagtattacttggagcaggtca

SEQ ID NO: 3515 - DNA, 1657 bp, Glycine max
  misc_feature (77)..(77): n is a, c, g, or t
  misc_feature (235)..(235): n is a, c, g, or t
  misc_feature (628)..(628): n is a, c, g, or t
  misc_feature (631)..(631): n is a, c, g, or t
  misc_feature (703)..(703): n is a, c, g, or t
  misc_feature (722)..(722): n is a, c, g, or t
  misc_feature (995)..(995): n is a, c, g, or t
  misc_feature (1078)..(1078): n is a, c, g, or t
  misc_feature (1289)..(1289): n is a, c, g, or t
  Peptide Sequence Number=SeqID_8117
  Probeset Number=SeqID_13294
cgtccatcaagttcgtcatatgcgtagtactacatcaacggtcgtactctatcccgttatacgcgtgacgcatatcnctctgggtcagcagccgagatagctcatcttattgtacacgacgtgtccctacacgatacgtcgtgattcgattgtctagtacagttagttctatatagatcgctatgcaattacatcatatacagttatcccagtgctgatggctcgtgtgaacganctgggacacctgtgtatacttcatctcgtgcgacggtacctgtgatatctctgcgcgtgtgtctctaccggagatgtcatatatgagtgggtatgcaggtcgacgaggcgataagaccgacgaagagcagacagacgcgatacgcagatatcagcgtatagcgtggcactctatactcgacgcgctgctctcatagtgtctgtggtccatcggagcggcgcgcggtagtcgtgaaggcggagacacggtttacaaggcaattagactcatcttgtggcgcgatccgtgtgaggctgacattggtacgtcctcataccattactatcatgtgcgtgatccgctcgaggttcgtgcgaagagctctgcctcatgtagagttgggcgattcaagtntcntgagtagaccggcactcacaacatgtatcaagtcgacgatcgcagtttcagccgagcctattcatcgcgttngcgtgtattcatatcatgngggtaggtctaggacgcgtcacttcaacacgtactcggcgggagagtcgatcacaggtgctcagtcatctagcgtcgcagagcgcgtggtcgctacgaacgtcgatcgcactggcggcctcgtggtatgtgttagtgttcatctacatagatacaaatcgcctgggccaccgactcttgatagagggtgcatatgtcgggactacgcgtatagtctatgtaagcagtattggagtacctagcgtcctctaccctatcatactcgtcgtgtcgngtgaccctgctctccgctgtaccctgtgtgctcccactctatatattccgcgacctacatctacaggacaggagatgacacgnagtacgagcgcgctcatcccgctgtccaatgagtaccacgactggagagagtatcgctaacgacgtcgcggctagacggagagagggagcacaagtgctaggagttgtctcatgaggtgatgagaaggagtctggatacggtgaacggtaaaacgatagcgccgacgacgggcagcagcgacgttagcacattcaaaggagagtagtgtangtggtttgctgacagtagaaggagcgagtgagcggagagtaggggtcgtagcagcgatccgcgcaacgcgcaactacagacaacaggagcatgagagtcttcgatatctgtggagagttatgagagaacaatgtgatcagaatgccatactacttttgccgccaggtagcgggatccgtattagtgctgagatatggtccctttcttcctacaattagtattgctgcgctcagtggttataattttcatattagtcttgtataattgtgttgttttcgcgtagtattaagaagtgtcggagcacattattctgatccgtggtaccctgctggtgacgcgggtgggtctaattagatcctcggataaaa

SEQ ID NO: 3516 - DNA, 1438 bp, Glycine max
  misc_feature (28)..(28): n is a, c, g, or t
  misc_feature (126)..(126): n is a, c, g, or t
  misc_feature (168)..(168): n is a, c, g, or t
  misc_feature (389)..(389): n is a, c, g, or t
  misc_feature (463)..(463): n is a, c, g, or t
  misc_feature (504)..(504): n is a, c, g, or t
  misc_feature (577)..(577): n is a, c, g, or t
  misc_feature (890)..(890): n is a, c, g, or t
  misc_feature (958)..(958): n is a, c, g, or t
  misc_feature (1095)..(1095): n is a, c, g, or t
  misc_feature (1134)..(1134): n is a, c, g, or t
  misc_feature (1141)..(1141): n is a, c, g, or t
  misc_feature (1274)..(1274): n is a, c, g, or t
  misc_feature (1372)..(1372): n is a, c, g, or t
  misc_feature (1381)..(1381): n is a, c, g, or t
  misc_feature (1396)..(1396): n is a, c, g, or t
  misc_feature (1400)..(1400): n is a, c, g, or t
  misc_feature (1415)..(1415): n is a, c, g, or t
  misc_feature (1421)..(1421): n is a, c, g, or t
  misc_feature (1437)..(1438): n is a, c, g, or t
  Probeset Number=SeqID_13295
cgagtggcgcgatatagtcgcgtgacgngcgcggctgtacgagcgatgtatgtctgtatgatatatgatagtacgattgattagagcgcgagaccctcgtctcatatatacacgaatataccgagngggtgtgtcagtcgtagtctcatcttgacgacgtagagacgngactatgtgcactatgatgtccccgtagcgaggggaataagagtgtgtatattatagatagcgtatatctcagtagcgagtgcggtatagagtgtgagtgtgatatcataatatactatatatgcgtataggacgttatgcgctgttgtatattttgattattcgtgtatgaatctcacagggttgcgtacacagtatacgattgtgcgctacagaggganggtgacacgagtgagttaactcaaatggtgctgaggcatgtgcggcggtgatgtgacgtggcatagagcggtgntactgtgcagcgtcactgatcacaagtgagactatctatgnggctgctcgcaggtgtatgatcatattgcatgagaggataatgagaggtgtgaatgagatgacttcgagatcnctaactatgaagtgagtgtgtgtagtgcatacatcgcatatgttcgtatattgtgtgtagaggaggagagaatatatatatatactatagctcgcccacgcacactagggaggtgtgcgagacaaggtgtggtaacatacgtgtcattatcacgatgttaatattgtatatatatatttggtttcgttgttttatcacctgcgctcccatacctctacttctatataagcagagaggggagtgagggcacaatagagcatatacatatcagaaaacaccataatacgagtagaagcaggagcgggtgggtgangaagggtgagttgagatagcgtgaggttgtataagttataattaacataccgtcagtgatggagtaangatatcaactctcccactccttcatctaaaatgttatgttaaatctctgacattgagccatactcatgggctactatctaactatgctcgtgttttgtgtgttgctgctgcttcattacgtatacgagtcgtatggngtatgttgtattctaggtgcgtggatatgtacatggtcnctccttngggctgctctcccctttctcacatctatcagcgctggccagcgccgctggatcgtctatctataataatcacaaaccaccaataacaattcacgatatgaagtaagtaatagacagaaacaacataaaagtanctcctatagtggttgtttcgacggtaactagaatattagatgtgggacgggtcatgggggggcaagttctacgtggcgtttgatactttgttgcaacnttgtctggntgaattgtggttgtnattnttcggaccaagaganaaaganattaacaaacaaaaann

SEQ ID NO: 3517 - DNA, 538 bp, Glycine max
  misc_feature (502)..(502): n is a, c, g, or t
  misc_feature (521)..(521): n is a, c, g, or t
  Peptide Sequence Number=SeqID_8118
  Probeset Number=SeqID_13296
attgtggaaactcatgctgaactggctcagtcatctacgacaagcagactttatcctcgtttgctgtcatagccagggtgtgcccgttgctatctcgctaatggccaaactcatccagttaggctgcctcagtccaaacgctcgcatcggcctctgcgcgatggccggcatcaacctaggccctttcctcgactacaagtctcgtctctttggtggtagcgcactcgagctctttgacttctgcgacaacagcagcaaagtctctcgcacatatgcccagtcgctcgacatatgcttgagacacggtgtccgtgtatcttatgtcggcagtcttgacgatcaactggtcagtcttgagagtagtcttcacgccccgctttctcacccctacgtcaatcgcggtctcttcgtggacggccgcttgcacgcccctaatttcttgacccatcttgtcatctttgctatcaagttgcggaaaactcgggagtctctgatcagggcnctcattcgggagctctcgntctccttcgctggaagt

SEQ ID NO: 3518 - DNA, 636 bp, Glycine max
  misc_feature (601)..(636): n is a, c, g, or t
  Peptide Sequence Number=SeqID_8119
  Probeset Number=SeqID_13297
gcacgagcccaactctgccattcgaaaatgtgccagggttcaactcatcaaaaatgggaagaagattgctgcattcgtgccaaatgatggttgcttaaattacattgaagagaatgataaagtcttaatagctggatttaaacaaaagggtcataccataaataatattcctaaaatcagattcaaagtcgtaaagatttctaatatatctctcctagctctcttcaaagaaaagaaagagaagcgctaatcttagtcttataaaacatatcctctctagtttctccaaaaaaattattataaattttacttcataagactaaataagttctatgaacaatgttgtatctctctaatacaatttttctaaactaaattaagtcatatctcatacttgaactccattgttatagagaatactttgtattaagttcggtcgaatgttacctcgaaagaaagagagagaatgagaaacttaagaagggacggcggagcgaatgcggcgtgtatgagtcgggggacgcgcgctcagtgggcggctgttgcaacaggcggagtgaaagaggcgtgcgtggccaactgagtaccgtgcaggaggtgnnnnnnnnnnnnnnnnnnnnnnnnnnnnnnnnnnnn

SEQ ID NO: 3519 - DNA, 416 bp, Glycine max
  Peptide Sequence Number=SeqID_8120
  Probeset Number=SeqID_13298
ctcacaagtcaataagactgttcaacggcagagtgaaatggatgagaatttttcatcgctgctctatgaaactttaagaatccttaggtctcagatagcggagggtactgcaggatgtggtgtacaccacatatttaaaaatgaaacactgaaggaaattagcactcggataccaaggacaaaagaagaacttttggagataaatggcatcggcaaggtgaagctcaacaagtacggggatcgtgtacttgcaaccatagaggagtttctcaaccaatttccaaacggaagcaagagaagcagcagcagcggcggcagtaacgagcaaaatgaggccgtgaagaagcgaaggggcttccccgccattcacacgtctggtaacggcaatgactttgaagaacgcacagttcagtcca

SEQ ID NO: 3520 - DNA, 758 bp, Glycine max
  misc_feature (742)..(743): n is a, c, g, or t
  misc_feature (756)..(756): n is a, c, g, or t
  Peptide Sequence Number=SeqID_8121
  Probeset Number=SeqID_13299
agttttctcatacccactttgctgcttcagagaaacaacggaaggaaagagatggaaaacacaaaaaaaaaaatgggggggggggaacttccccgcccccccggagggcggtgggggggaggggaagcgccccggcttttttcttcaaaaaaaaaaaaaaagcggggggggggtcttcgcacccccccccgggtgcggcagcctgcgtggtgggcggcaaaaaaaacatttttctccctgcgtgaacaaacaagaatcgcaaaacaaattgttggtgtggactgctaaaataaaaaagaaaaatgacaaaaacccttatgttttaaacaacaaaaaataaactcaaaaaaaaaaaaagacaacaccagagaatttgtttacttatgtttttctttttttttgtgtgtgtattgacgtgacttcataactaataaaaagaaaaaaaacaaaaagaagaacaaatgtggtgtgggggcgggggcgggggggggggcccgggtcggggagggggaagggggcgggcggggaggcgaggagaaccagaaaacatagaagaaaagcaacaaaaaataaagtaaactaaaaagacataggcaggcgaagagacgacgccaggtgaaccaaaaggagaagaaagtaaagccagaggagggaggggagacggccggcgcggagggaggccgggccgtgggaagagcagtgggtgggagggtcagcggctagagtggatgtgagggttagnntgaaaagctgaanag

SEQ ID NO: 3521 - DNA, 1609 bp, Glycine max
  misc_feature (3)..(3): n is a, c, g, or t
  misc_feature (5)..(5): n is a, c, g, or t
  misc_feature (13)..(13): n is a, c, g, or t
  misc_feature (126)..(126): n is a, c, g, or t
  misc_feature (130)..(130): n is a, c, g, or t
  misc_feature (183)..(183): n is a, c, g, or t
  misc_feature (189)..(189): n is a, c, g, or t
  misc_feature (267)..(267): n is a, c, g, or t
  misc_feature (505)..(505): n is a, c, g, or t
  Probeset Number=SeqID_13300
ctngncgtgcgtntgtatgcattcatcatgtgtccacgttgttatgctgttagactggtccgcgagctgttcatctgctcatatatcgtagatcatgatagcgtcgtatatatcctgtggatacangttngtactgtgatatatagagacatgtcttaggaccgctttgagatagctagaagnatgagntagcgtgtagctgacgattcacgactcgacggtgcatgagaagagtagcgtatagtatgtcactctcgtgagatctancgagtgtcgatgtagtacgtgtgcgctcgcatcagttcgtatactagtgacacgtgcgtcttggtatcgtatcagtgttgcatgtcacacaggagcggcaggatctatctatcagagtcgcagagacgctacgtgtattatatagtgtaccgcagacacgtatgtggagacggagtgaggccgttgtgagttcatcactatgtgaggagagagctcgcatatgaagcattaacgactnacatagggtcacagtaagagagttgcactacctacactatgtagttagtgtatagtatctgtaggctatgttagacatatgacacgtcgtcatcaccgaatctgcgccccgtctactgtcagtgccgtctagttcgcacagctcgcacctgctgtaaatagtcagatctacgcgagacgcgaccgcttacagcgcatccgcatgttatctagggctctaggtatattatattgtccatgtatttagtaggcgcacgcgtatcagcgataaggttatatgcttacgattgaacgcactctgcatgctgcacaagatccatctgcgagaatccgagagtagatcgtgagcacttacagacctaatatccgatactttccatgacgctgccatgctcctattgtatagagtaatggtcgactttgcgacctaccctgctttacaactagtggtgcaagagaagatcgtaccgcagtactggggactcatttctactctcaggacaaccaatcgagtatatggaagtatcagaatgtgccggtcagtgcggcgggcgtctacgatctcattcgcactgcacaggcaggagtgccgagtcagagcaccaaggatagcatacttatctgggtgcgtcttgacagtcgcgtgccatgctcatgttggagctcgcctcgagctgtcatgctaggatatcttatgagtacgattgtcacgacgaatatagttaggtgttggtgttgagaagctacaccttgaggagttcaggatgacatgtatacgatgaggagaattgcgcgcaagacgcacattgtgggttgtcgtcacacgttgcattctgagtggttatgctcgtcgttctccatggctattgtccgtggggggctaagaaactcttatacaggtgtttgtgtcttttgtatgtagggagtgtctcttagggtagatgagtcatcgtgggggaatatcctgtcagacctcgggggattctcttttggagaatatgagcgtgctccccccccccacggtgatgcttcccacttttggtgtgggcaagtacatagtttaatttgcggcgtggcgttgtgtcggtttcttggtttggtggtc

SEQ ID NO: 3522 - DNA, 1901 bp, Glycine max
  misc_feature (892)..(892): n is a, c, g, or t
  misc_feature (921)..(921): n is a, c, g, or t
  misc_feature (936)..(936): n is a, c, g, or t
  misc_feature (947)..(947): n is a, c, g, or t
  misc_feature (1024)..(1024): n is a, c, g, or t
  misc_feature (1054)..(1054): n is a, c, g, or t
  misc_feature (1063)..(1063): n is a, c, g, or t
  misc_feature (1092)..(1092): n is a, c, g, or t
  misc_feature (1208)..(1208): n is a, c, g, or t
  misc_feature (1222)..(1222): n is a, c, g, or t
  misc_feature (1309)..(1309): n is a, c, g, or t
  misc_feature (1377)..(1377): n is a, c, g, or t
  misc_feature (1402)..(1402): n is a, c, g, or t
  misc_feature (1427)..(1427): n is a, c, g, or t
  misc_feature (1512)..(1512): n is a, c, g, or t
  misc_feature (1532)..(1532): n is a, c, g, or t
  misc_feature (1587)..(1587): n is a, c, g, or t
  misc_feature (1628)..(1628): n is a, c, g, or t
  misc_feature (1635)..(1635): n is a, c, g, or t
  misc_feature (1660)..(1660): n is a, c, g, or t
  misc_feature (1711)..(1711): n is a, c, g, or t
  misc_feature (1767)..(1767): n is a, c, g, or t
  misc_feature (1774)..(1774): n is a, c, g, or t
  misc_feature (1780)..(1780): n is a, c, g, or t
  misc_feature (1787)..(1787): n is a, c, g, or t
  misc_feature (1789)..(1789): n is a, c, g, or t
  misc_feature (1805)..(1805): n is a, c, g, or t
  misc_feature (1874)..(1874): n is a, c, g, or t
  Peptide Sequence Number=SeqID_8122
  Probeset Number=SeqID_13301
gcacctcggctctagcgaaactgaccagcaagagtataattattacgacctatccacacccacagtctcgccaaccagctttatatagaccacgaatacacaccaagaaatagtgattatgatactacgacacgggctgcatggctaaactcacacctgactacacgcacgtcgacggagtcacccgtgcgaaatcgaccctcgcgcgcttagcctgtagtagtcaggcagcgctcgcgcaggcttcggactgtcgtatcgagaatgcgcgatgtgcgggtctggagtatggcgagatgttattaatttactaactatgagtcacccgacgccgcgtgactctctacctcgacgctaaatattaatgatgcacgaccagaaaatgatgcaacttacttgtcgcagtgatgcgcccgcccgccccgccagtaacgcatttcgatcgcgaccgttgtattgaggcgcgcctttgtaccaagttggtatagcggccgggagtgtggcgtggttgatagttaggacagctatacgatgagttaagttatctcttccacctcccgctgctgcaagatcgtcctctacattgcttattgacttctccgctcatgaagtgtcctgctcgcctctgtgcctgagtcgatgactcgcggatctcgtatctcggatgcgtcatgcctccgcgcggcacgagctagggatggtgtatgttccatctcgtttatatattcgtataatatagcaccgataagtgccgtgcacgagaagacatcgcatgtaatgtctacctacactcactatcccgaccgttcctcacctcacgtcttgatacatatatagttaagccagcgtcatgcgagtatactgtatatgagtatcgccgttgtgctgcttncattaatagacgatggcgccggacgagtnatgacaatgatgtgntgtgcggcgtncgtggtatcgcggcacgcgctgctccaatgatactgcatatattcattgtctcctgcgcactccgcatcgagatatntatcgtgtcgagcgagcgccgacacgccanttggcgtgnacgccagtgccacctgtgcgatgacgtgnatgtatgttatcgactaccgagtgcgcgaggcgatatagcgagcgcagtgtgagatgtgtacagtgtgagtccggcgccgagcgagatcgctgtacgtagagctctgacgtgcgancgcgtctatctgtntggatactgtagcatgccctgacagctggaagacgcgactcaccgctctacttatgactgaatatacaaacgttagcacgtacacgnagcatcgcgcgtccgccatctaattgaacgagtactgagacgtactacttagacgtgcttgtacctangtagtgcagctagctgagactactngtcttggattgtgcgagcggacaancagcgtatatgcacaccatgatacgcgctgcgtgaatcacgccatgcatgtcgacgctcgagttgaatgagtgcgactgtattantcgagtagttgctgcgtganctgagcgcgctgctctcgcacgcgaacgcgctcgatggtgatacttgctcatttntatacatgatcagtcgacgtaactagatgagctacgacgantgcgatngcacgtatgagtgcgcagcgcgaancgtcatcgtgtgatgccgataatacgccagagacttgtgtacacacacagnaccgctcagctgtatgatctcagagacgactacgcgctacggcgacggcgaaccancacggcnagcacnatgtcgntnatcacgactagcggtngcggtgttcgctgctagcgcgtacgctcgacacgtcttgactatgacgctgatctagatcatcacatangcagtagcatcgagacattgatgatcg

SEQ ID NO: 3523 - DNA, 1492 bp, Glycine max
  misc_feature (1)..(1): n is a, c, g, or t
  misc_feature (28)..(28): n is a, c, g, or t
  misc_feature (40)..(40): n is a, c, g, or t
  misc_feature (127)..(127): n is a, c, g, or t
  misc_feature (474)..(474): n is a, c, g, or t
  misc_feature (1056)..(1056): n is a, c, g, or t
  misc_feature (1058)..(1058): n is a, c, g, or t
  misc_feature (1119)..(1119): n is a, c, g, or t
  misc_feature (1178)..(1178): n is a, c, g, or t
  misc_feature (1196)..(1196): n is a, c, g, or t
  misc_feature (1202)..(1202): n is a, c, g, or t
  misc_feature (1220)..(1220): n is a, c, g, or t
  misc_feature (1252)..(1252): n is a, c, g, or t
  misc_feature (1319)..(1319): n is a, c, g, or t
  misc_feature (1388)..(1388): n is a, c, g, or t
  misc_feature (1391)..(1391): n is a, c, g, or t
  misc_feature (1398)..(1398): n is a, c, g, or t
  misc_feature (1402)..(1403): n is a, c, g, or t
  misc_feature (1413)..(1416): n is a, c, g, or t
  misc_feature (1420)..(1420): n is a, c, g, or t
  misc_feature (1433)..(1433): n is a, c, g, or t
  misc_feature (1448)..(1448): n is a, c, g, or t
  Probeset Number=SeqID_13302
ngggagttgtgtgtgaggagagtattgngggtctgatgtnttcgtctgatggtggatctcgacaagatagtgtgtggtgatgacgtgagtagggcgacggtagtgagtcgcagagagagtcacaggntgatgtgtatgtgagatgagacgcatgaacgagatgagtgagacatgagacgtgtgcatgcagtcatgagcgcagtgtgctgtctcgacggacgagtgagatgactccgccacattcacacacgactcgccgcctgccgtcagccgtctgacgtcacacgcatagtgtgtccatgagcagagatagtgtcgccgcgctgtgattctacgcgtcgagtgattgtagagtgcagagagtaacaatggctagctcgtagtgagtatgaccatagcgccactacgtcgcgctgagcggattgagacacagcataagagatagaggaggagagggagaagtaagagagatanggacgtgagaggaggaagcaggcgcggcggagagacgcgatagctcgtctaggttgaggtatatatactaattacagctgatgtgtgggtgggtgcgtgacgcagctagacagaaacaacataagttgtatctcactctatatagttatatgccacatgcatcggggtgatacaacagagaatgacaagaggagtaagaggatggccagcaccggaagagcagcagagagaagcggcacggagatgagagtgatatgttgctacgcttctcaatataatattcagaagaaagaatgcacgttatagttggtttttctctgctctcgcgggcgccccgcgcgcgcgagtgcgggcgttgtgacgtgttaaatgatgacccaagcaagctgaacacaatattgagagagaggaatactacaatatatttgtccagcccacacagattcgtccttctcagcgtctgaatcacccacccgcctctcagcttctccttctgataatgatacaatcacacatcccacttactcatacaagagatagacacacacaagacacgcagcacacagaacccctccttctcgnantcgccctgcaccaccactcgtcccagcactacctacaccgcctcacaaagcacgaccggcnggcgcaggcggacacgagacaaagaactaaaccacaagacaatacataacaaacaatanaaccacacgtaatacatngcaaanatcgaccccgggcacgcnacacctcgctgtacttccgctcctccattctnctttagtgtctcaatactacaaacaccgccggggaccgctagagtgtgagcggagacgatcagtggngtctagagtagcaccacgagtcaagccacagtagacagtattcatcgcaccactgctcccccactctcncgncctcgcnttgnnttgtcctgtnnnntgtnaagacaaaataangatataataagatanctaaaaaaacacacccacaaacaaaacaccacacccaaaaacaa

SEQ ID NO: 3524 - DNA, 1351 bp, Glycine max
  misc_feature (21)..(21): n is a, c, g, or t
  misc_feature (30)..(31): n is a, c, g, or t
  misc_feature (38)..(38): n is a, c, g, or t
  misc_feature (72)..(72): n is a, c, g, or t
  misc_feature (76)..(80): n is a, c, g, or t
  misc_feature (83)..(83): n is a, c, g, or t
  misc_feature (764)..(764): n is a, c, g, or t
  misc_feature (842)..(842): n is a, c, g, or t
  misc_feature (857)..(857): n is a, c, g, or t
  misc_feature (947)..(947): n is a, c, g, or t
  misc_feature (949)..(949): n is a, c, g, or t
  misc_feature (958)..(958): n is a, c, g, or t
  misc_feature (960)..(960): n is a, c, g, or t
  misc_feature (970)..(970): n is a, c, g, or t
  misc_feature (973)..(973): n is a, c, g, or t
  misc_feature (975)..(976): n is a, c, g, or t
  misc_feature (978)..(979): n is a, c, g, or t
  misc_feature (985)..(985): n is a, c, g, or t
  misc_feature (987)..(988): n is a, c, g, or t
  misc_feature (1019)..(1019): n is a, c, g, or t
  misc_feature (1025)..(1025): n is a, c, g, or t
  misc_feature (1027)..(1028): n is a, c, g, or t
  misc_feature (1034)..(1034): n is a, c, g, or t
  misc_feature (1037)..(1037): n is a, c, g, or t
  misc_feature (1086)..(1086): n is a, c, g, or t
  misc_feature (1122)..(1122): n is a, c, g, or t
  misc_feature (1126)..(1127): n is a, c, g, or t
  misc_feature (1158)..(1158): n is a, c, g, or t
  misc_feature (1161)..(1161): n is a, c, g, or t
  misc_feature (1225)..(1225): n is a, c, g, or t
  misc_feature (1231)..(1231): n is a, c, g, or t
  misc_feature (1238)..(1238): n is a, c, g, or t
  misc_feature (1349)..(1349): n is a, c, g, or t
  misc_feature (1351)..(1351): n is a, c, g, or t
  Peptide Sequence Number=SeqID_8123
  Probeset Number=SeqID_13303
gtgtggggtgtgggtgtcccntccctccgnnggggctngtattcttcgtcctcggccgtcttgggggggggnggannnnnccnaattatacgataattgaaagggccccccgctcggagctgtgtctgacgtgaggtgcgcccccgcccccccaccctcagcttcgcaacacccgccatggtgtgtttggctctggatgcttacacactctgcacagtagacctcacagctcatagtgtgagagcaagagagacctgtgtacacggacgtctcttcattataagagcacacgctacgagccatctggagtcccctagtagctgtcgtgcagccacatagcctaatatatctagccattagccacagcacatatctatggatattgtgtacggcagcgatctcacacccaccacacaccagccctggcctgtgatgaaggggcaccacaacgcccagctaagcactaactactcaaactcataagatatgatagtatgtatcttagcaatctctgctccccacgcgtgtgggttggggctgccacgcctcccgcgcgcacgttggtggggtgcatatatgcagagtgatcactacctgtatgctgtgggtgttgtcaaagatattatctatacaccagctccccttacccaccccccacactaaaatatagcatgtgtgtggggcgtcttatggcacacagcacttcagggtgtggtgttgcatgagctcagtctagctagacaatcccccgtggtgttgtgatntatgtgtgtggttgttgtcatcatgatgaaccttcactgtggtgcgagtatgtgttgttgtgcgtgcggctcggcatngttgtgcgccgagtnggggtggttaggggtgaggatgtgatgtgagtgatgtgtgtaacaccccacaccccacgccccctcccacctactactagtacacctttntntgtcctctntnttattcactnccncnncnntctccncnntttgagtgttgttatatcgatttaatttganagaagnannaaaaanccncactcctactgatgttatgtatgtgttttaatggtgtgatgagatatanaaacactactagtgagagagagacagcgccgccctncctnntcccctttcctttatgtttgtccattcggcnacnggcgcgcccgaccatcacatgcccacgtgcttttgttttgtattgatcaagaggagacgacgcnacgtcntctatcncacggccgcgacgcagcagttgtgattggtgtggcccccccacgcctcgtctacccattctctctcgccccattgccgactaagagagtcgcacgcgctactctctagtcntn

SEQ ID NO: 3525 - DNA, 857 bp, Glycine max
  Probeset Number=SeqID_13304
gagaagaagacagaggtgacttccccttccgctgccgacgacagcatgcttgccagaccctcggagaacacctttggccagacggagaaacctcaagccgcagcagccaatgccgctcttgaccctgcaagccctgttcacatcacactgcccacattccgcatgctagtgcttgccgacgaaacactcgaatacttctttgactcgggcttcgcaaactcattccacttggccgacgctcccctaccttcatcgacagtcacttcacaatccctactcggccagacgcaacagtcacttctcggagctggcgcgccaaaggatgccgtccctgctctcagtcctggaggtgcgggtgcgggagtcgtgcctcccggcaagggtctgcgtggcatgctcgacaacatcgtcacagacggcatgcgcgtcgcgtctgaggtccgcaggcgcatggacgaagcacagaaggagatcgacaagggcgccagcacacgtggcactgaagatgagtccgatgacgacgaagaagagggcgttggtgatctcctcgatggtgccgatgctcttgcgactagcagcgccaggaaagtgagcggtgctggggatcgaagtgaaagtttgctggattcaccagtgagtaagggaaaggagaaggagaaggagctgcctttgccgccgccaccgtcagcggatgaagcagtgagtaaggacacgatgtttgagcggtgaatgaacacgtcgactaggtatactaggcatcttgttagacgaccgtggacacttacgcagtgttatagtataccacaaatggctatgagaactatgaatgcagtcaaagcccttgtcgttcaatcccc

SEQ ID NO: 3526 - DNA, 596 bp, Glycine max
  Peptide Sequence Number=SeqID_8124
  Probeset Number=SeqID_13305
acgtgggtctaatcagcatgtgctcaatgaggttgagcggagtttgccccatgctttgtgtgttgttaggtgtttggttgccaagaggtttctcctccccggcggtggtgcccctgagattgagctctccaggcaggtgggtgcctgggttaaggtgttgccccggatggagggatactgtgtgagggcattccctggggcgcttgaagttattccctaccctctggctgaaaatggtggtttgaccccccttgccggtgttttttagctaaggaatcgtcaggcccagggtgagataaatgctggaataaatgtaaggaaggggcttattaccaacatcttggaggaaaatgtggtccagcccctgcttgtgagccccagtgcgatccccttggcgacaaagtgtgtgcggatgattttgaagatttatttttttgtaactgtaaggtagggttgattgaacaatttcgaatttggagagaaagtgaatcatcccatattttcttttttttttttttgtctttcgtgctttaattttaagatggaagaaaaaaagttctttaaaaaaaaaaaggataagttaattttacataggc

SEQ ID NO: 3527 - DNA, 631 bp, Glycine max
  Peptide Sequence Number=SeqID_8125
  Probeset Number=SeqID_13306
tttttttttttttttttccttttttttttttttttttttttttttttttttttggtttttttttttttttttttttttttgcccctggaatgagcaattacctaaaaaatgcccttggaatgggcaattacataaaaaatgttcctataggactcaacactcaaacatttaaaggggggtggggcattctatcaaacactttggaggtggaacaaaaaaaaaacctctccctcatggatctacaaaaaaaaatccccccaaccaaaaatcccttttcatcccttaaacaaatgccaaaaccaccaaacttgggttggaaaataaagaaaacaacatttaccttacattttaaaaaaaaagtagggggagggtgccaagcccctgaaaacacaggtcagcactacatacatacaccttaaaaactgggtccatcccaaaatttcccattacaccccatccaagggtggtacttccagcacttcctaaggtggttcctacactcttttcagaaaaatttttgaccctccaaaatgggcattccataaaccaaaaagggagtggcttcccaaaaggaaattaattacatttcggaatggccattttaaaagacaaagagagagccccagaagca

SEQ ID NO: 3528 - DNA, 1891 bp, Glycine max
  misc_feature (15)..(15): n is a, c, g, or t
  misc_feature (364)..(364): n is a, c, g, or t
  misc_feature (576)..(576): n is a, c, g, or t
  misc_feature (613)..(613): n is a, c, g, or t
  misc_feature (719)..(719): n is a, c, g, or t
  misc_feature (917)..(917): n is a, c, g, or t
  misc_feature (1047)..(1047): n is a, c, g, or t
  misc_feature (1060)..(1060): n is a, c, g, or t
  misc_feature (1142)..(1142): n is a, c, g, or t
  misc_feature (1218)..(1218): n is a, c, g, or t
  misc_feature (1270)..(1270): n is a, c, g, or t
  misc_feature (1577)..(1577): n is a, c, g, or t
  misc_feature (1716)..(1716): n is a, c, g, or t
  misc_feature (1763)..(1763): n is a, c, g, or t
  misc_feature (1804)..(1804): n is a, c, g, or t
  misc_feature (1841)..(1841): n is a, c, g, or t
  misc_feature (1878)..(1879): n is a, c, g, or t
  misc_feature (1891)..(1891): n is a, c, g, or t
  Probeset Number=SeqID_13307
ccacctcgacctctntactctacacctccctatatgttgttaattggttgtttgcagcggcgccatggcgacaaaaatatgtgaagggagtctctctgctgacagggcgggcgcgcccgcgtctcatagataatcaagtgggtggtgtctctctggagtgtatgcgggggtagactttagttacggtggcatccaatcccgcgcacaggatccctcccctacatcgccgtagaataaccgttctttcggtgtctgctccgctgtaaaagacggctagagtatgatccagatgtacacagaggcgcgaaccgtgctcgccgtcgtcgcagttggtcgactcctctcttcgtttgtgtcatcaggntaggtgcaggagacataccgaaaaggagcacagacacgtccttattgatacctctcacgagcacgtcgcatgccactcgtcggtctcacgtcaacgtcgtagagataatcatagtactgtaacttaactaatggcggagctcagacaatctctgctgacgacacggtgtcacgcgcagtctctgtgcaagtgcttcgctccgtcatacgtangagaccatgagcgagaaacatcggtcgcttcacgttntaagttactatcacaccacaattcctcacactgcctcctttgtcatagaacgtctccaacgccgcgtgattgagtgtggaacgcagacacgtagtttatagtatanttgatgtacgctggcgtgctgtgcttgttcgcctggtcactcctcagggcttgtatatacatgcaccacccgtccacgcgacgaccacttatacgcatacttagatatatgtgatataatctcacagtgtgcgctagatggacacatagccgccacactcactatgctggaatcatatgtctgctcgcgaccggtagncaccgctcttatatataacgctcgctcctacgcaccgcctatacgctatgcgcttctgattcgcgacgccgagactccgcggctctctatgagcatgatgatatatcagcgctgtcgcgtgcgctctgcnccgcagttagacnctgaacggatcctgtgccttatgctctgatcggccagcatcactgtcggcgcatctatgacgccgatagtcgatatagttgntcatcttcaatatctatttaatgtatcacagacatggagcgtaccagaggaaggatgccttgagtatctcgagtcntcatagaacgtcgcgcgtcagcgaataagtgatgcgttctatgtcttgactntgcaggtgttggtagagagcgatattcgttatatctacagtgagagcgacgatcgcaacagagacgcccagcgccactctctctattacatctattatatggtagtatcgctacactcctgtgaggatggtttgtacattaccgcctgcctaatcgtgtcgcccacacgcctgtgtgtcttattctgattgattacctgaatgaatctctcgcttactacgattatgcatacgatcgtcctgctctgcctcgctacactagtgatatatatagatcggtgcgtcctcgtactacgacctatgcgctntattatgtgagctacgctctctcccgtcctgcgtatctatgctctatctgttatagctcgttctctgagctctattcatatcattatcccagcgtgtcgtgttgtcacagcgatcgagcacgagtatcggtacactagnagctgatatgagttctgcagctacgtagtcgctcgcaagaagacacncatgtagtcgtactcatcaccactcatcatgtcatggttcncaacgtcgagacactctgcacgtcatgattcccagcntgattagattgcgtgtagcttgagctaacgacggtcnntgatcgataatn

SEQ ID NO: 3529 - DNA, 534 bp, Glycine max
  misc_feature (452)..(452): n is a, c, g, or t
  Peptide Sequence Number=SeqID_8135
  Probeset Number=SeqID_13308
gaaagaaacaaccttcttgctgatgaagtcgaaaaactccaaaccaaacttagaattattgaagatgatcatgctagagctgctgaatcattaaagtctgatttcaatgttagactctcagaattagaacgtgagaaccaaaagactagatccaagtttgaaaatagagaaagagaacatgaggctgaaatcaagagtctcaagtctcaatctgaagaattagcgagaatattggaatcagttactgccgaaagagaagaatatctcagaaagtacggagaattatctcttcaagaacaaggcttcaagtccagagaagttattcttcaagaattacaaggaacagttgaaagactccagaaagaggctgatagataccagactgagcttgccgatacagaaagaagatatagagctcaagttgatgatcttcgttctgaatccaatagatnggctgaattgaataaggaactcaaggaagaattacaaactatcaaagaagacccgagtagaagaaatggtgctatctatcaa

SEQ ID NO: 3530 - DNA, 1462 bp, Glycine max
  misc_feature (13)..(13): n is a, c, g, or t
  misc_feature (23)..(24): n is a, c, g, or t
  misc_feature (27)..(27): n is a, c, g, or t
  misc_feature (52)..(53): n is a, c, g, or t
  misc_feature (56)..(56): n is a, c, g, or t
  misc_feature (83)..(83): n is a, c, g, or t
  misc_feature (711)..(711): n is a, c, g, or t
  misc_feature (961)..(961): n is a, c, g, or t
  misc_feature (997)..(997): n is a, c, g, or t
  misc_feature (1119)..(1119): n is a, c, g, or t
  misc_feature (1207)..(1207): n is a, c, g, or t
  misc_feature (1215)..(1215): n is a, c, g, or t
  misc_feature (1267)..(1267): n is a, c, g, or t
  misc_feature (1329)..(1329): n is a, c, g, or t
  Peptide Sequence Number=SeqID_8136
  Probeset Number=SeqID_13309
tcccctccccccnatatctatcnnaanaagaattgcttgggtggtgagtgannaancaccatagtggtagaggtggtattacnccccccctgttctgggttgtttttcgtcagccaccccgccccctctagatggaggtaagagcgtactcgcttattacctaagcccccctgggtgagtccacgaggaggccagctggccgaaaagacgtctaagagagtgtaacggggacgccgagcgcggacgctagaccactactgtaaacgtaggtagacgcggaccgcccgcacgccgggagagacagcacatctcccgagcggcgtcggaggaagtgttagataaaggggaaggccacggcgccccacagaatgggattcatccaacccaacatccagcgcgaaatctaagagagtcataagtccccagcggggcacaccacaccgagcccccctccctcctctcgcacaccccgccgcgcgagctgcacactccgccctcccatatagtactcgaccgacccgcttaacgattcgcacacgcacaatctgtattaatcgcccaacgcagagcgcgaggcgcgtctatgtacaagcccccgcctacgcatccgaccccccactacacagcgaccgcgattacgtgactcagagaggcggtgcgcggaggtgcgcggagggtgaggcccgccaggcaaggcggggcacgtgcgcnccctgtgcacacacgcgacgaggcagcggcccgacggcggcgcgccatcttcggagtgaggtgcgaccgtgccttcatgcgactcacgaccacccataatcggcgggttcaccactcggagtcggtctccgccaccacgctagctcagagtaagcgtgccacggacggagctaatgattcaagaaccgccacgcgtggccggcgcctatgccactccctacaccatctcccagtccaccgaatgcgtccnctatacgtcgccactatctactacacccacatcacncatccaccacgcgatacgctggtcgttacctacgtgctacactgcgagagcgtcgcagtgccgccctccacttctcctaccaccaacgagtgtcacgcatagatagtgactgccggaaattnaacgtgcggtctgtcattcttgacgcggtcgacacactacatatgcagtacgacgaagacactgtcgatagtctacaggaagtctganaggcatantggtagactcatgacgaggcacctgcgcaccgagtctaagggtgcctgtgangtatatgtcgcacactcgacacagcactccacatcaacacacccggactccgcgacccaatnaccgtatctgtattaccaagaagtatcgacacgccacaacgcagatacctctagagacagaggccctcacgtctgaatagacgtaagatcgtgagtctcctgcatctgacgtcgccgcgctactctcgcgcgg

SEQ ID NO: 3531 - DNA, 506 bp, Glycine max
  misc_feature (427)..(427): n is a, c, g, or t
  misc_feature (444)..(444): n is a, c, g, or t
  Probeset Number=SeqID_13310
cttttttttgtgccgaacgcgtgttcgcagcagcagagttacacgaaacacacgacaccagcacaaggggactgcgcggcgacaccatccctccctccctccctctctacaccaatggaaggctcgccggcgacgtgtctccccgaggccgacgcgctccccgatggcttcgtcgagagctcctccgccgaccaggcccagccagtctcctccgcccccgcctccgccgccggcgatcccctgcatcccgccctcggccctgatcacgagggcgccgcccgcgccgacggcgaggaaaccctaggcgctccatacacccccgccgacgccgccgatgccctgcggagcctctccatggccgccgccgcttcggagccggagcgtgcccccgagcagcaggggcccgccgcagacataggaggtgccnaagatgcaatgaagganagctttgtggtagagcaatcggaaccgctggccaatccaaaggatagtggcgagccaaagcg

SEQ ID NO: 3532 - DNA, 338 bp, Glycine max
  misc_feature (15)..(15): n is a, c, g, or t
  misc_feature (23)..(23): n is a, c, g, or t
  misc_feature (40)..(40): n is a, c, g, or t
  misc_feature (46)..(46): n is a, c, g, or t
  Peptide Sequence Number=SeqID_8137
  Probeset Number=SeqID_13311
aaaaacaatcaattnaacccttncaatattaatcctttancaaatncaatggactctgcgctggaaatggctgattcttaactagatctactacatcaaaagcattataaatatgttaccactcataaattttcatactgggctcgaagcttcttgcaagatttgtaaaggacttgtagtgatcatgtgcgacgaaggtcgtgggggattggtttttgattaagctttagaattgttgcactttatccaaacttcaagaatctctcaatggagcacatagtttcagcttacaagcggacgtcaactataacaattcttctttactattatggtacact

SEQ ID NO: 3533 - DNA, 2129 bp, Glycine max
  misc_feature (1)..(1): n is a, c, g, or t
  misc_feature (4)..(4): n is a, c, g, or t
  misc_feature (8)..(8): n is a, c, g, or t
  misc_feature (10)..(10): n is a, c, g, or t
  misc_feature (12)..(14): n is a, c, g, or t
  misc_feature (18)..(18): n is a, c, g, or t
  misc_feature (22)..(22): n is a, c, g, or t
  misc_feature (25)..(25): n is a, c, g, or t
  misc_feature (28)..(29): n is a, c, g, or t
  misc_feature (33)..(33): n is a, c, g, or t
  misc_feature (38)..(38): n is a, c, g, or t
  misc_feature (41)..(42): n is a, c, g, or t
  misc_feature (63)..(64): n is a, c, g, or t
  misc_feature (66)..(66): n is a, c, g, or t
  misc_feature (75)..(75): n is a, c, g, or t
  misc_feature (77)..(77): n is a, c, g, or t
  misc_feature (81)..(81): n is a, c, g, or t
  misc_feature (84)..(84): n is a, c, g, or t
  misc_feature (90)..(90): n is a, c, g, or t
  misc_feature (98)..(98): n is a, c, g, or t
  misc_feature (106)..(106): n is a, c, g, or t
  misc_feature (109)..(110): n is a, c, g, or t
  misc_feature (118)..(118): n is a, c, g, or t
  misc_feature (125)..(125): n is a, c, g, or t
  misc_feature (130)..(130): n is a, c, g, or t
  misc_feature (132)..(133): n is a, c, g, or t
  misc_feature (141)..(141): n is a, c, g, or t
  misc_feature (156)..(156): n is a, c, g, or t
  misc_feature (159)..(159): n is a, c, g, or t
  misc_feature (168)..(168): n is a, c, g, or t
  misc_feature (172)..(174): n is a, c, g, or t
  misc_feature (179)..(183): n is a, c, g, or t
  misc_feature (194)..(194): n is a, c, g, or t
  misc_feature (207)..(207): n is a, c, g, or t
  misc_feature (216)..(216): n is a, c, g, or t
  misc_feature (219)..(219): n is a, c, g, or t
  misc_feature (222)..(222): n is a, c, g, or t
  misc_feature (234)..(234): n is a, c, g, or t
  misc_feature (245)..(245): n is a, c, g, or t
  misc_feature (248)..(248): n is a, c, g, or t
  misc_feature (251)..(251): n is a, c, g, or t
  misc_feature (253)..(253): n is a, c, g, or t
  misc_feature (260)..(260): n is a, c, g, or t
  misc_feature (273)..(273): n is a, c, g, or t
  misc_feature (276)..(276): n is a, c, g, or t
  misc_feature (293)..(294): n is a, c, g, or t
  misc_feature (299)..(299): n is a, c, g, or t
  misc_feature (306)..(306): n is a, c, g, or t
  misc_feature (309)..(309): n is a, c, g, or t
  misc_feature (323)..(323): n is a, c, g, or t
  misc_feature (325)..(325): n is a, c, g, or t
  misc_feature (343)..(343): n is a, c, g, or t
  misc_feature (355)..(355): n is a, c, g, or t
  misc_feature (378)..(378): n is a, c, g, or t
  misc_feature (381)..(381): n is a, c, g, or t
  misc_feature (384)..(384): n is a, c, g, or t
  misc_feature (399)..(399): n is a, c, g, or t
  misc_feature (401)..(402): n is a, c, g, or t
  misc_feature (406)..(406): n is a, c, g, or t
  misc_feature (417)..(417): n is a, c, g, or t
  misc_feature (423)..(423): n is a, c, g, or t
  misc_feature (435)..(436): n is a, c, g, or t
  misc_feature (445)..(446): n is a, c, g, or t
  misc_feature (456)..(457): n is a, c, g, or t
  misc_feature (463)..(463): n is a, c, g, or t
  misc_feature (469)..(470): n is a, c, g, or t
  misc_feature (479)..(479): n is a, c, g, or t
  misc_feature (484)..(484): n is a, c, g, or t
  misc_feature (492)..(492): n is a, c, g, or t
  misc_feature (498)..(498): n is a, c, g, or t
  misc_feature (500)..(500): n is a, c, g, or t
  misc_feature (503)..(503): n is a, c, g, or t
  misc_feature (506)..(506): n is a, c, g, or t
  misc_feature (509)..(511): n is a, c, g, or t
  misc_feature (536)..(536): n is a, c, g, or t
  misc_feature (538)..(539): n is a, c, g, or t
  misc_feature (557)..(558): n is a, c, g, or t
  misc_feature (568)..(569): n is a, c, g, or t
  misc_feature (573)..(573): n is a, c, g, or t
  misc_feature (593)..(593): n is a, c, g, or t
  misc_feature (606)..(607): n is a, c, g, or t
  misc_feature (625)..(626): n is a, c, g, or t
  misc_feature (634)..(634): n is a, c, g, or t
  misc_feature (637)..(637): n is a, c, g, or t
  misc_feature (640)..(640): n is a, c, g, or t
  misc_feature (645)..(646): n is a, c, g, or t
  misc_feature (651)..(652): n is a, c, g, or t
  misc_feature (659)..(660): n is a, c, g, or t
  misc_feature (678)..(678): n is a, c, g, or t
  misc_feature (683)..(684): n is a, c, g, or t
  misc_feature (692)..(693): n is a, c, g, or t
  misc_feature (708)..(708): n is a, c, g, or t
  misc_feature (714)..(714): n is a, c, g, or t
  misc_feature (717)..(717): n is a, c, g, or t
  misc_feature (725)..(725): n is a, c, g, or t
  misc_feature (733)..(733): n is a, c, g, or t
  misc_feature (739)..(740): n is a, c, g, or t
  misc_feature (750)..(750): n is a, c, g, or t
  misc_feature (760)..(761): n is a, c, g, or t
  misc_feature (764)..(764): n is a, c, g, or t
  misc_feature (774)..(774): n is a, c, g, or t
  misc_feature (783)..(785): n is a, c, g, or t
  misc_feature (798)..(798): n is a, c, g, or t
  misc_feature (815)..(815): n is a, c, g, or t
  misc_feature (818)..(818): n is a, c, g, or t
  misc_feature (822)..(822): n is a, c, g, or t
  misc_feature (827)..(827): n is a, c, g, or t
  misc_feature (833)..(833): n is a, c, g, or t
  misc_feature (850)..(850): n is a, c, g, or t
  misc_feature (866)..(866): n is a, c, g, or t
  misc_feature (871)..(871): n is a, c, g, or t
  misc_feature (884)..(884): n is a, c, g, or t
  misc_feature (887)..(889): n is a, c, g, or t
  misc_feature (893)..(894): n is a, c, g, or t
  misc_feature (897)..(897): n is a, c, g, or t
  misc_feature (917)..(917): n is a, c, g, or t
  misc_feature (920)..(920): n is a, c, g, or t
  misc_feature (934)..(935): n is a, c, g, or t
  misc_feature (943)..(943): n is a, c, g, or t
  misc_feature (963)..(963): n is a, c, g, or t
  misc_feature (967)..(967): n is a, c, g, or t
  misc_feature (985)..(986): n is a, c, g, or t
  misc_feature (998)..(998): n is a, c, g, or t
  misc_feature (1002)..(1002): n is a, c, g, or t
  misc_feature (1033)..(1033): n is a, c, g, or t
  misc_feature (1046)..(1046): n is a, c, g, or t
  misc_feature (1062)..(1063): n is a, c, g, or t
  misc_feature (1068)..(1068): n is a, c, g, or t
  misc_feature (1075)..(1075): n is a, c, g, or t
  misc_feature (1086)..(1086): n is a, c, g, or t
  misc_feature (1116)..(1116): n is a, c, g, or t
  misc_feature (1141)..(1141): n is a, c, g, or t
  misc_feature (1146)..(1146): n is a, c, g, or t
  misc_feature (1154)..(1154): n is a, c, g, or t
  misc_feature (1201)..(1201): n is a, c, g, or t
  misc_feature (1220)..(1220): n is a, c, g, or t
  misc_feature (1239)..(1239): n is a, c, g, or t
  misc_feature (1244)..(1244): n is a, c, g, or t
  misc_feature (1249)..(1249): n is a, c, g, or t
  misc_feature (1253)..(1253): n is a, c, g, or t
  misc_feature (1257)..(1257): n is a, c, g, or t
  misc_feature (1283)..(1283): n is a, c, g, or t
  misc_feature (1286)..(1286): n is a, c, g, or t
  misc_feature (1317)..(1317): n is a, c, g, or t
  misc_feature (1342)..(1342): n is a, c, g, or t
  misc_feature (1345)..(1345): n is a, c, g, or t
  misc_feature (1348)..(1348): n is a, c, g, or t
  misc_feature (1361)..(1361): n is a, c, g, or t
  misc_feature (1370)..(1370): n is a, c, g, or t
  misc_feature (1397)..(1397): n is a, c, g, or t
  misc_feature (1400)..(1400): n is a, c, g, or t
  misc_feature (1414)..(1414): n is a, c, g, or t
  misc_feature (1418)..(1419): n is a, c, g, or t
  misc_feature (1458)..(1458): n is a, c, g, or t
  misc_feature (1465)..(1465): n is a, c, g, or t
  misc_feature (1482)..(1482): n is a, c, g, or t
  misc_feature (1485)..(1485): n is a, c, g, or t
  misc_feature (1491)..(1491): n is a, c, g, or t
  misc_feature (1520)..(1520): n is a, c, g, or t
  misc_feature (1547)..(1547): n is a, c, g, or t
  misc_feature (1579)..(1579): n is a, c, g, or t
  misc_feature (1582)..(1582): n is a, c, g, or t
  misc_feature (1587)..(1587): n is a, c, g, or t
  misc_feature (1593)..(1594): n is a, c, g, or t
  misc_feature (1601)..(1601): n is a, c, g, or t
  misc_feature (1621)..(1623): n is a, c, g, or t
  misc_feature (1639)..(1639): n is a, c, g, or t
  misc_feature (1652)..(1652): n is a, c, g, or t
  misc_feature (1658)..(1658): n is a, c, g, or t
  misc_feature (1669)..(1669): n is a, c, g, or t
  misc_feature (1697)..(1697): n is a, c, g, or t
  misc_feature (1758)..(1758): n is a, c, g, or t
  misc_feature (1793)..(1793): n is a, c, g, or t
  misc_feature (1814)..(1814): n is a, c, g, or t
  misc_feature (1954)..(1954): n is a, c, g, or t
  misc_feature (1961)..(1961): n is a, c, g, or t
  misc_feature (2019)..(2019): n is a, c, g, or t
  misc_feature (2078)..(2078): n is a, c, g, or t
  Peptide Sequence Number=SeqID_8138
  Probeset Number=SeqID_13312
ncgngcgntngnnnacgncggncancanncctncgcgncgnnggcacatctcggccagcctanncnccgcacagncntcancgnctacgnactctcgnactctcancgnnctccacancacagancacanannccactcanctctcagcgctacantancgacatcanccannnctcannnnnctctccatcanactcgtcgcactntctacactnctnctnacaacacacatnatccaacacancancgnancacacgncgtgctcacactncgnacgccacacgcaccgannccaanatcgctnctncactcgcctcactnantcacatacgactacacancacgccactcanctcactaccatacttcaaacacnatnctnccgctactcgcactntnncatncacgcacccanccacgncaccgactcagnnactaccaanncactctcggnnactcanacacgnncgccgaacncgctncgactctntcgacntncgntanctnnncgcaccatcaactccttctcaccananncgacgcgctctgctcgtnnctcgcatcanngcancgcgcgccgcgcgcgcacanactaccgtcacanncaccagcgacacgctcgnncactatanccnctncacanncactnnctatcanngcttctacgttcactcanacatnntcacacanntaccgacacacactncaccanctncactacanacaccatngaccannctcagcatancgacacgcanncancgctcacgtnccgcaccannnctccgcgcatctncccagctcatgaccatnctnacanctctncacttnactcatctctcaccggnacacactacactcaanacatntctctcgccgctncannntctnncancacctctcgtcatcagccantgncgcgcacacgtaanncacaactncacaacactcatcacgctantctnagatcacactcgctactnncactccttatantatnctctcactcgtccacatctctactatacctncctctctctctanctacgtctcatcatannccatncactctngcactcgatgncggcgcactatcactctcagcacgcatcancgacacacacacgtcttacactcantcatnacagcganctgcgcgcgcacggcacacgcatgacgcacttcttacctcaacatanacttctccgcacgacccancactctgcagacagcacancaganactancatntatnacgaactaccacactcaccaccctanctncaaggccaccacgactctagtcgatcacttnctcgtccgtcgtcttctcatcgcgncancgncacgcctcgacgngcgctactnccactcccaacaccactctctcagcancanccacgcgccaccanccannccgacacacacacatctcaccgaaccactccaacacatnctcactnaacaccacctctctcanctncgccanctctctacgaccactcacacctccgtcanactctaacatactcacacgcaacgcgncacccgcacgcctacccactcatctatctcancanacaancacaannccgacanccacgccacactacgacctnnnccactcaagcacactnctatacacaacanagacanacagagcacancctgacacagtcgcacgcacgccacgtncgccgcacgacgtccactactcgcacacaccagacactctccacactctctctccacgcgncacatctcacacacacacacacaccacacacacancccgcgcatcacaccatcatntcccacatctcctcatcacactcacctcacacccacaccgcaccctcgcaacaccacgcaccgactaaccgtctctcctaccacaatctacactctcactccacgactcgcctcgtgtctcacgctcccacaccacactnccctccncacctcctacacagacccgaaccgacgccacggcgaccgcgcgacactcagcgacagncacgatcacgtacctctcgcatacgcacacatcaccacgcaccacgtcgtcatcccgtnccgcgagctcgcgtcgcgtcgacgtgtccgtcgtcgatttcgatcacaccg

SEQ ID NO: 3534 - DNA, 2567 bp, Glycine max
  misc_feature (1)..(1): n is a, c, g, or t
  misc_feature (3)..(3): n is a, c, g, or t
  misc_feature (15)..(15): n is a, c, g, or t
  misc_feature (20)..(20): n is a, c, g, or t
  misc_feature (26)..(26): n is a, c, g, or t
  misc_feature (59)..(59): n is a, c, g, or t
  misc_feature (87)..(87): n is a, c, g, or t
  misc_feature (98)..(99): n is a, c, g, or t
  misc_feature (113)..(113): n is a, c, g, or t
  misc_feature (134)..(134): n is a, c, g, or t
  misc_feature (157)..(157): n is a, c, g, or t
  misc_feature (162)..(163): n is a, c, g, or t
  misc_feature (165)..(165): n is a, c, g, or t
  misc_feature (169)..(171): n is a, c, g, or t
  misc_feature (183)..(183): n is a, c, g, or t
  misc_feature (186)..(186): n is a, c, g, or t
  misc_feature (205)..(205): n is a, c, g, or t
  misc_feature (214)..(214): n is a, c, g, or t
  misc_feature (221)..(221): n is a, c, g, or t
  misc_feature (258)..(258): n is a, c, g, or t
  misc_feature (262)..(262): n is a, c, g, or t
  misc_feature (264)..(264): n is a, c, g, or t
  misc_feature (271)..(272): n is a, c, g, or t
  misc_feature (280)..(280): n is a, c, g, or t
  misc_feature (294)..(294): n is a, c, g, or t
  misc_feature (301)..(301): n is a, c, g, or t
  misc_feature (304)..(304): n is a, c, g, or t
  misc_feature (315)..(315): n is a, c, g, or t
  misc_feature (341)..(341): n is a, c, g, or t
  misc_feature (355)..(355): n is a, c, g, or t
  misc_feature (358)..(358): n is a, c, g, or t
  misc_feature (380)..(380): n is a, c, g, or t
  misc_feature (409)..(409): n is a, c, g, or t
  misc_feature (417)..(417): n is a, c, g, or t
  misc_feature (425)..(425): n is a, c, g, or t
  misc_feature (437)..(437): n is a, c, g, or t
  misc_feature (440)..(440): n is a, c, g, or t
  misc_feature (458)..(459): n is a, c, g, or t
  misc_feature (477)..(477): n is a, c, g, or t
  misc_feature (490)..(491): n is a, c, g, or t
  misc_feature (522)..(522): n is a, c, g, or t
  misc_feature (534)..(534): n is a, c, g, or t
  misc_feature (537)..(537): n is a, c, g, or t
  misc_feature (541)..(541): n is a, c, g, or t
  misc_feature (544)..(544): n is a, c, g, or t
  misc_feature (623)..(623): n is a, c, g, or t
  misc_feature (644)..(644): n is a, c, g, or t
  misc_feature (665)..(665): n is a, c, g, or t
  misc_feature (688)..(688): n is a, c, g, or t
  misc_feature (700)..(700): n is a, c, g, or t
  misc_feature (725)..(725): n is a, c, g, or t
  misc_feature (729)..(729): n is a, c, g, or t
  misc_feature (749)..(749): n is a, c, g, or t
  misc_feature (758)..(758): n is a, c, g, or t
  misc_feature (815)..(815): n is a, c, g, or t
  misc_feature (817)..(817): n is a, c, g, or t
  misc_feature (820)..(820): n is a, c, g, or t
  misc_feature (829)..(829): n is a, c, g, or t
  misc_feature (837)..(837): n is a, c, g, or t
  misc_feature (839)..(839): n is a, c, g, or t
  misc_feature (905)..(905): n is a, c, g, or t
  misc_feature (919)..(919): n is a, c, g, or t
  misc_feature (923)..(923): n is a, c, g, or t
  misc_feature (928)..(928): n is a, c, g, or t
  misc_feature (931)..(932): n is a, c, g, or t
  misc_feature (941)..(941): n is a, c, g, or t
  misc_feature (957)..(957): n is a, c, g, or t
  misc_feature (985)..(985): n is a, c, g, or t
  misc_feature (991)..(991): n is a, c, g, or t
  misc_feature (1003)..(1003): n is a, c, g, or t
  misc_feature (1008)..(1008): n is a, c, g, or t
  misc_feature (1027)..(1027): n is a, c, g, or t
  misc_feature (1032)..(1032): n is a, c, g, or t
  misc_feature (1058)..(1058): n is a, c, g, or t
  misc_feature (1114)..(1114): n is a, c, g, or t
  misc_feature (1121)..(1121): n is a, c, g, or t
  misc_feature (1123)..(1123): n is a, c, g, or t
  misc_feature (1130)..(1130): n is a, c, g, or t
  misc_feature (1137)..(1137): n is a, c, g, or t
  misc_feature (1158)..(1158): n is a, c, g, or t
  misc_feature (1207)..(1207): n is a, c, g, or t
  misc_feature (1273)..(1273): n is a, c, g, or t
  misc_feature (1302)..(1302): n is a, c, g, or t
  misc_feature (1343)..(1343): n is a, c, g, or t
  misc_feature (1349)..(1349): n is a, c, g, or t
  misc_feature (1398)..(1398): n is a, c, g, or t
  misc_feature (1413)..(1413): n is a, c, g, or t
  misc_feature (1560)..(1560): n is a, c, g, or t
  misc_feature (1570)..(1570): n is a, c, g, or t
  misc_feature (1597)..(1597): n is a, c, g, or t
  misc_feature (1607)..(1607): n is a, c, g, or t
  misc_feature (1613)..(1613): n is a, c, g, or t
  misc_feature (1657)..(1657): n is a, c, g, or t
  misc_feature (1678)..(1678): n is a, c, g, or t
  misc_feature (1693)..(1693): n is a, c, g, or t
  misc_feature (1711)..(1711): n is a, c, g, or t
  misc_feature (1807)..(1810): n is a, c, g, or t
  misc_feature (1834)..(1834): n is a, c, g, or t
  misc_feature (1899)..(1899): n is a, c, g, or t
  misc_feature (1901)..(1901): n is a, c, g, or t
  misc_feature (1905)..(1905): n is a, c, g, or t
  misc_feature (1937)..(1937): n is a, c, g, or t
  misc_feature (1952)..(1952): n is a, c, g, or t
  misc_feature (1997)..(1997): n is a, c, g, or t
  misc_feature (2024)..(2024): n is a, c, g, or t
  misc_feature (2051)..(2051): n is a, c, g, or t
  misc_feature (2067)..(2067): n is a, c, g, or t
  misc_feature (2098)..(2098): n is a, c, g, or t
  misc_feature (2109)..(2109): n is a, c, g, or t
  misc_feature (2137)..(2137): n is a, c, g, or t
  misc_feature (2150)..(2150): n is a, c, g, or t
  misc_feature (2153)..(2153): n is a, c, g, or t
  misc_feature (2181)..(2181): n is a, c, g, or t
  misc_feature (2188)..(2188): n is a, c, g, or t
  misc_feature (2192)..(2192): n is a, c, g, or t
  misc_feature (2197)..(2197): n is a, c, g, or t
  misc_feature (2232)..(2232): n is a, c, g, or t
  misc_feature (2239)..(2239): n is a, c, g, or t
  misc_feature (2282)..(2282): n is a, c, g, or t
  misc_feature (2291)..(2291): n is a, c, g, or t
  misc_feature (2302)..(2303): n is a, c, g, or t
  misc_feature (2314)..(2314): n is a, c, g, or t
  misc_feature (2318)..(2318): n is a, c, g, or t
  misc_feature (2331)..(2331): n is a, c, g, or t
  misc_feature (2333)..(2336): n is a, c, g, or t
  misc_feature (2338)..(2339): n is a, c, g, or t
  misc_feature (2348)..(2348): n is a, c, g, or t
  misc_feature (2389)..(2389): n is a, c, g, or t
  misc_feature (2393)..(2394): n is a, c, g, or t
  misc_feature (2397)..(2398): n is a, c, g, or t
  misc_feature (2400)..(2400): n is a, c, g, or t
  misc_feature (2404)..(2404): n is a, c, g, or t
  misc_feature (2414)..(2414): n is a, c, g, or t
  misc_feature (2419)..(2419): n is a, c, g, or t
  misc_feature (2430)..(2430): n is a, c, g, or t
  misc_feature (2434)..(2434): n is a, c, g, or t
  misc_feature (2459)..(2460): n is a, c, g, or t
  misc_feature (2474)..(2474): n is a, c, g, or t
  misc_feature (2501)..(2501): n is a, c, g, or t
  misc_feature (2509)..(2509): n is a, c, g, or t
  misc_feature (2525)..(2525): n is a, c, g, or t
  misc_feature (2533)..(2534): n is a, c, g, or t
  misc_feature (2537)..(2537): n is a, c, g, or t
  misc_feature (2544)..(2545): n is a, c, g, or t
  Probeset Number=SeqID_13313
ngnctgcagtgagantgctncaccgngctggggtccccagcagtatcatatgactagtnccagtcggtagtagagctgcgtatgagntaatgaagtanngtggtgagtacgangtcgcgacgtcgaacgtgtgnctgcactgtcgaccaattagcancacanntnatgnnncgtcgtagcgancgngatctcgtggacgcagggntgatcatgnactatgntgcgtcgtattgaagatgtcgcacgtcgttgagtgtnatgnantgtgcgnncgcggatngcggacgagtggtnacacggngtncgataacctcnagcgtcgtggcacgtcgacgtcactncagcgtagactagncgnctcgctgcacattgacgtaatngtcgcgtcgtgacagtccaacgttcaatnatcactancgtcagtngcacagtgactnctntgctgactcgagtgctcnntcgcgctgcgcgcagctntatctcgaatatnnaagcatatgcgacgaggagcatgcggtcgtncatgagacactnatnctangcngcagatgctgaattctgactgtcgaccagtcacgtgatcgcatgtaccagatcgtctcgcattagcgcgacgccggcancctgatactcagcgtcacagntgacgtcgacgaatggcagcngctagcgcacggagacagacgtngcgtcagcagangtcagacgtactagtgaaaccgctncgantcagtcgagacgtagatacnacccgtcgntggtctgactgcatgcgtgtcgatgagttggtcatgcgatactacactgtagtagangnagntttgatgangacagtancngtcagctaggatatagtaggcagtatgatgtagtaggtaggtcagcgcatgaattactgatgagtnttcaacgacactgnagtncgatncgnncggcatgangctgcagcgcacgtcntgatgatatacgcagcaagtcttacgantgcaantctagcatagtnacaantagacatcagatgatcgtngagtngacgtgttgataggatcgatcagtgntgtacgacggcaggagcagataggtcatatcatatctgagctactgctgctatcgngcgatgncntgtcacngacgtanctcagaactgagacatcgcgncgcttgacgcgcacgtgcgttcatgagtatgtcgcgagatcgtggtagncatctgcatgcggcgagcgacagactacgacgtatagcgctgctgacgtctgtatagtgtacgtancgacgtgtcgggcagtcgcgtcgctatgntagccgccgtgtctctgttcagttgcgtaagtctctgtctntcgctnaacgtacacaactccaaagtcacatatcacacagtcatcatcatgacantgactcacatcatcnacgatgcagcatctacgtacatctcagctatcgtgcgacgtgcgcatatatatgcatctagctacgtaatcagatacagcgatagcgtctcgtgtcgaatcatgatgacttatgacgtatcatcgccgtcgagatctcattgcacgncagaccgtcntacagtctagtatgatcgacatcaatntggtctcgtngtcgantatctacgattgtcatatcttactgaagagtcagcagcgtacanatatgtaagagagagtaatanattacctgcgtagtntatgggcacgtagttgcngcgtatcagtgctaacgaaagacgatcgacgacagcttcatgttgcgcccgacacatccaccgcattcatactcacgtatcacgtctccgatcggnnnntcacgacgtagatagtatcatganttttagtgctgactcgtatgtagtggttgcgatatcatagagctgtgtagcgcgtgcgcagtgcncntagnggctatgtcaggtgagctgtatagttatgatnttgtgatgatgagtntcgagatagatggcgatgatgatgagtgcagtctagtagtagatngtggtagtcgtgtgctgtatattggtntcgctttcgtagttcgatagtgtcagntacctcatacgtacgngtatgaactaagacttggacgtataagtccncatcattatgnatcgcatatgtctcatagatgtactganagcgatcgtcccngcncgaggcgcgcatactcctctcgtcgtanctctatngcgntgtcngtgcaatggaggtgtccatcagtgtgttcgagcgnctattanttaactatgatgatgcgtatgtgagtgcttgcctagttgactngctagtcgngtgtgtagtgnnatgtctatttntggngctaatatgtgantnnnnannctctcaatnttctacatcttctatctcgctctcgttcgaggctgagcatnagannagnnantgantaaatcacanagagnaggtcgtagcngggncgcgagcgggggcgggggcgagagnngcgagagagtagtngtatgaagtactatatggcggtgtagngagtcgcngccgacgctacgcgcngcgcgacnncgngcgggcnncgagtgtgtgaaaaaacccccc

SEQ ID NO: 3535 - DNA, 2011 bp, Glycine max
  misc_feature (46)..(46): n is a, c, g, or t
  misc_feature (69)..(69): n is a, c, g, or t
  misc_feature (81)..(81): n is a, c, g, or t
  misc_feature (194)..(194): n is a, c, g, or t
  misc_feature (211)..(211): n is a, c, g, or t
  misc_feature (288)..(288): n is a, c, g, or t
  misc_feature (356)..(356): n is a, c, g, or t
  misc_feature (406)..(406): n is a, c, g, or t
  misc_feature (436)..(436): n is a, c, g, or t
  misc_feature (516)..(516): n is a, c, g, or t
  misc_feature (566)..(566): n is a, c, g, or t
  misc_feature (709)..(709): n is a, c, g, or t
  misc_feature (717)..(717): n is a, c, g, or t
  misc_feature (915)..(915): n is a, c, g, or t
  misc_feature (926)..(926): n is a, c, g, or t
  misc_feature (942)..(942): n is a, c, g, or t
  misc_feature (1604)..(1604): n is a, c, g, or t
  misc_feature (1762)..(1762): n is a, c, g, or t
  misc_feature (1792)..(1792): n is a, c, g, or t
  misc_feature (1910)..(1910): n is a, c, g, or t
  misc_feature (1918)..(1918): n is a, c, g, or t
  misc_feature (1936)..(1936): n is a, c, g, or t
  misc_feature (1940)..(1940): n is a, c, g, or t
  misc_feature (1942)..(1942): n is a, c, g, or t
  misc_feature (1944)..(1944): n is a, c, g, or t
  misc_feature (1947)..(1947): n is a, c, g, or t
  misc_feature (1957)..(1957): n is a, c, g, or t
  misc_feature (1967)..(1968): n is a, c, g, or t
  misc_feature (1970)..(1972): n is a, c, g, or t
  misc_feature (1974)..(1981): n is a, c, g, or t
  misc_feature (1983)..(1989): n is a, c, g, or t
  misc_feature (1991)..(1992): n is a, c, g, or t
  misc_feature (2007)..(2007): n is a, c, g, or t
  Peptide Sequence Number=SeqID_8139
  Probeset Number=SeqID_13314
ccgagatgaagcgtgcgcgggcgttccaagcggcgccgcgttatcnttgctgccgtaacggtacagctncgacgtcggtanttaatcttatttgagtcattactagcgagtacctaccactcggccttaaaactaccattactattccatctggtatcgtaagaataatactcgaagtcaagccggacgcatanacgacaaatacgtcagncctcacgcacgatgcagatgagtctagagaaacgtgtgtcgcagagtctgagatggcatgcggatgaacgaggtagntattatagcaggtgagtgtgcgtagtaagtgagtattataagacggcgtcttgagcatctgatatatncgatgtcgctcgcgtacgagcgacgcaccgcgaccgtagtcatgtaatgntacggacatcagtgaacctagtaaaggagnggagagacgagatataatctctccattgattagatacccctagtgtagtaacgagacagaacatcatgcagtgcgtcagngtgtcggcgaggtaggacaagcgtatagagcgtgtatcgaggtgtaatcnagtatggatgacgcaggagctcagtgagggggacgctggtgagcgagagacagtggaacagcctcagttatgcgtgtataccgtgtgtagagatgtgtgtctactacacatgttcatactcactatcacagcagatgataganagagagantcgtgcgcgacgacgcaaggccacatgaacgtcggaggtatgtgtacgtgtaggatgtagactagtagagtgtgagtatgatgcgtagtatgtcgaatcatacatgtcgaccacagtgagagcgacgtcgcgacaccgcgtaagacacagcattattcgccgtcggactcggcgtcgcgtgcagcatcaatctatatntgtcctctgtntgatggatagagcgcngaacatggtagagctcggacagtaatagtagtggtgagtggtggtgattgttattatgctggtatattggtcgagtgtagcgtggagtggggtgggaagatatccacacgagtgcgtgaaggagacgcgcgcgggactggcggggggagattggataaagcatatcgagaggcggggatgagcatactatcccacaacttacacacgctacgttactcacaaagtattcttattatctctctagtcaaaagtgaggtgtgaccgagaagactagcgtccgcacaccgagcgggagagaggccgcaccaggcgcggcgcggtgatggcgacaccccgccggcaccgggcacgacgcaccgaaaagaagagcgaaggtggtggtaaggtagagaaatagaggaaagagcaagagaaaaaggacggagagacacaatcgacagaaaataagatatgaacagtgagtatagtgtaagggtgtggtacgtaatgtcgtgatgtctgtgtgtgtgggtgtgttgggtttcgtgtgtgtgtatggcgtagtgttacggtggtgtgtacgcgctagagaggcgcgaggcgagcgcaccagacggagagaacaacgacgtcacacaacgagccgcggcagagagcgggccctcaacccacagctcacacancgccccgccaccacagagacataagaaacaaacgcataactcgaccttataaacctgcgttgtaatccgtctaacaaccacctatgataatattatcctttagtcacaatacgaagcgagacgtagagacgagtgagagaatagttgggtgtcgttcngatcaggtcgccgcctcagcagtagtgganaatgatgttcttcggccggtcggaatggtgtgtggggtggttgccagctcaaagttataaaaggtatttctctctcctctatcaataataataaagagattatataacatcacatacnacaattanatacaaaggagtcggatnctancnanccnaccaccgcgngcagcgctgnntnnnannnnnnnncnnnnnnnannggaagaagagagggnaaaa

SEQ ID NO: 3536 - DNA, 697 bp, Glycine max
  misc_feature (630)..(697): n is a, c, g, or t
  Probeset Number=SeqID_13315
tcagctacgtaggccccccccccatcaacacggatcaacaattgtggacgctcacaattgtactacttgcaaccaattcaatactgacactcaaggtgttggtcttttcggcaacagcactggtatgacatcaaaccacacacacgagtccgtcactacaaacaacaaccaacatctcggcgcgacctcagccagagctgacaaccacaacaacacgcacctcggagccacatcagcacgagacgaggagacactttctgcaggatcaacagcccgagctgagtccaacgcttacaggatgagtgccaacaacggagaccttgagaaggacttctctaacaggaacggacccaacggatatgggtatggtggcgcaaacaatcaccagcacctccacgagggcatggatgaggatctggccttgaagcacatccggaccgccggtagcatctccatctctcctgagctgttcgagaagctttacctttcgccaaagaacgaggtcaagggtgaacttcgtaagactttcggtaaccccactcctcttgctcttattggtttcctgttggctctcaccccgcttagttggaccttgatgggatggcgcggacctggaggctagttaatagnnnnnnnnnnnnnnnnnnnnnnnnnnnnnnnnnnnnnnnnnnnnnnnnnnnnnnnnnnnnnnnnnnnn

SEQ ID NO: 3537 - DNA, 381 bp, Glycine max
  Peptide Sequence Number=SeqID_8140
  Probeset Number=SeqID_13316
acacatttaatttttcctttatttacatatcccaatataaaagcgactctaaccccagacaggctggcggggccaataaaactgccaaccataattctcaagttaaccactccgattttattttctccaagcatatttattactctccctgctacacttatatgcggtatggttcgatttgatacgaatcctggcggtactcctgaattgctaggaaattttatgattgctgcttttattgcttctcttttatccttgaccttggtgtaccttctttaatatgtccatctttcaggtgcaaaaatggcaatcatactacctacttctctgctatctattttatcacttgcacttgtattaacacgtgtttattcaccattt

SEQ ID NO: 3538 - DNA, 390 bp, Glycine max
  Peptide Sequence Number=SeqID_8141
  Probeset Number=SeqID_13317
actctaaaacggcgacagcttccatactcagtcctctccctcaggcagctcttctcttcgagatcgcacaatgtctctggttgcaaacgacgagttccagcacattctacgtgtgctcaatactaatgtggatgggaagcagaagatcatgtttgcccttacctccatcaagggtattggcaggcgtttggccaacatcgtctgcaagaaggccgatgtcgacatgaacaagagggctggtgagttatctgcagctgagatcgacaacctcatgaccattgttgccaacccaaaacagtacaagatcccagactggttcttgaacagacagaaagactacaaggacgggaagtactctcaagttgtctccaacgcccttgacatgaagct

SEQ ID NO: 3539 - DNA, 1605 bp, Glycine max
  misc_feature (29)..(29): n is a, c, g, or t
  misc_feature (39)..(39): n is a, c, g, or t
  misc_feature (82)..(82): n is a, c, g, or t
  misc_feature (84)..(84): n is a, c, g, or t
  misc_feature (206)..(206): n is a, c, g, or t
  misc_feature (224)..(224): n is a, c, g, or t
  misc_feature (236)..(236): n is a, c, g, or t
  misc_feature (240)..(240): n is a, c, g, or t
  misc_feature (295)..(295): n is a, c, g, or t
  misc_feature (357)..(357): n is a, c, g, or t
  misc_feature (383)..(383): n is a, c, g, or t
  misc_feature (441)..(441): n is a, c, g, or t
  misc_feature (591)..(591): n is a, c, g, or t
  misc_feature (698)..(698): n is a, c, g, or t
  misc_feature (728)..(728): n is a, c, g, or t
  misc_feature (866)..(866): n is a, c, g, or t
  misc_feature (877)..(877): n is a, c, g, or t
  misc_feature (979)..(979): n is a, c, g, or t
  misc_feature (1033)..(1033): n is a, c, g, or t
  misc_feature (1101)..(1101): n is a, c, g, or t
  misc_feature (1114)..(1114): n is a, c, g, or t
  misc_feature (1216)..(1216): n is a, c, g, or t
  misc_feature (1328)..(1328): n is a, c, g, or t
  misc_feature (1354)..(1354): n is a, c, g, or t
  misc_feature (1374)..(1374): n is a, c, g, or t
  misc_feature (1384)..(1385): n is a, c, g, or t
  misc_feature (1387)..(1389): n is a, c, g, or t
  misc_feature (1432)..(1432): n is a, c, g, or t
  misc_feature (1458)..(1458): n is a, c, g, or t
  misc_feature (1517)..(1518): n is a, c, g, or t
  misc_feature (1530)..(1530): n is a, c, g, or t
  misc_feature (1545)..(1545): n is a, c, g, or t
  misc_feature (1571)..(1585): n is a, c, g, or t
  misc_feature (1588)..(1599): n is a, c, g, or t
  Peptide Sequence Number=SeqID_8142
  Probeset Number=SeqID_13318
cacaacaatcaactccacaagactatgtnacacagcacncacacacacgcacacacccacataacatcacaccacacacacncntagtagatagagcagcagtgtatatatatcggtagacgcgagcaagaaggacgatagcgggagatctacattcgacgagttgtatatagtcagagctgaccacgcttgaatgagggtagagnagccgcagaataatatanactatatgagtnggtntatatgtggtgagacagagcgacagcagcatcagacacagcatagaacgaccacnaccacaccagcgcaccagcacacacgcagcgcggcagtctacacacttcatatcactgcgtnatgttctcctcgtacccgtacgcacnctatcatatcaactacgtgatacatacaatgcagtgtatatatgtacaagtgtatacncgaaggcatcgctgccgtagtacgcgtgcgcacagacagcgaggaatgaatatgccgcagccatgactgtagaagcacatgtcgatgcgcgcacagatcacgagagacgaacaggaacaatagaaatcgctgcatggatattatgcgtgngggcacacgcgcagccagcagcagagactctcgcaatccacacatctcgtgagacggtacaacatatatagtgaatatagacatacgctatcgagatgcgaaatcantacagatgtataagtagggataagttctanatgtgatctacaagcagtagatgtgagaggagagacgcgtgtcagcgaacggagcacacaaggaatacacagtagaagagaacacgacgcagcaaacgcagtggtgtaggtcggaatcagctcagagagcggcggcanaccgcacgganaccacgcattactgcgcacacaacatgcgatcagcatataatgaagcacaccggcctcacactgatcaggatgaagagatagtgaacggaagagtggcgcanccgtacatcgagggcagcgcgcagacgatgtgagcacatactatagacaagagnagacagtacatacaagcagaactaccagagccaacaaacacacacagccccaacaaccacacacacancgcacacgacaancaataccgaactaaacagcatctcgcaccactccacccggcccccgcgccccctcgctcagcacgacaacgacagatagacgcgtctaaggcgcacgcgcgntggtaccgatccgactgcagcacatgaacaagaccgacacacaccagacatcacaaccacacagaggaacagtgctagcacgacacacgcggcagcaaacagaacacacagncttattacatactagacatgccatangcatcatgtcgtgttagtgnttacattttnntnnnttgtgtgtgtggatgagtttgtcgcgggccaggtctgcgagtngtgtatagtcgtgagtggtgagatgngatgagagtgactgatgaggtggtcaatgtaggacgagagtgagtacgtctcgtagagnngatggaaggtgngtgaggggagggtgnagggggtagggaaggatggaagaaannnnnnnnnnnnnnnggnnnnnnnnnnnnaaaaaa

SEQ ID NO: 3540 - DNA, 1489 bp, Glycine max
  misc_feature (126)..(126): n is a, c, g, or t
  misc_feature (132)..(132): n is a, c, g, or t
  misc_feature (205)..(205): n is a, c, g, or t
  misc_feature (290)..(290): n is a, c, g, or t
  misc_feature (389)..(389): n is a, c, g, or t
  misc_feature (711)..(711): n is a, c, g, or t
  misc_feature (886)..(886): n is a, c, g, or t
  misc_feature (1105)..(1105): n is a, c, g, or t
  misc_feature (1107)..(1107): n is a, c, g, or t
  misc_feature (1117)..(1117): n is a, c, g, or t
  misc_feature (1227)..(1227): n is a, c, g, or t
  misc_feature (1301)..(1301): n is a, c, g, or t
  misc_feature (1336)..(1336): n is a, c, g, or t
  misc_feature (1351)..(1351): n is a, c, g, or t
  misc_feature (1358)..(1358): n is a, c, g, or t
  misc_feature (1382)..(1382): n is a, c, g, or t
  misc_feature (1434)..(1434): n is a, c, g, or t
  misc_feature (1440)..(1440): n is a, c, g, or t
  misc_feature (1443)..(1443): n is a, c, g, or t
  misc_feature (1473)..(1473): n is a, c, g, or t
  misc_feature (1489)..(1489): n is a, c, g, or t
  Probeset Number=SeqID_13319
cacccacaccacacacagtaatacagtatcacatagactgaatgcgcggactgcaacctgattactggcgcatcccactaacggcgtagggtgataaccccgtctatatatctatgatcactaacnactaanacaacacaccacgcatccatcgctcatcatgatgaagtggagacgagaagctcgtgaagcgcgccacatatanataatctatatgttcataaggctgcgtggtttgtatagagctgttcgagttgtgtggtgtttactgtatatgatgtatgcggagncacagtgtggctagtgtgattagggtgtatacgtgtatgcagcgcgacttgcactacactaatctaccaatcaccatcacttacgaaccatacactcantgtcacacctctctatagttgtgaccgcccgagcgcgcatgtggcggacatgtagaggcggcgtgattaatgcaaagttatcgtgcaactcttagaaatcgggcgacggaggagatgatgggtagatgtcggggcgcacttatctcgcacgctactggtctatctatgagttaacaacaagccactcagcttaggcgcgatatgtatgctacgctgcacgagtcgtacgctgcacttatgagatacgcgtagtactatggcgatacgctagagaccgatgagtactacgcggtgtgcaaacgtggacatctatgcgtaacgntactgcagacactgcacgtatcatgtgtctgacgactgcactatggaacatggctcatatgtcgaggccatgacgcacatatcaactaattgtagctatgagatgcatcacctcatagtatctatactagtgcagtctccccggtgagtaatcattcgatttgcgtgttgatctnctcatcgtctacgtgacgtacaagcgcgaggtgtgcgcctcactgattgtgtagctcaggctgcttactggtcgtgctgggtgacgcgaccgtagtgcatgacgtcacgatatatgagactaagactcgtctgattgtgacgacagctacgagcgtctgtaatatctgtgagatattatgtaactgtgggagtgcagtgacgtggatcgcgacgctggnangaagcagccncgtgactaatatgatacattcgaatgcgagatcgcgctgagcttccggatcaatgctcatgactcatgactggtgagcgcacgagcggaacgcgtatatctcgatcctgnggcagccgtcgctcctggtgactgaatagctacatcgtgctgtattcgctgtgttgagcgacggccaacacatntcggatgtgtagtaccgtctacatgtacgcctagnactcacactaacagncgagatngcacaggtgacgagtatcgcctgnacacgtgacgccagtatcagacgacgcggtgctacacgaacgaactctctgntgtcancanacaatgtatgcgtgaccgcaacgtacgtgntacgtacttacgcagn

SEQ ID NO: 3541 - DNA, 1381 bp, Glycine max
  misc_feature (53)..(53): n is a, c, g, or t
  misc_feature (686)..(687): n is a, c, g, or t
  misc_feature (846)..(847): n is a, c, g, or t
  misc_feature (849)..(850): n is a, c, g, or t
  misc_feature (852)..(852): n is a, c, g, or t
  misc_feature (854)..(854): n is a, c, g, or t
  misc_feature (856)..(858): n is a, c, g, or t
  misc_feature (860)..(875): n is a, c, g, or t
  misc_feature (883)..(883): n is a, c, g, or t
  misc_feature (891)..(891): n is a, c, g, or t
  misc_feature (901)..(905): n is a, c, g, or t
  misc_feature (907)..(907): n is a, c, g, or t
  misc_feature (911)..(917): n is a, c, g, or t
  misc_feature (919)..(919): n is a, c, g, or t
  misc_feature (922)..(928): n is a, c, g, or t
  misc_feature (938)..(938): n is a, c, g, or t
  misc_feature (965)..(965): n is a, c, g, or t
  misc_feature (1123)..(1123): n is a, c, g, or t
  misc_feature (1238)..(1238): n is a, c, g, or t
  misc_feature (1261)..(1261): n is a, c, g, or t
  misc_feature (1268)..(1268): n is a, c, g, or t
  misc_feature (1321)..(1321): n is a, c, g, or t
  misc_feature (1381)..(1381): n is a, c, g, or t
  Peptide Sequence Number=SeqID_8143
  Probeset Number=SeqID_13320
ggagggggggggagatgtggagatgagacgaagagggagagagtgtacccccngctccaataggtacgcgatgaatagccgcaccaaacccgcacacgaggggaggtcaatgagatcgacaggtgggcgggtcggtcttttactggcgggcgcggcggagggatggcggtaggtgggagtggcagttacttggcttacggtattcgatgttttatgtgcggcgcgaagatggaaatggataagatcaaccctagagccccatcaggtcgctatatagcccggaacgtacaacaacagctcgtcgacgcgtcgagatctgtagccgatcaccgctgcttgatctgtggtgtgcgtccaccggctcgttctgttggcgtgcgccggggctacacaggtcactacagagcaagagtgatagaaggacgcctcaatcaatatctgtgtaagtatgttcgccactcaggggagtaggggtaaggggtgggcttagatggtctgagtgcgcagtgggggaggtcgtatgtgctgtcgttgagcgttatgagcggatagtaatagtaaattttgtatataatagtgtctcggcgtggttgatcccggcactagtggtcatgtgcgtgagattggaaagtgggagtgcagttgataatctggcggaatgagctggagagacaagcaagaaggtnnataagaagcgagaagattgtgggagctgaatcagacgacgagtatgtgtaggagatcgacggatgcggctttcagctcgaggctacttgcggggttgcgttgggagatccgattagagggaggaggtgcggtcgtatcttccgaggggagaagggatanncnncncncnnncnnnnnnnnnnnnnnnntttcaccnttcggggnctagggggtnnnnntntatnnnnnnncncannnnnnnctcctcgcancctcccgcccctattctacctgagccntttagcgttgcatcggcataagatcgcgtcatagtctgagcgcgcaccggaaggcaactgtccgttttatcagaacatcggcgcgcacaggttcgactcaggcgagcgtgtcacgacaggggaggaggacattggatgtgtatacacccaacaggaantgtcatatcgcgtactccggtagagtggtgcaccgcggcgggcgacggagcagctgcgcctcttatgagagctagcgacacgcatcgcctacggctcgtagagagacgatagacntgagcgtagttagtgggagacangaggagntaacttacatatacgagcgactttgtcgtttgcctgagaacatgctcatatancctgagtattgaattacagtctacgcgtatagagcgtgatagagatatgatgtaggacan

SEQ ID NO: 3542 - DNA, 371 bp, Glycine max
  Probeset Number=SeqID_13321
tcgtggtgcttgcatgataatttgtgttggtgcactcatgcctgccatttcagttcgaacatctgtagaaggcctgaaaattgaagcaaagattacaaataaaagtatggtgtctattatttcttgagatctactgattggactctttgttatgcaacaccgaggctcctacaaggttgcattcgtgaatgcccccataatcatcctatggttactgactattaccatgattggtataaacaatgtcatcaagtggtatacaagagtatatcaggccgtgactccatataatatatacaagttatccaagcttacaggaaaagatggttggactaatcttggaagagtatatgtgtgcgttacaggaactg

SEQ ID NO: 3543 - DNA, 2208 bp, Glycine max
  misc_feature (44)..(44): n is a, c, g, or t
  misc_feature (51)..(51): n is a, c, g, or t
  misc_feature (90)..(90): n is a, c, g, or t
  misc_feature (95)..(95): n is a, c, g, or t
  misc_feature (112)..(112): n is a, c, g, or t
  misc_feature (123)..(123): n is a, c, g, or t
  misc_feature (127)..(129): n is a, c, g, or t
  misc_feature (131)..(132): n is a, c, g, or t
  misc_feature (135)..(135): n is a, c, g, or t
  misc_feature (156)..(156): n is a, c, g, or t
  misc_feature (193)..(193): n is a, c, g, or t
  misc_feature (221)..(221): n is a, c, g, or t
  misc_feature (223)..(223): n is a, c, g, or t
  misc_feature (239)..(239): n is a, c, g, or t
  misc_feature (279)..(279): n is a, c, g, or t
  misc_feature (287)..(287): n is a, c, g, or t
  misc_feature (291)..(292): n is a, c, g, or t
  misc_feature (353)..(353): n is a, c, g, or t
  misc_feature (356)..(356): n is a, c, g, or t
  misc_feature (441)..(441): n is a, c, g, or t
  misc_feature (445)..(445): n is a, c, g, or t
  misc_feature (467)..(467): n is a, c, g, or t
  misc_feature (493)..(493): n is a, c, g, or t
  misc_feature (499)..(499): n is a, c, g, or t
  misc_feature (515)..(515): n is a, c, g, or t
  misc_feature (550)..(550): n is a, c, g, or t
  misc_feature (552)..(552): n is a, c, g, or t
  misc_feature (608)..(608): n is a, c, g, or t
  misc_feature (612)..(612): n is a, c, g, or t
  misc_feature (620)..(620): n is a, c, g, or t
  misc_feature (677)..(677): n is a, c, g, or t
  misc_feature (680)..(680): n is a, c, g, or t
  misc_feature (706)..(706): n is a, c, g, or t
  misc_feature (708)..(708): n is a, c, g, or t
  misc_feature (711)..(711): n is a, c, g, or t
  misc_feature (733)..(734): n is a, c, g, or t
  misc_feature (742)..(742): n is a, c, g, or t
  misc_feature (771)..(771): n is a, c, g, or t
  misc_feature (808)..(808): n is a, c, g, or t
  misc_feature (1017)..(1017): n is a, c, g, or t
  misc_feature (1053)..(1053): n is a, c, g, or t
  misc_feature (1113)..(1113): n is a, c, g, or t
  misc_feature (1129)..(1129): n is a, c, g, or t
  misc_feature (1147)..(1147): n is a, c, g, or t
  misc_feature (1239)..(1239): n is a, c, g, or t
  misc_feature (1249)..(1249): n is a, c, g, or t
  misc_feature (1283)..(1283): n is a, c, g, or t
  misc_feature (1285)..(1285): n is a, c, g, or t
  misc_feature (1292)..(1292): n is a, c, g, or t
  misc_feature (1575)..(1575): n is a, c, g, or t
  misc_feature (1658)..(1658): n is a, c, g, or t
  misc_feature (1671)..(1671): n is a, c, g, or t
  misc_feature (1679)..(1679): n is a, c, g, or t
  misc_feature (1852)..(1852): n is a, c, g, or t
  misc_feature (1867)..(1868): n is a, c, g, or t
  misc_feature (1871)..(1871): n is a, c, g, or t
  misc_feature (1963)..(1963): n is a, c, g, or t
  misc_feature (2015)..(2015): n is a, c, g, or t
  misc_feature (2074)..(2074): n is a, c, g, or t
  misc_feature (2170)..(2171): n is a, c, g, or t
  misc_feature (2173)..(2173): n is a, c, g, or t
  misc_feature (2175)..(2175): n is a, c, g, or t
  misc_feature (2201)..(2208): n is a, c, g, or t
  Peptide Sequence Number=SeqID_8144
  Probeset Number=SeqID_13322
ccgtgttgatacgttatgtcagctggtctctccgtctaatattntaacatnaatcatcagccgtgctacctcatagattacgatagttgntgagntcccctaatcgcacgcntctgggtgggngtannntnngangtatacatcatctgtgctgangtagtatggattctcgtcctatcatccactgatatantgttgcgtacgtcgcgtcggcagctgcntnacgtatgtttttctgntacgctactgcatgcgcgtagtgtcttgacgtatgactanttttatgntgcnnctaattcgtcgtctgatcgggagtaccacgctgttgatgtatatagtgacgcggtcgagcncgncgctcgcagtctcacagcgagacgcaccgctcatgagctgtccattagcgacgacgtcgcatagacgtgctgggtgggtggcgcnatgntactgctgcgcatcattatcangtcagcactgtgatgtgctatatgantgtcgnacacgctcatacttgntgtgtatgtccgtgtgatctcgtacgctttatatngngactcggcagcgcttcatatcataccgacagtgacaagcactcgtgacggcgtgtnacgngctacgcngcgatacgcctaccgctcgatggtcatatcagcacgtgctcagtcgtagaacactanaantatgtagagtatcatgatcaactgcntntanttcgcgtcgtgtctggcgtgtnngtgtcgtntacgtacatgtctgtcagcttcgtcagangacttatcacatcaccgattgacgtcctctgtatcantactttactgtgtactcagtggagctgcagtctcatcatctggtcagttctgagtgcgctcgtagcttcatcaacgacacgtgcggagattctcagcatgacatcacatgcgttcagctcgaatccactcctagaccacactagattatatgatacatcacaacctacgtgcgcggatccggtaagcgtgtcgagcgcactcatatacngcaccacaccctagcggcgacgacgccgtcgcgcgncgtcaattcacccacgacgcgtctcggcctgcgccgcgcagccgcacttaatccgtgttntgttgtcagtatagtngtcgattcacatatcgtngtgcaatctctatccacaatctaacactccaccaggcacagcactcacacacgaacggctagactcgtgttcgtgtctgctgttctctgtcngccacctgcncaagtcatgcggcacgcgcgcgtgcgaccgcgcngntggcgtncgctcgctcactctctcgataccagagccacacgccagtatcatcgctcgtcgcgtgtgctctattaacctacgcgcggaatgtcattatacatacactttcagagatacaagctacatcagggtatcgatataccgacgtccgcgcgcgcgacacagctagtatacactcgtcttcgtcacttctcgtcatcccgccgtcatgctctctgcggtcgctggagtgacatacttaattaatatggatacgcatggtaggtcgataggagttgtggagttgagangtgggtggacgccgcgagatcacgtcggacatgaatcgcgcatagatactctgaagttccgcttgaccatcacatcaaaatancttaacacgactntagacgancaatctactcgttcgtgtgtatataccgtccacccataacacgttacgccacatcctcgtgtagtaatcatatcggccttcgctctctacttctactctccctcacgtaccgttgccgtctttcacctacaccatacctgcttgaggtgatacactagcgaggtctcgtgtantgtgctctctctctnngtnccaaaatcaatgcgtgacggtgcacactggacgtacgtcgcagagcgagccgacaacggagagatatcttcgctctcgattcttttcttccntgtatggtccatcaacgcaatacctcctctccctatcctccagcctctcccntactcgtgtttcgcccttctctcccgcctacgtgtctcgccttcacaccttgatgcgcncccctccactgtctctgtgcggcctgtctccggtctcttctccctatacacctatacctgaccccttccccattgccctcccttcttcctggctgnnancnaccacagcatggcgggcacacccaannnnnnnn

SEQ ID NO: 3544 - DNA, 1364 bp, Glycine max
  misc_feature (1)..(1): n is a, c, g, or t
  misc_feature (48)..(48): n is a, c, g, or t
  misc_feature (60)..(60): n is a, c, g, or t
  misc_feature (89)..(89): n is a, c, g, or t
  misc_feature (139)..(139): n is a, c, g, or t
  Probeset Number=SeqID_13323
ntataagtacagtcagtgataggcccgtatattacccgggcgcccatncagtcgtgaagntatgatgccatgtctatcactagcgtgtncgtgttgcgaatgagttgagtctcataactcgatatatataccacatcanactctaaactaagtatatcgttccgcgcgtccatgcgcgcgcacactgttataattttggtatcgataaacagagttgataattatatattttttcgcacgcgacacatacatatcagctcgactgtgcggcacaattcgttcgcacacatgaacttatggtgcgtcacccgcacggttttatatataatataacgttcgggtgtagatagcggcgcgagaggcaagcgccgcacacaccaacctacgtctttattatcgctatcattgtataaccacacatctacatacgtgtgtgaacgtatcatatattcgcgagaactaattatgttttctgtcgcgcacgccgctttatcgacataacatacatagcagagagtatatataagggggcggagcggcggggcgggggcacagctttatcccgcgcacgtcgccgacacaaacggccggctatgctgtgataaactacttaaagatacgggcgcgcctgtactatgtcatcaaaaccgggtggttgttcaatatccctcgcccggcaatacgcgcgtaaataatcttcgggaggaatatcgcggcgagtaatagatcttaaataacacatagaacggcgagacgggcgcgcatgagagtacataatacagacacgagaatgaggtggtgacggctgttatactcggcgctatatagtatatctccaggctctattccggtagcgccgtacggatgaataaataggtgatcaaaccgcgtgcgggcgcgggctgcgtggaggcgatagataaaatgatcagcatgtatccgttacatctatgctataacctagtatattattaatgaatactttaataagcctatacgtcgtcgtacggtacgggagttatgcggtgaataatgcactcagtctctcaccaacaatatttattctcgtatcagagagcatgtgtcgtgggctcgagggatataagactacataaagtgcgctcgcgcgccgcgatatgcacgttgctctctaaaacacctgacaacaaatgcgttagatagtggggagcctcgcatccgggagtctaaccatctgcggggcggaggatggtaaataaaatcgtagatggagagatgacggaacgacaaaagacggcctggaataatgttacgtgaaaaggcgacgtcgggtaataagagaagaagtgaaaggggttgtggcagtgtttattgcgaaacatcgt

SEQ ID NO: 3545 - DNA, 539 bp, Glycine max
  Peptide Sequence Number=SeqID_8145
  Probeset Number=SeqID_13324
cgtccggtccgattcggtcacccgcgtcgtagaaacactatttgcactcgtgatgttacatgcttcatgcaagatgcattgtggaaacaaggggcaactgaaaggttcccatttagaatgccctaggggggactttgacagggtctgtgcaaccacttgtgctgcacagttcagggcggagtactagatcgaagcattccaaaatgccaatgcttgcctgaggctgagggctgcctgcgacaagctgaagaatgtgcttagtgctactccggaggccccttcaaacattgagtgcttaatggatgataaagatgccaaatgctttatcaagcgtgatgagttggagcaactaaatctttcaattctggaacgggtgaagggacctttggagaaagcacttgcagaggcaggtcttacagtcaaacatgagcacatggtttgaaggggctggatctggatctcgtgtaccacacttcttcatcatattgacagaggtcgtgaactaggagtctaggcggacaatgaacgctatagagtgt

SEQ ID NO: 3546 - DNA, 1730 bp, Glycine max
  misc_feature (14)..(14): n is a, c, g, or t
  misc_feature (24)..(24): n is a, c, g, or t
  misc_feature (209)..(209): n is a, c, g, or t
  misc_feature (485)..(485): n is a, c, g, or t
  misc_feature (573)..(573): n is a, c, g, or t
  misc_feature (789)..(789): n is a, c, g, or t
  misc_feature (939)..(939): n is a, c, g, or t
  misc_feature (1026)..(1026): n is a, c, g, or t
  misc_feature (1105)..(1105): n is a, c, g, or t
  misc_feature (1302)..(1302): n is a, c, g, or t
  misc_feature (1371)..(1371): n is a, c, g, or t
  misc_feature (1374)..(1374): n is a, c, g, or t
  misc_feature (1395)..(1395): n is a, c, g, or t
  misc_feature (1479)..(1479): n is a, c, g, or t
  misc_feature (1524)..(1524): n is a, c, g, or t
  misc_feature (1566)..(1566): n is a, c, g, or t
  misc_feature (1571)..(1571): n is a, c, g, or t
  misc_feature (1627)..(1627): n is a, c, g, or t
  misc_feature (1629)..(1629): n is a, c, g, or t
  misc_feature (1706)..(1706): n is a, c, g, or t
  misc_feature (1722)..(1722): n is a, c, g, or t
  misc_feature (1730)..(1730): n is a, c, g, or t
  Peptide Sequence Number=SeqID_8146
  Probeset Number=SeqID_13325
tccctctcatcctntctctcttcntccgttcctctctctctttgtatctatcttgtatatgatattatactattatatgttgtagtgtcaaaatagtctggctggtatctctcgctacgccgtgctgagaatgttgtggtggatgcgtactgtgcctatctctcttctatatatatgtgtagtgactctacgtccgtgtgtccatgganctagagcagatgttagcgacatctatttcatatctatactctctctccatgctgttgctgtcgctgctcgaacgggctatcgttgtgtagtagagctcgcatgatgactgtgtcacttacatgtgctacgatctatgtcgcagacactcgcctgtgaccacacaccaatcaactctcctactaccgtgcgcgtataacgtcatatgtcgtctacagcgacagcttatcactagtaaaatgtgtaacgatagagtctaatattctccgttgtctgcnacagctcgttggtaagagagtgatcttatctgtgtccgcgtcttattcgtcataatagcatgtatcacgctactcattgtatgtcggnaggtcgctcggagtcagcgagtctacgtcgatgatctgttgtctgcgagtatattgtctctgcgcatgcacgcgcatcagagctacgtgcgctaactctgcatctctgcgctgtagagatctttacatcgctcatatctccgactaatctatgtctcttctacatccactcactcactatagacgttacctagatgtcgccgtcatcatcaatgtntctgtgcgacggtgatagtgagtaattaggattacataacgactctgtatcgagcctcccgcgtacattgtactttcttatagatctcatatgctctgtggctcacgtgtgtctcatctactctttatatctctcgaccggcatgtccgncttctataccagcggacaagttccgacacgactacctcgctcgctgtatagatctactctagccgtgaacggacgtactctattctnctgcgcatatgtatcgccgttcgcgcgccgtgacagaatgtctactgtagtcgtattcatactcgtcgtgtgagacgtntcacacacaactacgtccaatcctcgtcgtactgctatacgtctactcacgatggtatgccgtgcgcatgagcctgactgcatgcatgtgtctgctgaattcgcacccacccgccaagcttcgcgcgctgagtcagtggcagtatggtgcaacgtctagtataattgttgatcgattatgcacgacctcctgtctgngtttcagcgctcgcttatgacagaggctcaccatctgtggtatgtgatacaactaacgctcccgtcacnctntaactactagtatattcaaantatacacactatgtcatcggtctatactcatctctctccactagcgagatacgcgtagtcgtatcgctgatctatatcctgcantgtgatacgtcatcgcactcatattacatctgcgtatcagctcgnactatcatgtggcgcgcgctgttctactgatctgtctatgtncctantaagctgcacacctcgccgcttacatgtagctctcgagtcattgccactcgctcgngntactattacctttctacgtgtctcatcagcatgactattcacatctcgtgattctatcactactctacagttgtcgnacaatcgcactgtgtntatgttgn

SEQ ID NO: 3547 - DNA, 1380 bp, Glycine max
  misc_feature (6)..(7): n is a, c, g, or t
  misc_feature (19)..(29): n is a, c, g, or t
  misc_feature (31)..(33): n is a, c, g, or t
  misc_feature (35)..(38): n is a, c, g, or t
  misc_feature (41)..(41): n is a, c, g, or t
  misc_feature (52)..(52): n is a, c, g, or t
  misc_feature (56)..(56): n is a, c, g, or t
  misc_feature (65)..(66): n is a, c, g, or t
  misc_feature (77)..(81): n is a, c, g, or t
  misc_feature (94)..(98): n is a, c, g, or t
  misc_feature (100)..(101): n is a, c, g, or t
  misc_feature (177)..(177): n is a, c, g, or t
  misc_feature (184)..(184): n is a, c, g, or t
  misc_feature (217)..(217): n is a, c, g, or t
  misc_feature (391)..(391): n is a, c, g, or t
  misc_feature (393)..(393): n is a, c, g, or t
  misc_feature (666)..(666): n is a, c, g, or t
  misc_feature (967)..(967): n is a, c, g, or t
  misc_feature (1063)..(1063): n is a, c, g, or t
  misc_feature (1071)..(1071): n is a, c, g, or t
  misc_feature (1126)..(1126): n is a, c, g, or t
  misc_feature (1157)..(1157): n is a, c, g, or t
  misc_feature (1291)..(1291): n is a, c, g, or t
  misc_feature (1322)..(1322): n is a, c, g, or t
  misc_feature (1380)..(1380): n is a, c, g, or t
  Probeset Number=SeqID_13326
gttttnnggggtttgtggnnnnnnnnnnntnnngnnnncgntgggtgttctntacntctatctgnnatccacccaannnnnccgcaacctcaannnnnannatctcgcgccgggccacccgcgaggcctggtggaccactgggtcgcggaggttggtagtgggggggggcgggcganacaggcncgcccgagtcgttcacttgtttgtatctcaatnaggagtactgttgagggagacgtatcatttctttatatacataataagatatagaatctatactctaatatcacacataccacaatataaacataagacataaagggtaagagggcaggggtgacgctgggaggggcgcagtgaacatcagggcgtaacgagtgcgcgcggaantngcgtggaaaacgaaaataaaacaaagaatagaagccacatcacaagtcgcaaagaatggctagtaaatgtaaaaacacaacaaataattaatatatatataatgattaggcaacctgcaagaccacataccgctcacatcaacctactcaaaatacgcccgagcatcacgataaacagtgatagtatatgtatagagttgttatattaacatgataggtggtgtgattagaatggaggtggaggtgagaggtgatataggtgggcgagggganatatgaagtcgcgatttgagagatcatgcgtgagtgtgtaattatagtagtaaaacgatgtatatttctataagatatgttctttttgctaaattataagtcttcgcgggtgcgtttataagtgagtcgaacccataatcatatacagaacgactactcctcacggactagctccatgtaggagcatagcgcgatcaaccatgaatacgtatacgtatatttgaacacatctagcggaagagatgagcgactctcacgacagcacatctcactatgaaaactatcgacgtgtatgcgagcntgaggtgaactttatgacggagactatctgctactgtatataccaacatagaggacgctgagaactcaatgagagcagatgacatcatcgagccgnggcagcgnagccgccgaggcgcgcgaccgcgctgccacagctagaacacacgcgaggcaccgnacatactgcagtcactgacatcgactgaggnactctgagtgcgtgacatctcctactactcgagatgtgtatgtgaatatgaagatgtcgcggttagtgaagtgagaggaaggctgcgaggcggagcaggatcgtgaacgacgtatctgagaataggaatcgtgngtacatatataattacacacgacacactcanatgctccacgctgtgcatgtgctcatacagagatacaagcagagacgaagcgtcagcn

SEQ ID NO: 3548 - DNA, 1506 bp, Glycine max
  Peptide Sequence Number=SeqID_8147
  Probeset Number=SeqID_13327
aaactgaatcaaaaatttatataaatgagagagctttcgaacaatccagaagagtcacatttgactataaaaaagaatgattacatcctaatggtggcagacaatttatcgatgggggatataaaaactgctggaataatctttgtggcagtgtatattttgatatatgttttgcttcttgtctgggcgcattttaaagaccaacagaagcaaacctattcttcaaaggtgagttcagatcagagctatactcagtctcaaattacaatgccaaggagaccaaacttccgggcgatgcagattgatattacatctgacactttggattttacaaaccaatctgtgagaatgaattttgaagatcaaaaggacatctctgcgatacttcaaagcgcagataaagatggtttttcagtgatttcaccaatgcacagaccagattcgatgtcagtttcacctttgcatcagggagggaaaaagaccaaatttaatctgcttcggacaccaccaagaagttttcaaaagattgacttggatgcaacaagccccagtgcaattgtcacaggtcaggaggagaccatgactacaaataaagatgagcccgccccctcaaaggaggatacaacaaaggatgacgcaatcacccgaaaagagatgagccatattattgaagacttgacaaaggatgatgaatttctgaatcagagctctaaaaaaagaaggccagttaaagcaaaaaaggaaggaaaggcagccaaaataacaaaaaacaggcaaactgttaaaaccaaatttttgaaactcctcagccagaggcatgcgatttggagtacagttcaaagaatgagtcgtattttcccaagatacaagcgcatcagtctcttgtatttcttgtttagttgcaacctctttatcatgacaatttccttcataaactcttcgatatttgagtttctgccatggcagctgttgaagctgagtgcttgcacctggatcttgtttattaccttttcttggctcagctccgtttcaaaggaaggactgaaagaagcaaaaactatggaagatttccaatcaacattagctactttagaaaaagaagcgaaatataaagatatcgcagtgcacgtaattatcggtttattttcggtttgtgctttgagccagtatgcattgtttatcacagtcaaacggcaatacactctccaatggatcgcgtatagtgtgctcctatttatcattcaaatggttttctttgatgcactctgggaattaataattgcttatctttacacaaaagcatatgattctaaaggaatgaaaaggttatatcgaagattaaattctatcagattctggagagtctagattgtttgattgtcttgatatattatagatttttttctcgaaaatgcagaaaatataaattaatatattgtatgctttatattgtattaagttaagagaagtggttattcgattacagattgcaaatttcaatgattg

SEQ ID NO: 3549 - DNA, 1732 bp, Glycine max
  misc_feature (24)..(24): n is a, c, g, or t
  misc_feature (27)..(27): n is a, c, g, or t
  misc_feature (30)..(30): n is a, c, g, or t
  misc_feature (78)..(78): n is a, c, g, or t
  misc_feature (80)..(81): n is a, c, g, or t
  misc_feature (179)..(179): n is a, c, g, or t
  misc_feature (225)..(225): n is a, c, g, or t
  misc_feature (257)..(257): n is a, c, g, or t
  misc_feature (470)..(470): n is a, c, g, or t
  misc_feature (508)..(508): n is a, c, g, or t
  misc_feature (621)..(621): n is a, c, g, or t
  misc_feature (663)..(663): n is a, c, g, or t
  misc_feature (665)..(665): n is a, c, g, or t
  misc_feature (843)..(843): n is a, c, g, or t
  misc_feature (882)..(882): n is a, c, g, or t
  misc_feature (916)..(916): n is a, c, g, or t
  misc_feature (1008)..(1008): n is a, c, g, or t
  misc_feature (1022)..(1022): n is a, c, g, or t
  misc_feature (1068)..(1068): n is a, c, g, or t
  misc_feature (1074)..(1074): n is a, c, g, or t
  misc_feature (1088)..(1088): n is a, c, g, or t
  misc_feature (1092)..(1092): n is a, c, g, or t
  misc_feature (1097)..(1097): n is a, c, g, or t
  misc_feature (1100)..(1101): n is a, c, g, or t
  misc_feature (1111)..(1111): n is a, c, g, or t
  misc_feature (1160)..(1160): n is a, c, g, or t
  misc_feature (1192)..(1192): n is a, c, g, or t
  misc_feature (1194)..(1194): n is a, c, g, or t
  misc_feature (1197)..(1197): n is a, c, g, or t
  misc_feature (1244)..(1244): n is a, c, g, or t
  misc_feature (1317)..(1317): n is a, c, g, or t
  misc_feature (1338)..(1340): n is a, c, g, or t
  misc_feature (1413)..(1413): n is a, c, g, or t
  misc_feature (1424)..(1424): n is a, c, g, or t
  misc_feature (1448)..(1448): n is a, c, g, or t
  misc_feature (1503)..(1503): n is a, c, g, or t
  misc_feature (1508)..(1508): n is a, c, g, or t
  misc_feature (1511)..(1512): n is a, c, g, or t
  misc_feature (1519)..(1519): n is a, c, g, or t
  misc_feature (1525)..(1525): n is a, c, g, or t
  misc_feature (1527)..(1527): n is a, c, g, or t
  misc_feature (1566)..(1566): n is a, c, g, or t
  misc_feature (1571)..(1574): n is a, c, g, or t
  misc_feature (1576)..(1577): n is a, c, g, or t
  misc_feature (1581)..(1581): n is a, c, g, or t
  misc_feature (1596)..(1596): n is a, c, g, or t
  misc_feature (1600)..(1600): n is a, c, g, or t
  misc_feature (1622)..(1622): n is a, c, g, or t
  misc_feature (1657)..(1657): n is a, c, g, or t
  misc_feature (1719)..(1719): n is a, c, g, or t
  misc_feature (1722)..(1722): n is a, c, g, or t
  misc_feature (1724)..(1724): n is a, c, g, or t
  misc_feature (1731)..(1732): n is a, c, g, or t
  Probeset Number=SeqID_13328
cctatctctcgctctctgccgccnccnccncacctagctctctccacacatctctctggtgtcgccggccgcacacancnngcgcacagatgcgtcggccaccccaccggcgggctgaggtgagatccgttgcggctgtctcatggagtgtagcgctgagtatgccccacacacgaggnacgacgagagaagatattatatatatcatcatattatattgatgtnttatctacatctcggaatgcttacgtcgtggncgctatttcacttctctccaactagcatatgacggggggcgcagtgatagtagatactcggagggaagagactccctcacaatatgagtaggtacagatatagtcggagattatttattactaacgctatttcagcatgaacgctatatacgctttcccgcttataactctgaccttgtaggcgcacgcatctctacatatcagcgcgcactnacggtattcttcatattgttcgcgtatatatcatagtnaattcaccccacagtagccgactcgtcctcaccacacccacaccggcagagttgtaagttgcgagtccactgtacagctatacgcgtgtttatcccctcttatccctcttatnctatctcgtcacagcctcgcagttttattgatatgattacananctgattctctgcgatgccggctataggcgcggcgcaggccacagttattatcatactacgagtgtgttgaagaaagatgcgacccctcaccactcactctccacctgtcctcactgtgaagtcagagtgagtagatgtgcactatgctgatggcatctgccttctcgtgatctgcgcntctggcgtgatcactggaggactcggtctgcgtgaattncagttatgtgacctcatcctcatcaacactacgncgcgttgacgagagctctcatgtgtgtactccttgcgagaatatgtcgagtatctctcggcacatgctgcgctcttaactagcgagtaatgntgatcttcaccganatatcgtagcgatgtctctctctcactcgcacgctgcagcatgggnacctgntagcagcgatatgntganacatntcnntcgagtgatntgatgattacgctatatacacaccgtagcgcagtagatcgcactgtgantatatgtgcgctatccttgctttatatagcananacnagcgtacaagttgcgtgcgcgactcccacaccgagatgatgcgaccngccacacaatgtatatagagagctgtgtcatacgtcgaatcatgagcgatcacgctgcgagtgatgaggtctncgtatgccgcatcgtcagacnnntaacctacgtcgaacctacgacacactaccatgcacgacgctacacacgtcacgactctgcatcgatgagtangagatgcttcntgcactagatccgagctgcatganagctgagcactgcactaggtgccatagcatcagtgtcagtagagtacggatgtgntgctntcnntagggtnatagantntgacgatccgcggcactactcttcactaccgtcgcatgntctcnnnntnnctcntcattccctcgtgcntccnctactctgtacacggatgacgnagtagcgcgagaacttcgacgtggacttcatcaangctactgtaattacgtcgcaacccagaaagatcatgacttatcgatgagcgacgattaagtncgnancatacann

SEQ ID NO: 3550 - DNA, 1862 bp, Glycine max
  misc_feature (1764)..(1764): n is a, c, g, or t
  misc_feature (1862)..(1862): n is a, c, g, or t
  Peptide Sequence Number=SeqID_8148
  Probeset Number=SeqID_13329
ctttttacgagtgagtagtgaagttgctccctgaaattgccattcattatcattttaatctttaaaattgacaagatttaaaaaaaaatcctaaaattgtaatttcttcttcattttagtccttgctagtttcaacggtagtaagttatcaaattttgaaaatacagctagatttattttttgtcatgcaaatttatttatgattagtatccatctagacacctttgtcattcaagaacacaaaagaatttttttttatatataatttattgagtccaaattattggaaatcccatgattttaaataatccattaatatatttaatttttcctacgccatattatctatttatataagttaagatgtatggaaagtggatagcacacggtaagggtccggtgtggcgaatgattactccccaggggtcgatttcagctcttccctctctcacccattcacacactgaaatgagcaatttccagagaatatcgcacgaatcctaccctcccccagggcacggatctccttaccctccaccccaaccgggttacccatcggcgccgcctcatgaagggtaccctccgccgccgccgcctccgggatatggtgggtaccctccaccgcatccgccgcagcgtccgccgtatgactcctaccagggctacttcgacaacgggcgtccaccgccacctccgccgccgcactaccattaccagcacgtggatcatcatcacctccacgatgagcccgggtgcttttcattcctgctaagggtccggtgtggcgaatgattactatttgagctcttccctctcacaaactcagaaaacaagtccaatgagcaatttccagagaatatcacacgaatcccaccctcccccagggtacggatctccttaccctccaccccaaccgggttacccatccgcaccgcctcatgaagggtaccctccgccgccgccgcctcacggatacggtgggtaccctccgccgcagccgccgcagcgtccgccgtacgactcctatcagggttacttcgataacgggcatccaccgccgcctccgccgccgcactaccactaccagcacgtggatcaccatcaccaccatgaggagcctgggtgcttttcgttcctccgaggctgcatcgcagcgctttgctgttgttgtgtgctagaggagtgttgcttctgataatcacatcgtaaaagttgtttcttcagtttgctgcacttggttatggctctatagagaaatgtggctacaattctagataataagtgagaggtggtaagtcttggtcattcttgtaactctttggtctttcccctctaccctaaatcctggtctgtgcatagcttctgtgatgtggtctatatcatatatgaattactttgtacgaacactatattggaaagtgtaaaccgtttcttataaggtgtaacagacaatgatatggttaaaattgtttcatattactcgtcttccgccgccgccaaaacagccctacgcatggtgccccccgccccccccgcggccccccccggccgccgcctccctgctgggttccgtcgccgcccggcgccggccgcctcccccggcgcccgtccgcgacttccccctcgtggttcaccgtcaccacgatgtagagccgtggtgcttctcgtcccctcctttgctgcatagcggtgatctgctgttgtggtctggtagattagtgttactgataatcgcctcgtcgaagctggtgtttcgtcagtggntgcgcttggttatggtcgcgtacatctatagttcttgtacggatcacgcgctcgcgcgatacctcacctgatacataccatagactggtctctctcan

SEQ ID NO: 3551 - DNA, 1673 bp, Glycine max
  misc_feature (1)..(1): n is a, c, g, or t
  misc_feature (11)..(11): n is a, c, g, or t
  misc_feature (14)..(14): n is a, c, g, or t
  misc_feature (55)..(55): n is a, c, g, or t
  misc_feature (94)..(94): n is a, c, g, or t
  misc_feature (125)..(125): n is a, c, g, or t
  misc_feature (159)..(159): n is a, c, g, or t
  misc_feature (217)..(218): n is a, c, g, or t
  misc_feature (220)..(220): n is a, c, g, or t
  misc_feature (227)..(227): n is a, c, g, or t
  misc_feature (243)..(243): n is a, c, g, or t
  misc_feature (270)..(270): n is a, c, g, or t
  misc_feature (275)..(275): n is a, c, g, or t
  misc_feature (277)..(277): n is a, c, g, or t
  misc_feature (325)..(325): n is a, c, g, or t
  misc_feature (343)..(343): n is a, c, g, or t
  misc_feature (366)..(366): n is a, c, g, or t
  misc_feature (379)..(379): n is a, c, g, or t
  misc_feature (391)..(391): n is a, c, g, or t
  misc_feature (430)..(430): n is a, c, g, or t
  misc_feature (506)..(506): n is a, c, g, or t
  misc_feature (514)..(514): n is a, c, g, or t
  misc_feature (717)..(717): n is a, c, g, or t
  misc_feature (723)..(723): n is a, c, g, or t
  misc_feature (847)..(847): n is a, c, g, or t
  misc_feature (1381)..(1381): n is a, c, g, or t
  Probeset Number=SeqID_13330
ntgcgatgtcntcntagtccgtgatgatagtgctcagtctagaagcgcagtgcantgatcgtagttattgatatatgttgttaccgcactgtgngttacgctatgtagtctttactgcatggtgnatgtgctgatatctcactatccgagtgtcctctntgttgcgtgtatgtttgttcgtctatcagactatgttcccttgagtcgtacatcgacnnancatgcanttccatcgtctgcganttatagcgcgacgcgtctgcatagtantatantnacagcacttcccatatttatatcgctgtgtgcatgctgggtcgcgatntatattgcatgtgtatanatattagcacttgcgtctattcntatctacttatanacgcgcgtacgntttgtgttgaatagttaagatgtgtgtactatctatctnagttgccttacagcacacacatgagtgatatatgtctagactatgtacatatgttcggatatactcatcgtgtttntgtgtgtngacgaagagaatgatgtctaacacatcatataactctcatagatatgagttgctcgtgtatatagtcgtcgagtacatgtgtctatatgatgatgtgcggtcggtgtagatttggtggttacatacctcgtggcgatgtgatcgcgtttatgtgatatgacattcatacattatcagtcaggttgtattacgatgcgtgtctngcattngcgagagatcgattgcacgaatcagcatccggtgtatgtggtctctcgtgcctctctatgcttctcgttttcatattcttctcgtcctgcatcacataccaatcataagtgatgcgttattacncctgtcttttttgaaggtcgtctcttctgcgtatcccgccacctcttctgatctctagtcagttagtatatcgcgtactcgcaataggatacgccattatactacgtccagcatgagattcctcacgcgcggagctaggcgcgcggcgatgtctttatatatgaatatggttttatcgcgagggatcatcatagtacacagaatccgacatcatcttaccgtcgcgctgctgttagcgcgggtaatgtgtgtgttcatgatatgggtgtggtggtggattgtttttaattacatccttctgacataagtcaaggctaattatgcgttcgggctgtttcgcgtcgccgtctatgctctacgttatagtactctgtgttctttgcttattgtatctttgctcattgctcttatttcgttattgcacttttgctttctccttatcattatcgttttagcgacgcgccataacccgtatccgattcgtccacgtgcggagagatatacagttcaccattcatcagtatatatgttganactaaattggacatattatctttataccacgtaactgcatatgtagaagagtataagtggttcatacaattactacttctcacccacacgttcgttatgtgacgttacttcttggatacttatattctataccctcttctcccgcgctgcggacgtttcgtctgcgtgtggtgcgggttatggcgcgagcgtaggtggagcatatcagtattcatcacacgtgtctcttagtcatataatcacatgtattcactatagatgaacatcatatatagctctatcgcctttcata

SEQ ID NO: 3552 - DNA, 1525 bp, Glycine max
  misc_feature (24)..(24): n is a, c, g, or t
  misc_feature (28)..(29): n is a, c, g, or t
  misc_feature (32)..(32): n is a, c, g, or t
  misc_feature (41)..(42): n is a, c, g, or t
  misc_feature (45)..(45): n is a, c, g, or t
  misc_feature (86)..(86): n is a, c, g, or t
  misc_feature (92)..(92): n is a, c, g, or t
  misc_feature (95)..(95): n is a, c, g, or t
  misc_feature (107)..(107): n is a, c, g, or t
  misc_feature (125)..(126): n is a, c, g, or t
  misc_feature (153)..(153): n is a, c, g, or t
  misc_feature (192)..(192): n is a, c, g, or t
  misc_feature (201)..(201): n is a, c, g, or t
  misc_feature (203)..(203): n is a, c, g, or t
  misc_feature (304)..(304): n is a, c, g, or t
  misc_feature (344)..(344): n is a, c, g, or t
  misc_feature (351)..(351): n is a, c, g, or t
  misc_feature (574)..(576): n is a, c, g, or t
  misc_feature (701)..(701): n is a, c, g, or t
  misc_feature (717)..(717): n is a, c, g, or t
  misc_feature (719)..(719): n is a, c, g, or t
  misc_feature (738)..(738): n is a, c, g, or t
  misc_feature (904)..(904): n is a, c, g, or t
  misc_feature (1091)..(1091): n is a, c, g, or t
  misc_feature (1314)..(1314): n is a, c, g, or t
  misc_feature (1418)..(1418): n is a, c, g, or t
  misc_feature (1446)..(1446): n is a, c, g, or t
  misc_feature (1450)..(1450): n is a, c, g, or t
  Peptide Sequence Number=SeqID_8149
  Probeset Number=SeqID_13331
gtgtgatggtcgcccctgaaaagngagnnggnggggggaannagntttatgtgagggtgaagctgcacactagctctcctcctatnacgaancanacatacttcaangcgtcgtcatgccacacnnaaacaaaacaaatatcaatatagtgtngatagtaatagtataggtgcacagaggatgtatggtagntcgtgagtntncatcttatatataattattatatgtgtagttttgttatattgtcaccgtctccgcgcatggagtgagaaaggatgaaaagatagatagaggagaggacaancacacccacaccagatagtggtttgtgttgtcttctatgntcgtgtnagtggtgacagcgatcgactgtgatgttggtatgtaacagagggcgagatgtgcgcgcgcgaccggctaatcgacagggagagggcggcacatgcgagtgaggatgtaggagagaggggataagagagagaggatgggtgggtggtgatatagaagtttagcggacagggtagtaagattgagtgtacgtgttgatattacggtttagtattatagattaaannnaatcctgcatatttgagtgatagaaatatatgacagagaaacaagaggtataatccacacacacccacaccccaaaataagtaatatttaatatgagttgatggtgtagtgaaatgtgaaattanaaaattagacataaananaaaatatattcttacatanatactgatatcaaataaccacacaacaccaccacatatagagtgcgagatacagttgtgattatgtttgtgttgtcgcgtttgttgcgcgcgctgagtgtggtagtgattatacatacatacatatactacaacgtaacaacgctcgatctgctaccgcgcaggangaaaacgcgacacgccaccaccacccatctgaggttgtgagagatgggagagtgtgatgtggtgaagatttgtagcgtttattagcagccgtgatatctcacgatatactatatacgtagaagattgattaggcggctgagtgcactggctacatattctacctaaccgagacacgatcggatatgntcgtcacgcacgagtggctacgtgcgcggagcatgcacgtcgtcatcgctacgctacgacacagctacactatgcgatgtgctgtattgtagctattgtctgtctatgggtgctgaggagtgatatagtatgttacgtatgctacagcgcgtaacacatgcgcgcaatagcgactgtaacagttaatcgctgtgctgctcatgtttactgtggatcggtgcgnaggatgtgtgtcacgtgagatcttcgcacatccactcgtatatctctgtcatgctagtgtgggatgtgatcgatcgacgagcagggacccgatatgctgtgtcntgctgtgctcttttcggttcctcagccncgcngcgcacatgacctagggtgtataacacttctgaccgtcttcgcatatatgacatacgacacatgcgtgttctgtg

SEQ ID NO: 3553 - DNA, 1343 bp, Glycine max
  misc_feature (12)..(15): n is a, c, g, or t
  misc_feature (18)..(18): n is a, c, g, or t
  misc_feature (21)..(21): n is a, c, g, or t
  misc_feature (27)..(27): n is a, c, g, or t
  misc_feature (29)..(31): n is a, c, g, or t
  misc_feature (37)..(37): n is a, c, g, or t
  misc_feature (48)..(48): n is a, c, g, or t
  misc_feature (69)..(69): n is a, c, g, or t
  misc_feature (73)..(73): n is a, c, g, or t
  misc_feature (79)..(79): n is a, c, g, or t
  misc_feature (110)..(110): n is a, c, g, or t
  misc_feature (117)..(117): n is a, c, g, or t
  misc_feature (136)..(136): n is a, c, g, or t
  misc_feature (162)..(162): n is a, c, g, or t
  misc_feature (182)..(182): n is a, c, g, or t
  misc_feature (185)..(186): n is a, c, g, or t
  misc_feature (259)..(259): n is a, c, g, or t
  misc_feature (284)..(284): n is a, c, g, or t
  misc_feature (302)..(302): n is a, c, g, or t
  misc_feature (371)..(371): n is a, c, g, or t
  misc_feature (383)..(383): n is a, c, g, or t
  misc_feature (487)..(487): n is a, c, g, or t
  misc_feature (514)..(514): n is a, c, g, or t
  misc_feature (517)..(517): n is a, c, g, or t
  misc_feature (656)..(656): n is a, c, g, or t
  misc_feature (817)..(817): n is a, c, g, or t
  Peptide Sequence Number=SeqID_8150
  Probeset Number=SeqID_13332
ggggtgggggtnnnnatnggnaaccgngnnnggtgtntggtgtggcgntgtgggtggtgagtgtgcggntggngagtgnagttggaatatggagttcgtttgttatgtantcgcgtngccgatgtattataccggntattgtaccgtctcttcctcgtctancatttgtcagcttgtgcttngtnnctccacctctacgtccacgcactgctttggtgatctgtcgctgcctcgtcggcgcgtccgacgtggcgtgcgncggtgggttgcgcgccagcggacgncttcgtttctatggtggngtcgtggtgttgtcgtggtctcggtgtgacgtgcgggcgtctcctcctctgcctcaccggcttctgtcnctctcttttgcnatgtgtcgccttttatgtaggtgttgaacacagctcgctctctggcgccgcgcgcggcggcgcgcgcgcgggagtgcagctctcctgcctctgcgcgcggcggncgccgcggtcgcgctgccttcgtgccntgngctcgcttgtctgtgttctggcgttattgtgctcgtgtgttgtgatttgtatcacgtcccgtcgtcctctctctgtctgtgcgcgcgcgtacgtggcgccgttactctgtgtatgtgcagctgtgttcgacgtagcggntggccagtgtctggccgcggtgatgattcgatgagctgttgcgtcgtgcgcgttgtctttgctgatgttgcgtgcgagcgcgtgctcgtcgcgcgtgctggccgtatgtctgcatcttgacttatagtctggtcgcttgggtgtcaggtccgtgcgtacgntataggcgtggggtggaggcatgtgaatgtgttacacaccagcgcgtgcgggactgcgcgctcggggactgttgttgcccgcgcgggtgcggcctgcgcgtgtggcgtcgcggtgctgcgtgctgtctcatgttgctttcgctccggctgcgcgtgctgtctcggcgcgtcgcgcgcccgcttcacctgcgttgctgctactgcgcgtctagcctcgtatgcttcggcgcctgcttcactcgtattgcgagacagtgatgtggccgcgtgcgcgcgtgcacgcgatcagcactctactccgcttcatgatcgcctacgcctactcgtccgtgttcagctcgcacgatcacgaggtagtgtgttacggtggactgcttcgttggtcatgcgcgccctccgccgcgcctcctctcgctgcgacgcctcttcgttgcagatgcctacgcctctccgcgttgctccctgtgcgtgtcgtgtgcgagtgccgacagtgttgtgcgtgtgctgtgtgtctcgcccgtcggcg

SEQ ID NO: 3554 - DNA, 386 bp, Glycine max
  misc_feature (82)..(82): n is a, c, g, or t
  misc_feature (337)..(337): n is a, c, g, or t
  misc_feature (339)..(339): n is a, c, g, or t
  Probeset Number=SeqID_13333
agtttatctctcgtccaaagaaacaaaccctaactctgtcatggaagactgggaagtggtgatcgagagctctggaactacncaggaggaggaggaggaggagaatccgaagagcttggaggagattgaagatggcacgcaaggtatggttaccttcgattacttctctatcgagaactcaaactcaaactcaaactcaaactgtgtgggtcgcgttgatgcgattgatgaagatgggtctgtccaatcgggtagtccaggctggatcgaacctacctccgacgctccttatggtcctaagctttttagcgagttgtggtcggactctagcagcgancngctcgatgatgtgaacaacaacgagttgggtttggagaaatcagagg

SEQ ID NO: 3555 - DNA, 1386 bp, Glycine max
  misc_feature (222)..(222): n is a, c, g, or t
  misc_feature (633)..(633): n is a, c, g, or t
  misc_feature (1352)..(1352): n is a, c, g, or t
  Peptide Sequence Number=SeqID_8151
  Probeset Number=SeqID_13334
ctctcgtgcgactccagaccaacgcgggatagtagaagattgtggggagagagccttctactatacgtgaggaggatcaatgtaggttcatacagcggaaagatctatgcggtctactagtccagtgtagcatcaacagacgcgcgcctctacgagaagtccctctcgcaagatactcctccgaatatcagcatgacaaccatgcgcccaggcgtgagacanccggcatagtatgaagctgatagagctagtaggaggctcggacgtgtgtatgatgcacggggcctacgtatacttctggagacactctaacgagtcagtcgtgtaggccgccggccactctctcacgacgcgggatggactatctagcatggtgttcgctcggcgccggacattatctcggcgcgctgagactaacgcacgggcagtacttacaccgcctctctaccgggtgatgtagacagatgctccaatatcaatgcttctgtgttgcacaagagaggtcggctcccactaatcgaatctctccacgctggtgccgcggaactacgcttcgatctcctccatgataatgatttacgcctcagcggacccgactacggaatagtcatccaacacctcgtcgcataaagnctcggatcacagcctagccacactgctgggagcagagttctctaccacgtaagcacgtcgcacggtagccgagggcggtactccaggaagctcggaagctgagagggcataacttgattcctatgacgatgcgagacccatcgtagcaactcgcagcatgcctataggactcggcacgctggctctcacgctgagcgtggttcaagcacaagacgagtgtaatgtagttcgctgcctccaggatatcttgggtggcggagtccctacattaggcgccgcagatatgcagcctcatgctgttctggccttatctagctcgcggctgattcatacattaggcttcacgaaagtacaagtcgcgggccgtaagggcatccgcgtaaagcaaggctacacaggtggtatgcggaagggtaagtctcttcgtcgatgcacctggtcctgtgccgcggaagaaaaagccatctcacgtaacgcctcttgcgatatttgtgcgacggtgtggttcttgctctagcagccatcgaaataatcacgcataaaggactttctaggtgcatgatgctcgatcaagacaagggtcgctctacctcagagaggcggttatgcgaaagaaatcgagctctgtactgtcaccccgcaaagataaaggtgcggccgcggggggagcgtttgttattcgagcctccatagcacgctgcgcgccacgctcgtctttnaccgacagcgcccatacgccagcatgaacgcatc

SEQ ID NO: 3556 - DNA, 1394 bp, Glycine max
  misc_feature (1)..(1): n is a, c, g, or t
  misc_feature (79)..(79): n is a, c, g, or t
  misc_feature (206)..(206): n is a, c, g, or t
  misc_feature (210)..(210): n is a, c, g, or t
  misc_feature (292)..(292): n is a, c, g, or t
  misc_feature (437)..(437): n is a, c, g, or t
  misc_feature (458)..(458): n is a, c, g, or t
  misc_feature (521)..(521): n is a, c, g, or t
  Probeset Number=SeqID_13335
nataatacgctgaacacgcaagaacgtcgcatggaggatcacctgtagtcagagtcagtctacgtgtagagacgcgcgnatgtagcgcaatatgcgctgatcgcgtcgctgtagtcgtgattataatgtgtccgtagagacgcgagtgtgtataagtctctcactcgcgtcgattccatgcagtacgatcgacacgctcataagtnatanacaagtgaccatcctctctacgtataataagtgattcctctacgacttcatgtgttcgtagatatgtctcagggtcgatttnaagatatggtagagagtcatgtgacactgtcggtagaatgtgaggtcgagttgcgcggtcgttcgagtacctggtgcgacgtcgtgtcgtacacatacttatctctgtcgcgcaacgatcaatataatacagaatgacggtcggnttggatgtgggagatatcaancgatgatatgtgtaaattacagcgtatgcatagctccgatcacacactggatggtgcccaggnagacggagcgcttcacgatgggtgtagagactgagcgaagaggacgcttactggtgagacgggtcacgtatacgtcgacacattcatcgtctgtgagtctctgcaataacctcggcttcactgatgtggaaataaggtacattacatgtagttcgttcgtgcttctctatgtttatctgatggaaggacttgtgtgtatcttccccgtgagtagcctgttgccgagaacgctggcgggggggcgggggagcctataagaactcaaggcgatcgcttcacgaggatcgtgtcattcgttctaatctaatagtgagttttgattgacgtagcgcgcatgaggtataattaatatgtcttttctgtagaatctgtgatggttggcgttgcccaggatgatactcacgtgagatcacgtaatcggcaagagacattccaatcggaacagtatatctccggtagtcaaaagctattcgtttcttcctggctattgatggtcctgtgttcgctctagccttaatgcctgatcattgccatacttgccgttcctgttgagagctgtggacggctgcgctgttaatctacccttaagctcgagagaaccgcggcgccctgccagccgatggcgttggcttgatcagaggcctggagttagtcgtagttatgagatcgttctctggtagacgaggtgttcgctggcgtctcgctctagagtgttgtctcctaggggtgcttctcttctccacacccgggagggctcccactttctttaagagtgtcggctctcccctctgggggtgatgtcttcgcatctgttgtggtgtgtcgtaccggcgcgagtatgaagcgtggatagtggatgaggaggggggggag

SEQ ID NO: 3557 - DNA, 654 bp, Glycine max
  misc_feature (206)..(206): n is a, c, g, or t
  Peptide Sequence Number=SeqID_8152
  Probeset Number=SeqID_13336
caacaccagaatccgcgaatcacagacgcgtctatctcagcttgctgcactgcactaccctgccctgccatcatatcgtacgtgagcccggccgagcgagagcgagggaaagcatggctgctccgaagctcgcgacgctggcgctggccgtgctcctggcggggaacgggggtggctcccccgccggggggcgggcggggatgtcntccctccaccgggtacagaacgctgaatgcgggcctgcccttcctccaaatgggggggggcattgcccccccagggggggtggggggggaatcccgaagcctggttggaaaaggcaaaaaaaacccccggaccggcgaaaaattggggggtggcctcaaaaaagggccccaaacgggcgcaaagggaggggggaactaaatttaccccggccccccccgcttttccaaaaaaggggggggggccccccggccaaaaaaaaaccccccccacgggtttacgcgcacccgattaatttaaggggggggggccccctggcccccccccggaaaaaaaaaaatttcttggcccttgcgaaaaaaaaaaaaaaaaaggggccggggatttttaaaaaataggggggggggcccccccaccaacatttataaaagggggaaaaaaaggccaact

SEQ ID NO: 3558 - DNA, 1189 bp, Glycine max
  misc_feature (1189)..(1189): n is a, c, g, or t
  Probeset Number=SeqID_13337
attgtgttgtgtctctcactctctctctcttactcactcttctcttgggtctctagctattatcttctccgccgcggagatccgtcgtgcgtttttctcttccttctctctatcaatggattccctcgtcgaatccggttggcagtaccttgtttctaacttcagcgactttcaactggcgtgcattgggagtttcatcgtccacgaaactgtcttcttcttgtctggtctcccttacattctccttgaaagaacgggtttgctgagcaattacaaaattcagacaaaacataacactcctgaagcgcaaggaaaatgcatagcgtggctattgttttaccattcatgtgtaaacttccccctcatgatgttctcttaccgtgtcttcaaattcatgggcatgcagagcagttttcctctgccctcctggtattattataaggaaagtggtgtctgcccagatcttattcttcttcatcattgaggattttgtattctattggggtcataggatcttgcatacaaaatggctgtacaagaacgtgcatagtgtgcaccatgaatacgccacaccgtttggtttgacgtcagaatatgctcatcccgctgagattctcttcctgggttttgcgacctttattggtccggctctcacagggcctcacctaatcaccctttggttgtggctggtgcttagagtcattgagacagttgaagcacattgtggttatcatttcccatggagtccatctaattttcttcctctctatggcggtgctgacttccatgactaccatcaccgtttactctacacaaagtctgggaactactcatcaacttttgtctacatggattggatatttggtaccgacaagggttacagaaaactgaaggccctaaaagaaacctgacaacatgttaaacttggtatatcaagagagaaaggtttcactctccaaaactctccttttgttttgcggtctcgtgaatatttaaaactttagtcataagagcatcataatagcatgctatttggtctgaatctttcttactgtttgtcttaatctttggttagagctactgctcctagttacatttagtccataagattcattctcatgtatgcgcctcgcggcacagacaaagaacctccttcaagttatctatctgaaacctaaaagttgaactn

SEQ ID NO: 3559 - DNA, 1509 bp, Glycine max
  misc_feature (23)..(23): n is a, c, g, or t
  misc_feature (32)..(32): n is a, c, g, or t
  misc_feature (50)..(50): n is a, c, g, or t
  misc_feature (344)..(344): n is a, c, g, or t
  misc_feature (402)..(402): n is a, c, g, or t
  misc_feature (605)..(605): n is a, c, g, or t
  misc_feature (1073)..(1073): n is a, c, g, or t
  misc_feature (1297)..(1297): n is a, c, g, or t
  misc_feature (1341)..(1341): n is a, c, g, or t
  misc_feature (1395)..(1395): n is a, c, g, or t
  misc_feature (1401)..(1401): n is a, c, g, or t
  misc_feature (1403)..(1403): n is a, c, g, or t
  misc_feature (1415)..(1415): n is a, c, g, or t
  Peptide Sequence Number=SeqID_8153
  Probeset Number=SeqID_13338
tgtaggtgggagaaccgcgatcnaggagtaanatatctatttaaatatcnacatgcattacacactctactcacacaacataccacgtatattcaccatccactgttgaactcactccagaagaggaaagagagtcggcgtcgtgtgcgctgtggagtgcagtgtgagatagatgtagtggaggagtaatacagtggagtaaggtaagatatgaacgtagagaatatcaatgatgtgcctgttgccagctgcgtgagagagggtcgactatgagatgtgttaagttagttgtgtcgtgtttccttcttttgtctgctgtctcgtgctctgggcacgatttgcgntatgtctatctcacaattcatcacatcataactactcacaccgtataactctataaancaaagccgtaagtaccatttatattgttttctaatcgctcgctgctatcttctcgtcgcttcgccgtgccgtcacgccggtactgtcggcgcgcgcgcgcgtactctctgcaggctgtggtcgagtatgattgagtgacgagcctactgtgatgatgaagcggagattcccacagacgacccacgctatacttgcagcccttntcccttcgcgacgactcgccactcgccgcctcgctctcttccctcattgttgggagagccacatgtggttattatcgccgcctgcttaggcgctcccccatgctacttcctcaccttatctagtgcgttacagccctatatgcactcgcattgtcgctctcgtgactccctactcgcatcgtgcgatgcgcgtgacgaacaatatgcttgtattccgtgctgtgtatggtattgatcttatccgtctgtacttatctcttgtctagcgtctcgccgttactgctaccaggaccatctgactgaggagatcacagcacgtagtacgcgcgaccgacggcgaacactgattgctgctgtgtttctgctgtctacttatgtatcttcgtacctgtacgcgtctcatctctccctatgttcgtcgtattgccgatctgttaggcctacgtcttctcgagtctgttatctatntgttacagttcgcttattgttgtgatatctacatgatatatttacgtagtcttttctatcattctcttgagtctgttgcgaaaacacgcgagggaatgaagatgtgcgcgacgtactagacgagagacagtcgcgctcgccgtctgccacttgactcatgaaggcaatgtgcgacctcactcatttcatctctactctctctgacactgtcgtattccgctcgncgcgcgttatagctgactctgcaaacacactacgatatactaantatgatctctcgatagcgtcgcgtactagctggttactgtcattgtagtctagnatgtgncncgatccactttncatcccccaactatgaagcacacatgcacagacgtgtgctctgtctgtcttgtcgatgcgacttcgtatgtatctctctgcgtctccgtggcgc

SEQ ID NO: 3560 - DNA, 1380 bp, Glycine max
  misc_feature (1)..(1): n is a, c, g, or t
  misc_feature (15)..(15): n is a, c, g, or t
  misc_feature (20)..(20): n is a, c, g, or t
  misc_feature (34)..(34): n is a, c, g, or t
  misc_feature (36)..(38): n is a, c, g, or t
  misc_feature (50)..(50): n is a, c, g, or t
  misc_feature (482)..(482): n is a, c, g, or t
  misc_feature (686)..(686): n is a, c, g, or t
  misc_feature (723)..(723): n is a, c, g, or t
  misc_feature (806)..(806): n is a, c, g, or t
  misc_feature (818)..(818): n is a, c, g, or t
  misc_feature (829)..(829): n is a, c, g, or t
  misc_feature (870)..(870): n is a, c, g, or t
  misc_feature (918)..(919): n is a, c, g, or t
  misc_feature (923)..(923): n is a, c, g, or t
  misc_feature (934)..(934): n is a, c, g, or t
  misc_feature (952)..(952): n is a, c, g, or t
  misc_feature (955)..(955): n is a, c, g, or t
  misc_feature (1200)..(1200): n is a, c, g, or t
  misc_feature (1297)..(1297): n is a, c, g, or t
  misc_feature (1380)..(1380): n is a, c, g, or t
  Probeset Number=SeqID_13339
nggggtggggggttnctccntccactctccctcncnnntctgattgctcnctgaaatcggtgtgccgcgacgcactgaactcactttcacataacaaatagaagtcagtgaaaacgagaagagggcagaggagaggacatcgtacgtaagatatgaaccaacgatcatttgtatttcctcaataagaagagagcagagaggatggaagacacaacacatgagacgttatgttctcgagtgttagtgtattgtctggatacgaggacgacgcacaaccaagcctactacgccactcaactcataagagaaaagatcaaactggacgccgtctcgttctactttatgcctctcgcggatcaaagtctctgtcgacagtaacgaccatcgcgcgcgactgctgcgttgccactcttatcgcgacacacgtctcatcgtcgagcgcagcgcgccctccaactctccacgatgctgatacacaaganactagttcacagagggtcgagtagaggtgtgtggcgttgcgctccacggacgattacatcctttgatgagcgctcgctgtagaaccagacgagaagccgcgaccgtcgcagcccgggcacgtggacggcaggccctccttgcaacaacgattagatccgtcattccacagccacacaacgcatccatgtaatgtgtatgcaggnagtggagacacacaacgttactcgagacatggtcagncgcactactaagagagacagatgtcgacatcttggaacaaggtgtcagtgggcgtcggtgacgtcctacggctgcacgtcccncgttctgccatnccagcgcctgnctgggcatgtgcgcgcttctgtgagctcgcgatgcgtgcgngattcagtacgtgactctaatactagtcatcacgaatcgtataatgannaaanaaacaacaacnatctgatcatccgatcgnatnacgacatcagactacacgcctccgccacggtcgtgcgctagagagcgggtgggaggcgcgccgcgcccatccgcctctctcacgcggatctggcacagatatatgatagagtatgacgggatagtgatacatagcacatacgcactacatacttcactgaaagagatagcgatgtttacatcggtggagagtatgcgggacgcatcagagagaatcgcgaactcgactcgagcgacgtgtgcacncgatagctactagaagcgccagagacaaacacgagcagatcactacgatgtaattagaggatacgatgcggagaacagggacggcgtcgcgatgaangtgatatgaggacagacaagaagcgagcacatagacacgatcatcgatgtgacatactgttgtcgatggaacgtcatagcgtn

SEQ ID NO: 3561 - DNA, 197 bp, Glycine max
  Peptide Sequence Number=SeqID_8154
  Probeset Number=SeqID_13340
gaggagtttatgaacgatacgtattccgcaggacaggatgcagtagatcaaaacccgtcgtctggaacatgccagccttagatgctggtggtgtgacgggcgattgcgcttgcgtgtacagtggacgaagggctgttgacaaagccggtgatattcggagtagcgagaatggtttgccctccatcggcaagaggatg

SEQ ID NO: 3562 - DNA, 584 bp, Glycine max
  Probeset Number=SeqID_13341
ccccccccccctttatgcgccgcttcagggggcgttccctttgcccttccgggttcgccactttttggaagggccatccgttcgggcctttttcctttttcccccccttgccaaaaggggattttcttccaggccctttagtttggttacccccgggtttttcccctccccccctttttaaacccccgccccttaatttaattttggttccccttttaaaaagcttttaccttccctgcccccgttcgttaactttggtccttttaagcggcccccccttttttttttttttttttttttttttttttttttttttttttttttttttttttttttttttttttttttttttttttttttttttttttttttttttttttttaagatgaattcatatcattcatttagtaggcatctatcggctaacagaaggtacataagtaaaaaattcagggggattaaaatacaacaaccggacgctaaagattgaccaaacttccttgcattcgtaagaattattttggtatacacaatctaaaactaaatccttttttacactgttacatcaaacaacacgttctcag

SEQ ID NO: 3563 - DNA, 448 bp, Glycine max
  misc_feature (439)..(439): n is a, c, g, or t
  Peptide Sequence Number=SeqID_8155
  Probeset Number=SeqID_13342
accatgggctcggatagcccatccctggggaggcaggcccatggccatgacggtggaggcaatcgatgagcgcttatagggaattcccgtttacgccctcagcaacgcttccgaggagtttctcttggtctccggctcttcctgcaggaagaaccttggcctcttctgcttcaacaaggacgacgccaaagctctgctcaaccacgttacgcttatcgacccccacgctcgccagggctccaaagttgggcccgttgctttgaacaatgtgatgcagctcaaggcgagcggcgttgcggttatattgatacctgagttctctcaagtgaagaatgcgctgccagagacggaaaaatcaggctttgcttccagaggctatctctgtggtgcagttttccaggtgcttctcccaactattgaaagtctgtcatatccattngtgtattat

SEQ ID NO: 3564 - DNA, 1372 bp, Glycine max
  misc_feature (15)..(16): n is a, c, g, or t
  misc_feature (24)..(25): n is a, c, g, or t
  misc_feature (27)..(27): n is a, c, g, or t
  misc_feature (30)..(30): n is a, c, g, or t
  misc_feature (49)..(49): n is a, c, g, or t
  misc_feature (52)..(53): n is a, c, g, or t
  misc_feature (1258)..(1258): n is a, c, g, or t
  Peptide Sequence Number=SeqID_8164
  Probeset Number=SeqID_13343
acacccaacctcccnncctccttnnantantttttttttacaacccccnacnnatttttattttgtggcgccgggtttcttctttccgttggttgttgttgagggcggtgttcgcgccgcggtctgctcgcggttgtctcttttggagtgggttgtggatggatcccacacacccgcttctttggccccgcgccgcgtttgcgaaaaaagaacctcgccgttatgttctttctttttcccctcccctcacttctggtttttttctctctcactctctatattttttactccccacgctaccaccagctactttctatcgaaccaggctgcctgttgttgcttcattcttctctcttctctcctgttcccaccctctcattttctttctcccccctcccgcctttcccttttcgcgcggcggtggtggtttgttatcgtcgcccagtagtagttaatattgtgcccacgacgttttcctaaggtcacgaccgtggcgttgttttgtatgtgtgttattttttgtgaacttgcgctatgaacataatgagtgttgagacggcagacggaacaaggcgacgcccatcggcgcgcacttttgtgtgtgtctcagccgcaacctaaagccagaccagggggttctgtgtgggtcgttaactatatatggtttcgcctttgttattcgactggccagaatatatgttgtcggcaagacacaaattgttgttgttgttaggtctcctacgcccaaccaaaccactctcgcattattatatattcgctctatttcgcgccccctccaccccatccgtttgcggaagtgctcgtgccactctcgcgacgctagctgtctgatacccgaaccaggagattgcactcgcccgccgtgtacgctttgttctttattattgcgttcacgtacagtgtataccgctgctcggcattttgtgtcagtcgcgagatactatattctatgtcgttcgcttaggccggcaacgcgtaccatctgtgtgtggtggtaagtggcgagacgcggtgctccatgcagctgtatgtttgctgcggtttatctcgcatgcgctacacacagcctcacactggctcgtcgaggatacgaaccgggctccccagtgtctgtgtctgtcttgtgtttgtggtgtgggatgaaaaggcgcatttccaccatttattttctcctcgcgctcgaggccaacgcgcaacgtgacactcgagcggccgtggtacgttgggagcttatgcngcgttgctctatgtgttgggagtgaggctctcctttttcttctgccttcgttgcccagtattttttttgatattttttttttgtgatgcatcgcatatctctattgtatgttcg

SEQ ID NO: 3565 - DNA, 553 bp, Glycine max
  Peptide Sequence Number=SeqID_8165
  Probeset Number=SeqID_13344
tgactcactgtatatgaatgcgcttgcactacaatcgcgggtcaactccaatggcgttatcgagcgatcattactgcccggctattactctctggagatgtcttcggcagtgtacaagagttgggtgtttactgatcaatcccttcctgcagatcttatcaagagaggaatggcaattgacgatccctgtgcgcaccacggccttatccttgtgatagaggactacccttatgctgctgatggtctaaagatatgggatgctattcatacatgggttaagaactatgtctccttgagttagccaacgtatgatgcctttcagaaagactctgagctcctagcttggtggaaggaagctgttgtgactggtcacggtgactggaaagactaatcatggtgtcctaagttgaacactgcttaagattttgttcacatatgctccatcgtcatgtggatagctgcctctctccatgcatcattgaattatggactatatctttatggaggtgtgatcctaaaccgtacaactataaccagaagatgtctatctgaa

SEQ ID NO: 3566 - DNA, 489 bp, Glycine max
  misc_feature (419)..(419): n is a, c, g, or t
  misc_feature (432)..(434): n is a, c, g, or t
  misc_feature (448)..(448): n is a, c, g, or t
  misc_feature (450)..(450): n is a, c, g, or t
  misc_feature (455)..(455): n is a, c, g, or t
  misc_feature (458)..(459): n is a, c, g, or t
  misc_feature (463)..(489): n is a, c, g, or t
  Peptide Sequence Number=SeqID_8166
  Probeset Number=SeqID_13345
aaaatcctttgtctcccccccccccaatcaaattagggttagggctctcatcttcctccccctttcacagccgccaatcgacgatgacaggcaaggcgaagccgaagaagcacacggcgaaggagctccaggccaaggccgacgcagcgctgaccaacagaggcggaggaaaggcggggctcgccgacaggacgggcaaggagaaaggcggccacgcgaagtacgagtgtcctcactgcaagatcacggcgccggatctgaagacgatgcagatccatcacgagtcgaagcatccaaagctgccttacgaggagccgaagaatctccacgaggctcttggtgctgctgctcctgagtcgtcttccaaaccgaaacctggaatcagaggaagcctcaagaagtgatcatctttgtggtgnatcgaattgcttnnnttaatgcaagctgngntcctnatnntccnnnnnnnnnnnnnnnnnnnnnnnnnnn

SEQ ID NO: 3567 - DNA, 386 bp, Glycine max
  misc_feature (61)..(61): n is a, c, g, or t
  Peptide Sequence Number=SeqID_8167
  Probeset Number=SeqID_13346
gtggttgacttatctatgtgatgcacatcattaaatgcagtcttgttcttatactgctcantttcctatagcgttttcttttgaaaaaacgcaaggccttgtttccataaacaatggtgtttggagcaaagaccacgtttctgctttacagaagatttgtcctatggttagcaattatatcacttcttaagcatctcctacggaagttgagacatatggtgcttcaaaactgactgttgacttgcctgtaaaatacttgcagcttgctaataagctcttttcgcaatactaactttttcatttttttccagcatccttgaacttgaaatcccatttacaaaaacattaaggctttattaaacattttccttaattttacacattac

SEQ ID NO: 3568 - DNA, 1468 bp, Glycine max
  misc_feature (60)..(60): n is a, c, g, or t
  misc_feature (63)..(63): n is a, c, g, or t
  misc_feature (75)..(75): n is a, c, g, or t
  misc_feature (995)..(995): n is a, c, g, or t
  misc_feature (1009)..(1009): n is a, c, g, or t
  misc_feature (1306)..(1306): n is a, c, g, or t
  misc_feature (1435)..(1435): n is a, c, g, or t
  misc_feature (1445)..(1445): n is a, c, g, or t
  misc_feature (1458)..(1458): n is a, c, g, or t
  misc_feature (1468)..(1468): n is a, c, g, or t
  Peptide Sequence Number=SeqID_8168
  Probeset Number=SeqID_13347
tctttctctggagtgctgggggcccatggggcgggggtactacgcgctggaagagcccgnggngtcgctatatgntgagaagcttaatttgacatgagggggcgcgggggacgcaggaccggagggtggggacccgcctcgaggcggtgcgggcgcgattgtcccccatcctgcgtcgagcgaggaccgacgagggtggatcccgccgtcaccggccgcccgccgccgctgcgcgcgtcccggcgcgagcgcgcccggaagagacgaagcactgagcctgcggactatggcgcagagcgcgttggcgactctcgcgaactggcgctcgagggtggagaggcgacgcagccggagcgggacggggtgcgtggcgcgccgcttccacgacgaagtgcgagttacaagtgaatcgagacgcatgcgagcaaccagagtgtatgaacgagatcgtaggagatccaatagagtcggcttgtgatgagaaagggagggggatggcgccgggaggcggagggacgatggggcggcgccaaggagaggagagcgacagttcaacggaaggcacgcgagcgggctgcggcgcaaggctgcacaagccaacacgagacagaacggtgatctcccctaccagaaacggtatatacgaagagccgagcacgcggtcgcgagcgcgggggaatgggacgagcgccgcgtcagtgcgagagacgtggcgcggcgtcgaaccgcccggcaacacggaatgagcgctcaccctccacgccggatactggcgcacgacgagagacgcgcggcggcgggcgacgacggcctactccaccgcagcggcaggccagaagcttggagcatggcacatcgcgtatccaggactacagctcggaggtaacaagcaatgacagtacagctgccggcggtgccgactggatacgatagcgcaggcgcggcggagcgatggcggccgaacgaggggacgcgccaaggtgcggtggtagaantgatatggcaacanacaggcgacgtagatgtcgaacagacggagagagacgacgagacaaaccgatgacgctggagaggcaacgaggcacacaggataaggcaccgccagcacatgctgagaggcaggaaccagaggcagagtgtaaccccatagagtgagaggctagcacaagaaatttagcgagtagacacagcgagacggcgacaaagacaaacacaggacgatgtggacgaggatgagtaggggtggggagaatgcgaggacgtggttgtagtgggagagggtgcactgataaacactagcgagaanaatatagactcctgaacgaaagcacgtcacgcgctagaagatgcagagacgtataatgcggcggcgctctggagtgcgtcctgcgccggtcgagagagcgttgtcgccgcggtgaagagaggagtaggncgcgcgccanggcaggttggcgntgagacgagn

SEQ ID NO: 3569 - DNA, 1369 bp, Glycine max
  misc_feature (393)..(393): n is a, c, g, or t
  misc_feature (512)..(512): n is a, c, g, or t
  misc_feature (619)..(619): n is a, c, g, or t
  misc_feature (799)..(799): n is a, c, g, or t
  misc_feature (1260)..(1260): n is a, c, g, or t
  misc_feature (1292)..(1292): n is a, c, g, or t
  misc_feature (1311)..(1311): n is a, c, g, or t
  misc_feature (1338)..(1341): n is a, c, g, or t
  misc_feature (1343)..(1344): n is a, c, g, or t
  misc_feature (1347)..(1347): n is a, c, g, or t
  misc_feature (1350)..(1354): n is a, c, g, or t
  Probeset Number=SeqID_13348
cggttgtgctctcgcctacacgactgatcctggtcgttgcatctcaccaggtgcgagcttgtagagagacagtctctctctgctctgctacaggtgtggtggttagtttttattgatctggaacatcgagagtctaggagatggtgttaggagtaccattccttctcaatgtgagagcggcgtctcacatcgctagcgtatctacacatagataagggcgtgggggtagtggattgtgttcctcctactaatggatatgtctagtagtgatggtgctttcattcttatttatattaccagatgatgagtttgtgtgtatatctccccacgcacacgtcgtcccgaagatttagtcatgaacgtggagggtgacctgataacaagacacctganctacgcatcatacagatcatacagtttatatgtatcgctaccacacacgcacattccgatatctgtggtgtgatgttatttctagtctcacgcccccttctccctttatatgatcaacnccacgcgtggctggtgataggcttcggtgggagtgcactcgcgggtcacattactaatattgtgtcgagttggtatatagtgccacaccactcatctcttcgtaatncataataatcactcgccgccacaacatgatggaacttcgttgatagccgccccctctatctcattcattgcccaaatagaggcagtcacacagtagttagctccatagacattttcttctgtttgggtgtattgtagcgtctcgctctctttcacttcttcctcattgtataaagggcgngggggcagtttcgcgaggtcttccaacttcttcccacatttggggttatagttgcgcgttttgtgtgtgcctcttgtttgttaagggagggacccccaagaacccccaattgttctaacccaaatttgcacaggttttattccgggtgggaggtaggggggaatgctataataggggcccttctcccacctttgtattttaatttttgtattgtcgggttcgctcatggggccggtgcgaggagggagttcagttagagggggggaacacgagtgggggggggaacactcacacagcactatctcaacacacacaacatctccctcttatacaatatacgatacaaaatccgcgccatttataaaattttccccttcatgatatttagacgatatatatcatggcgaaagtttgttaaagattatcactgcaagaaagtaacagtaataagcacataaagntattttctttggtggaattgaatccaagccgngcgtgtccgcgcgtgcgangaagggagggcaggaagagtacagagnnnnannggnagnnnnncaaaccccacaccac

SEQ ID NO: 3570 - DNA, 1889 bp, Glycine max
  misc_feature (13)..(13): n is a, c, g, or t
  misc_feature (47)..(47): n is a, c, g, or t
  misc_feature (64)..(64): n is a, c, g, or t
  misc_feature (85)..(85): n is a, c, g, or t
  misc_feature (126)..(126): n is a, c, g, or t
  misc_feature (140)..(141): n is a, c, g, or t
  misc_feature (223)..(223): n is a, c, g, or t
  misc_feature (249)..(249): n is a, c, g, or t
  misc_feature (271)..(271): n is a, c, g, or t
  misc_feature (286)..(286): n is a, c, g, or t
  misc_feature (291)..(291): n is a, c, g, or t
  misc_feature (299)..(300): n is a, c, g, or t
  misc_feature (320)..(320): n is a, c, g, or t
  misc_feature (345)..(345): n is a, c, g, or t
  misc_feature (365)..(365): n is a, c, g, or t
  misc_feature (369)..(369): n is a, c, g, or t
  misc_feature (382)..(382): n is a, c, g, or t
  misc_feature (389)..(389): n is a, c, g, or t
  misc_feature (393)..(393): n is a, c, g, or t
  misc_feature (395)..(395): n is a, c, g, or t
  misc_feature (513)..(513): n is a, c, g, or t
  misc_feature (644)..(644): n is a, c, g, or t
  misc_feature (748)..(748): n is a, c, g, or t
  misc_feature (750)..(750): n is a, c, g, or t
  misc_feature (767)..(767): n is a, c, g, or t
  misc_feature (784)..(784): n is a, c, g, or t
  misc_feature (801)..(801): n is a, c, g, or t
  misc_feature (816)..(816): n is a, c, g, or t
  misc_feature (948)..(948): n is a, c, g, or t
  misc_feature (968)..(968): n is a, c, g, or t
  misc_feature (1043)..(1043): n is a, c, g, or t
  misc_feature (1262)..(1262): n is a, c, g, or t
  misc_feature (1337)..(1337): n is a, c, g, or t
  misc_feature (1476)..(1476): n is a, c, g, or t
  misc_feature (1501)..(1501): n is a, c, g, or t
  misc_feature (1533)..(1533): n is a, c, g, or t
  misc_feature (1561)..(1561): n is a, c, g, or t
  misc_feature (1597)..(1597): n is a, c, g, or t
  misc_feature (1605)..(1605): n is a, c, g, or t
  misc_feature (1653)..(1653): n is a, c, g, or t
  misc_feature (1670)..(1670): n is a, c, g, or t
  misc_feature (1736)..(1736): n is a, c, g, or t
  misc_feature (1800)..(1800): n is a, c, g, or t
  misc_feature (1826)..(1826): n is a, c, g, or t
  misc_feature (1848)..(1849): n is a, c, g, or t
  misc_feature (1856)..(1858): n is a, c, g, or t
  misc_feature (1862)..(1864): n is a, c, g, or t
  misc_feature (1867)..(1869): n is a, c, g, or t
  misc_feature (1877)..(1877): n is a, c, g, or t
  Peptide Sequence Number=SeqID_8169
  Probeset Number=SeqID_13349
cgtgcgtgctgancggtgatgggatactgactcacagcgtcaacgantcgagcgacgcgatagnattacgactgaccgacgtcgncgttcagtgagtcgacagagagacgtccatacagacgacancacttcgcgagaannatgcgagacgccgtgatgatactgacgacgagacgtcgagtgcgcaggcgacgcatgcgtcgcacgcagacgcgtggtcgtncccgcgcggacgtctatcgcgccganagcgagtcgtctgagcgaacgnacagaatcatatcgnagatnacgcgcgnnacgcgtgtcagttcgtcgancgcgagcagcagatacatcgcgcgntgacgactcatactactcgncgantgtagttaacagncgtagtncgtngnatgtacgataagtcaggtgcttagctagtgtcgtcacacgagcatcagacatacgcatattatcagtatcggcgctcgatatacgcagtgcacgctcgatgtaatcgtcgtcggggtnaccgtggtcgacatacacgaacagatgaaagtcacgctcgacacgagtacgacgacatgcagcgtatcagctgactcgcgtatcgcacttacgtctcgagatcagtccgtccgtgacgagctcggtactantacgacgcatcgactgagtcgtaaggatatcatagacgatcacacagatgctgacgacgcgagtatacagctagcgcgcacgcacggtgcacactcacgatacntntagtgagacgtacgtcngcttcgtcgtctgttanctatcgatgtccatgtnttagtaattgactgntctagaggactgatatagtagatagcactgatctagttacatatacacaatatcagtacgcacgcacgtatatgacagtggcggcgcgacagcacttcagtacgcgccagtgcgatacaatactatatctgntatatgtacgcatcacactnagattgagcagcactatcgtagatacgaggtatgtatagaatacggtgacagctatctatctgatctatgtgagngagtaaggatcatatgcacgagacatagcactactcgtcatactgtacgagatcgtggagtaataagtgcgcgaggcgtgcacagataacatgaacgtgcactagagagtatagcgaatatcatctactcatcgtgaattggattatcgtagagatagatagaatcatgcagctcgtctcgtcaactcatcactcgctcgagcaaacacattccacgtncgtacgctgagtaacgcacaacgccggatgcggagactagagtagctgagggcgagagacgagcacgagatgtancgatcgtgacaatctacatcgctctcgcagttcgtctgcacatcatacagacgcgatgaacagcaaacacacagacgagagtggagagcagcgcgcgacaaggtccatagtcgcgaacgatacggacatataacgcccngacgacacgaggtacaagactacancgcatacgcatcacggccgtatacacatgcangcgctatacactgcacacgagatcacgncagcacgcgcatctgcacgacagagcgacaatccanctctatantgctgactcgcggcgtcctactacatcgaaggagtgaggagtagagantaaaagtatgtggatantacagtcgaagtatatatgtagtagatgatgtagcgatacgagcgatgggtgataatgcgcgtagnggtgtgtgggagttaacgtgtgggagaggtagaaatgaattacaacagttcttagatgaatgtncgatatgacacaggccgcgacgaagngagagagagaaaatataagaannaaaagannnaaannnaannnaaaacacnaaaaaaaaacaa

SEQ ID NO: 3571 - DNA, 584 bp, Glycine max
  misc_feature (432)..(432): n is a, c, g, or t
  Probeset Number=SeqID_13350
ggggggggggggccaaataaaaaagttttaagggcgggaaattcccaaccacccccaatattttttccccggaaagagaggaaacctttttttccccaaaaatttgggggggcctttttcccaaattagggagagggggggtcccctcccttttttttttggtgcggggccctttccccattccaaacccaagggtttttttcccggggggaaaaactgggcccccttaaaaaaacaggaggaacttatagggggccaggtcgagggtggtggaaagacccgggtgcgaaaaggggcggggaaaacaacaggcgaggggcttgttgctgctggcatttccgagcgcttgcagcggtgacagcatcagcgcatgaggctcctcttggtgggggatgcgaaggggctgtcaggcaagacgagctccacctccancacgccatagctgcatccgtcaagtgtcggccttctcaactcatcataacaatcaaggaatattaaacaaaataaggacaagcagaagagctggctgatttagtgagagattttagaagcaataccacggcaagaagcatataacaccatct

SEQ ID NO: 3572 - DNA, 1794 bp, Glycine max
  misc_feature (99)..(100): n is a, c, g, or t
  misc_feature (526)..(526): n is a, c, g, or t
  misc_feature (770)..(770): n is a, c, g, or t
  misc_feature (778)..(778): n is a, c, g, or t
  misc_feature (976)..(976): n is a, c, g, or t
  misc_feature (1007)..(1007): n is a, c, g, or t
  misc_feature (1077)..(1077): n is a, c, g, or t
  misc_feature (1299)..(1299): n is a, c, g, or t
  misc_feature (1350)..(1350): n is a, c, g, or t
  misc_feature (1371)..(1371): n is a, c, g, or t
  misc_feature (1431)..(1431): n is a, c, g, or t
  misc_feature (1456)..(1456): n is a, c, g, or t
  misc_feature (1525)..(1525): n is a, c, g, or t
  misc_feature (1569)..(1569): n is a, c, g, or t
  misc_feature (1571)..(1571): n is a, c, g, or t
  misc_feature (1573)..(1573): n is a, c, g, or t
  misc_feature (1654)..(1654): n is a, c, g, or t
  misc_feature (1688)..(1688): n is a, c, g, or t
  misc_feature (1727)..(1727): n is a, c, g, or t
  misc_feature (1766)..(1766): n is a, c, g, or t
  misc_feature (1794)..(1794): n is a, c, g, or t
  Peptide Sequence Number=SeqID_8170
  Probeset Number=SeqID_13351
cactccccatcaactctatactctcactccttaactctacttatctataatatgcgcctccaacataacgtcctacttatgtatgtatataataatggnnatacggcctatactcttctaaacactagaatgggtcaaccatagccgcaaatcattgcctatcgctaagcgacaacaacgtctctaccactgtgccaagatagtcacatatcatagttgatctctcgatcacatatactattggacatgactagcaaatgtataagacggagcatctctacctctcactataccataaattctatacctgtgactaatcgaggatcatcgagaactacgtcaacgcacatctcgtccttacaacgtatgtaagcatgagaaagcgtggacaaacccagcaactagttactctatctaccaaccagtaattatacagcgctctatctatgtatggcgccagaaagcaactatcctcctcaagtgcaatgaccataacatactccactccagattgatgtccattccnacattatgtatattcaaattcatataagaactacactggttgctctcaccctggatgaacaattatggtccttcactaatgcgatggacatagccgcctatatctgtgacgacttatagcgcaaatcgtggcactcggcacaacacccattcttcttagaagatcgctggagtatcacacgaatcgttatatacacccctcgcactcttgcgttggcgtcctttactagcactacctcgatcangacatatncgtcggcattacatgggacataccctaacatgagacggtatgctcaattcgagtatattcatcgtactcatactactctccgctactcagacttatagaatgaattagtaacaatattgtggtcgtacgtcgttctatagtcttctacccaatggagtgataacatacataccagtgtctcgagtctaatatttacanagtaacattatcctcttcatatggaacactncaaagccgtactacgcggcctcatgttgtggtatcatcagtgcttactcagacagattacaattgacgcnactaagtctcacgaatgtgtgaaatcaatgactttgcacccatatccctctcagtacgcacgttctaccatgttttatcttcactcacaatactctacttcgcactcttcgcctggaaaatatattcacgaaatatctatacacgtgtcagaactacatacgcgctcacgctatctcgtcctgggcatctaactatagaatataagatcccgcgtcgtctantctccactcgaatacacattctcgcgcgctaatcttcgcgcgtagtaccanagtacgaggactatcttcatncgcactatagtctgactctatatctctcgatatcgcacacacgaagcgcgctgactagancgagaactaccgtctagacatatanatagtaacgctatcgcgcgaccatgacatcggcacctctcgctactacctactcctatatagatcgctncgtcagacgacaggcgaatatgcacatataatgacgtgatactncncntataattcgttgcgatattatccaatactctcacgcgccagacattactatagaatagcgatatctcatcacttgcactcnatcatataccatataatcatgtctgacctaaatngtctctcgtctcgcgtgtgatatacagactccgcttcgnctgcacacgacaagcaaccacacaacgctctcctgcctntatatgaccgcgcaaatctatgatcaan

SEQ ID NO: 3573 - DNA, 812 bp, Glycine max
  misc_feature (2)..(8): n is a, c, g, or t
  misc_feature (12)..(19): n is a, c, g, or t
  misc_feature (22)..(25): n is a, c, g, or t
  misc_feature (627)..(627): n is a, c, g, or t
  misc_feature (629)..(629): n is a, c, g, or t
  misc_feature (643)..(643): n is a, c, g, or t
  misc_feature (645)..(645): n is a, c, g, or t
  misc_feature (648)..(648): n is a, c, g, or t
  misc_feature (670)..(670): n is a, c, g, or t
  misc_feature (673)..(673): n is a, c, g, or t
  misc_feature (678)..(678): n is a, c, g, or t
  misc_feature (686)..(686): n is a, c, g, or t
  misc_feature (695)..(695): n is a, c, g, or t
  misc_feature (697)..(697): n is a, c, g, or t
  misc_feature (699)..(699): n is a, c, g, or t
  misc_feature (704)..(704): n is a, c, g, or t
  misc_feature (708)..(709): n is a, c, g, or t
  misc_feature (715)..(717): n is a, c, g, or t
  misc_feature (719)..(719): n is a, c, g, or t
  misc_feature (727)..(729): n is a, c, g, or t
  misc_feature (731)..(732): n is a, c, g, or t
  misc_feature (735)..(738): n is a, c, g, or t
  misc_feature (740)..(741): n is a, c, g, or t
  misc_feature (743)..(744): n is a, c, g, or t
  misc_feature (746)..(748): n is a, c, g, or t
  misc_feature (751)..(752): n is a, c, g, or t
  misc_feature (755)..(758): n is a, c, g, or t
  misc_feature (760)..(760): n is a, c, g, or t
  misc_feature (762)..(763): n is a, c, g, or t
  misc_feature (768)..(769): n is a, c, g, or t
  misc_feature (771)..(771): n is a, c, g, or t
  misc_feature (773)..(774): n is a, c, g, or t
  misc_feature (776)..(779): n is a, c, g, or t
  misc_feature (783)..(785): n is a, c, g, or t
  misc_feature (787)..(791): n is a, c, g, or t
  misc_feature (793)..(794): n is a, c, g, or t
  misc_feature (796)..(801): n is a, c, g, or t
  misc_feature (803)..(803): n is a, c, g, or t
  misc_feature (805)..(812): n is a, c, g, or t
  Probeset Number=SeqID_13352
gnnnnnnnaggnnnnnnnnttnnnncaattgggtaccgggccccccctcgagaacatcgtcgcccactcgcagcccgagctattcgcgcccggcaacgacgctgccgtccggcgtggcctttgccaataatggcggctcgtcgggtccgaacttcttcgagcggctgttcggcggcggcgccccgaccccgccgccggctccggttggccgccggccgcagcgggttttcacgcgctgagccccggcgcagctaaattccccaatgaaatcagcgaccccgtccgctggatggggtcgcttaacgttaaccattctccacccgagttcgggcggcgggcgttttttcgccacactcggccgtttaggattgtagcctgacttggttttgggggcgggaaggtaagctgcaattaaccttctcgctttaagaaagcgttcaccctctttcgcgcgctaacggggttggcgggagagtccattttgaacgctcgtcgactgggtgggctcattcgtgctggctggtttcgcacgccaattcgctgcgttgtcgttgtcccatgcgggccgtgaaggtcggatctcggatcgggctcgcctcgctggtgctgctcgcggctgccggttcngnacataacgcccgcncnctnaactgcagcccgggggatccantantttanagcggccncaccggggngnantcagntttnntctttnnngngggtaatnnnanntgnnnnanntnngnnntanntgnnnncngnngaaanngntnncnnnnacannncnnnnnanntnnnnnngnannnnnnnn

SEQ ID NO: 3574 - DNA, 1586 bp, Glycine max
  misc_feature (1)..(1): n is a, c, g, or t
  misc_feature (28)..(29): n is a, c, g, or t
  misc_feature (93)..(93): n is a, c, g, or t
  misc_feature (110)..(110): n is a, c, g, or t
  misc_feature (130)..(131): n is a, c, g, or t
  misc_feature (174)..(174): n is a, c, g, or t
  misc_feature (221)..(221): n is a, c, g, or t
  misc_feature (223)..(223): n is a, c, g, or t
  misc_feature (260)..(260): n is a, c, g, or t
  misc_feature (283)..(284): n is a, c, g, or t
  misc_feature (286)..(286): n is a, c, g, or t
  misc_feature (288)..(288): n is a, c, g, or t
  misc_feature (352)..(352): n is a, c, g, or t
  misc_feature (364)..(364): n is a, c, g, or t
  misc_feature (366)..(366): n is a, c, g, or t
  misc_feature (429)..(430): n is a, c, g, or t
  misc_feature (438)..(438): n is a, c, g, or t
  misc_feature (440)..(442): n is a, c, g, or t
  misc_feature (480)..(480): n is a, c, g, or t
  misc_feature (491)..(494): n is a, c, g, or t
  misc_feature (499)..(499): n is a, c, g, or t
  misc_feature (534)..(534): n is a, c, g, or t
  misc_feature (560)..(561): n is a, c, g, or t
  misc_feature (672)..(672): n is a, c, g, or t
  misc_feature (675)..(675): n is a, c, g, or t
  misc_feature (678)..(680): n is a, c, g, or t
  misc_feature (695)..(696): n is a, c, g, or t
  misc_feature (711)..(712): n is a, c, g, or t
  misc_feature (726)..(727): n is a, c, g, or t
  misc_feature (752)..(752): n is a, c, g, or t
  misc_feature (765)..(767): n is a, c, g, or t
  misc_feature (780)..(780): n is a, c, g, or t
  misc_feature (811)..(811): n is a, c, g, or t
  misc_feature (814)..(814): n is a, c, g, or t
  misc_feature (862)..(863): n is a, c, g, or t
  misc_feature (876)..(876): n is a, c, g, or t
  misc_feature (1003)..(1003): n is a, c, g, or t
  misc_feature (1056)..(1056): n is a, c, g, or t
  misc_feature (1072)..(1072): n is a, c, g, or t
  misc_feature (1333)..(1333): n is a, c, g, or t
  misc_feature (1436)..(1437): n is a, c, g, or t
  misc_feature (1507)..(1507): n is a, c, g, or t
  misc_feature (1518)..(1519): n is a, c, g, or t
  misc_feature (1526)..(1526): n is a, c, g, or t
  misc_feature (1528)..(1528): n is a, c, g, or t
  misc_feature (1534)..(1534): n is a, c, g, or t
  misc_feature (1558)..(1558): n is a, c, g, or t
  Peptide Sequence Number=SeqID_8171
  Probeset Number=SeqID_13353
ncgatgtagatatctgcgtcagatattnnagtatgtatggtggtgtgagcgaaggcttggacaagaggcgaggcggttgaaccgatggtaagnttgctagagaaggctgnctctgtactcgtactgagtnnatcatcattacctagtgtcactcagcgatcagtctctccaccncaccaccaccatcggacgcatagcgaagagtatggatagttggtatnanctgagacgtgcgttgtatataagatcctagagacatntacatgagaacagcgcgaaaganncncncaagagcggacagcagccatccttcgcggagtgcacgaatgcatgcgttactcagctctctcancgagaacgacgnanctgtaggaaataatgtgagaataacgtgagtaggaggtgagggagggctcgatggaggctcgnngagaaaangnnngcggaatagttaggtggaagcggacggggaacggcacngagtgcctccnnnntgagntgttggttgtagtgtgttgtgttagttttgcgtgntcgatcgcgtgtgaggcagagcagcnnagacaccgctcgtgattgtgcaggtatatgtgacacgtcatcctacgcgcgtgaaccacacgcatataaacaacacacataatcttaattatatcatacaagcacacctanacnatnnntttgatctggctacnncttatcagatatttnntctccactcatatnncattctacctctttctttatatatnttattccttcctnnnccactcattctcncactataacatcttcccctcccatcactacnaantctcgacatatgtaagacgaatggtataagattaaatacacataaaanntctctatgccacncatataatcggtgtatatacgattatgaatcgtgctttttcacgcgcgcgacacgctagatgtgtaaacaaccacaactaataataataatgtgaccacgacgcaacggaatacgtatatatgtatntgatgataccgtaaggtgaggttggtgagttggaggttaatttcttgtactcnataatgagggcgaganaagaggaagctgctgagtatagagcgcggtcaggatgtcgatcgcgctgagcaatcgtgcgcgacaaaggaggagatcaggagagagagcggctgacatgagcccagagcgcacgcccagcacacggcgcgggagccgcgagctcgtgccctacacatgagaagacacaaacaacgacacacacgattttgcagcgctcgggacgcctcgcttgcgggctggggcactagtgtgttctattgtctagatttcatcttgtcnttcttatccttgatagtggtcctatggagcaaggctatcatagcacgagcagagcagctcataagttgttcacggtgtgtggtggggggggaggtgtgtctanncctttgttcgctttcgctccagtggggacggagcagcaggacgcgaacgcgacaaagggcgccgcgccgngcgaataaggnncggggcncnatagangccccccataccaaaaaaaaaganccaccacacacacacaacccacacaaaa

SEQ ID NO: 3575 - DNA, 465 bp, Glycine max
  Probeset Number=SeqID_13354
caccaccagcgccctcccccccactaccttccacggcggtgcgccccaacccactccaaccgccggcaggaccccacccacctaccatggccggtgcgaccccaaccccctcccatggccgcgcgcacccatctacctcccatggccagcgccccctcctaccgccggctgccaccgacgacggatccacgaccctcaccaccggatccgccatcgtctggatccacatgaccgcgtcccaaccttcgacggggccctgtcgatgctcttaccgaccatggacctgtgcctccacctcccccggtgcggccacaaccaccggatccagccgccaccggcccccaatgcgacctcacccgcccgatccggccgccaccgcccccctacgaccactaccggagctactatgcgcgacatttggttgcccgcaatcgcggatccctgccgtcgcaccggcggatgact

SEQ ID NO: 3576 - DNA, 1587 bp, Glycine max
  misc_feature (1)..(3): n is a, c, g, or t
  misc_feature (15)..(18): n is a, c, g, or t
  misc_feature (22)..(23): n is a, c, g, or t
  misc_feature (25)..(25): n is a, c, g, or t
  misc_feature (27)..(28): n is a, c, g, or t
  misc_feature (36)..(36): n is a, c, g, or t
  misc_feature (41)..(41): n is a, c, g, or t
  misc_feature (68)..(68): n is a, c, g, or t
  misc_feature (88)..(88): n is a, c, g, or t
  misc_feature (104)..(104): n is a, c, g, or t
  misc_feature (106)..(106): n is a, c, g, or t
  misc_feature (183)..(183): n is a, c, g, or t
  misc_feature (362)..(362): n is a, c, g, or t
  misc_feature (400)..(400): n is a, c, g, or t
  misc_feature (446)..(446): n is a, c, g, or t
  misc_feature (460)..(460): n is a, c, g, or t
  misc_feature (534)..(534): n is a, c, g, or t
  misc_feature (1071)..(1071): n is a, c, g, or t
  misc_feature (1482)..(1482): n is a, c, g, or t
  misc_feature (1527)..(1527): n is a, c, g, or t
  misc_feature (1559)..(1559): n is a, c, g, or t
  Peptide Sequence Number=SeqID_8172
  Probeset Number=SeqID_13355
nnntttttggttccnnnncccnnancnngccgcctnttatnttctacttgtatagctatactagtgtnattgtcagatcagcaacatnggaattaagtaagaanangcacaatatatttataccccaacactaattctctcgcaacgtcaaccactattctatgtgcactcggctcacggccnactatttcactctaactcatctcgccacttcgcatatcacactatcgctactaatatgaaagcagagagagagacgcgacgcccactcacctctccaacctctgtcgtcgcacaccagattaacaagatatatggatgcactcggtggcatcctgacgaaccgtccagcgacattatantgaacacgaatgacttccatctactgtgagctccctanaggctattaactgtcctaacgaacaagagatatatccgtatgcttntctccgcacaactntcattctcgcgcctccatgcggtacctctcctcacttcttttatttgaataaatatgaaaaatactcgattaantaactacacataaatacaagcctcaacatcaacacaactacactccactacctcgcactctgatttcccatctacccctactcgatacaactgctaatgtcgtcgattcgagtacgcagtctcgattagcttctttgactcctggtcttccgttaaacgaattcgaccgcctgtcatacctaaccgatcaccgcaacaccatctcgtatcacagacatgtagccacactatcagctcttttcccattgtctcaccaccgcacagcagcgagagctgtggactcctagcccccctcttctagttagccggatccgtgtagttcattcaccccgcacctccacctgctccacacatgtctacacccagtagtgggccgacgctggtgctcgcatacggataacatttattattgaccaccgctacctattacttccacccaccgtcagctcataccggcacaaggctcccgcacctacacaactcgttccagctcccttccacccccgttctccagcgtcgtacattacaccgcctttncgtgtctacacgttctctatgtagcggttatcgcaaccgataaacatctcttcatcaccccgacctacacgcaccacccacactcgtccacacccatatctctctctatcgcccccctcacacactcgctctcttacgacacctcgccacgagcagtcgaccgaatcgcgatttctatcgtgcctctctgtaatgagagctcgccttcaccttcttctgacactccttgcagtcgcgaggtatcagcgatatctactatctctactctcttcgccgccacccgatacgtctactcaatgtattgtgcgctcatcttcgctacctagcaatgtggagctattctgaacgagtaccatatgacgccaactccaacacggacgcattaccctcgccgtgctcttagctcgtctnactatacagatctctaagcacactctcgggtgcatcttcgtccgntacactacactcacacgctactgcacggtcgntatcagatgagatacagtcgcaacagag

SEQ ID NO: 3577 - DNA, 1527 bp, Glycine max
  misc_feature (1)..(1): n is a, c, g, or t
  misc_feature (111)..(111): n is a, c, g, or t
  misc_feature (175)..(175): n is a, c, g, or t
  misc_feature (191)..(191): n is a, c, g, or t
  misc_feature (241)..(241): n is a, c, g, or t
  misc_feature (319)..(319): n is a, c, g, or t
  misc_feature (352)..(352): n is a, c, g, or t
  misc_feature (357)..(357): n is a, c, g, or t
  misc_feature (389)..(389): n is a, c, g, or t
  misc_feature (431)..(431): n is a, c, g, or t
  misc_feature (961)..(961): n is a, c, g, or t
  misc_feature (965)..(965): n is a, c, g, or t
  misc_feature (1036)..(1036): n is a, c, g, or t
  misc_feature (1174)..(1174): n is a, c, g, or t
  misc_feature (1246)..(1246): n is a, c, g, or t
  misc_feature (1300)..(1302): n is a, c, g, or t
  misc_feature (1307)..(1307): n is a, c, g, or t
  misc_feature (1309)..(1311): n is a, c, g, or t
  misc_feature (1316)..(1316): n is a, c, g, or t
  misc_feature (1320)..(1321): n is a, c, g, or t
  misc_feature (1350)..(1350): n is a, c, g, or t
  misc_feature (1353)..(1353): n is a, c, g, or t
  misc_feature (1362)..(1362): n is a, c, g, or t
  misc_feature (1372)..(1372): n is a, c, g, or t
  misc_feature (1398)..(1398): n is a, c, g, or t
  misc_feature (1400)..(1400): n is a, c, g, or t
  misc_feature (1411)..(1412): n is a, c, g, or t
  misc_feature (1417)..(1421): n is a, c, g, or t
  misc_feature (1439)..(1439): n is a, c, g, or t
  misc_feature (1454)..(1454): n is a, c, g, or t
  misc_feature (1466)..(1468): n is a, c, g, or t
  misc_feature (1475)..(1476): n is a, c, g, or t
  misc_feature (1480)..(1480): n is a, c, g, or t
  misc_feature (1491)..(1491): n is a, c, g, or t
  misc_feature (1494)..(1496): n is a, c, g, or t
  misc_feature (1509)..(1509): n is a, c, g, or t
  Peptide Sequence Number=SeqID_8173
  Probeset Number=SeqID_13356
ngctcttatatctatctataacacgaggtgggtgaagtagtcattgctggcgctacagtcgccgggtcgaccgatccgcacgcgctgttaagtatagtgtgtggtggctancgtgatcacatgagagatcatcgaggttgttgagctgatacatatatcactatagcggtgtagngcgggagtcgagtctngtacaggcgtgacggtaacgtgtatgcggcggtcactcgcatacgtgtgnggtgagagtgataagcgctatgcgatagtcaacgagagagtgtggagcgggaatatagcatatagagagacgagagtngagacgagagagatatggctgtaagcgtcatantacgncgcatagaagtcggagagagtgatcagtggcngagactcgatgctcgcacatatccgatcttgcgtgacgctanggggggcgaccgtgggttaagacggtacagtcgcggatcggcgcgcgggacagatctatcttgtttggacgtcggcgcgcagctaggcgtagctcgtgtcagtcgaggcctacagccgtcggtactcgtgtcacagcggcgcagcaagagggcagcgaggtgatcaaacgcaagtataccttattagttaatgcttaaatacgcgatagtatttgtagagatgtgtccgtacgcctgctcattctcatgcatagcatcacacttaattccgacacacacagactactataaacactctctgtcgaccctacacatactctctatagcgtgcaggccataccgcatatgtacgcgcgcacacgctcatccacacccgtaatgcgagagtaggatatatgtaagatatcatagacaatctatgcggaggcggtacgtgggttgtgttggtgagggcggtgtgtaggtgagacaatgatgtgttgattatgagtgttgagtggtagcttgtcggttatgatgttgtagtgatnttangtgtatttatatgcacctgcaacgctctcgattcacacttccatcgtgcctcaccgcgccgctctgcctanctactcaccgcccgagttcatcggatctacgatcgccggcgcgccgggctggcgttctgtctcgttttgtgtgcgttttctcgtgcggacgagtcttgtttctttctagttccttactattcctttcctgcgtgacanataatagatgattattatgtaacatatatgttatacctatttattaactgtgtgcggcctaatatagcaatngtggctggtattagtgagacagtgagatcagaaggacgagggaaaaaaggaagnnnagggngnnnaatcnaccnnagcgcgcgcgccgcccgccgccccccgcnggngccgccaanacccccccancgcacgcagcgccccgcggcgcgccncngcgggcgcccnngggannnnntagggagagggagagacngagaggagagagaanaagaaaacacannnaaagagnnaagnagagagaaganggnnngagagggacaccnccccccccccccccccca

SEQ ID NO: 3578 - DNA, 1360 bp, Glycine max
  misc_feature (1)..(1): n is a, c, g, or t
  misc_feature (248)..(248): n is a, c, g, or t
  Probeset Number=SeqID_13357
ngagggatatttgtataatatgtatgtgtgactagttaagagtgataggaaaggacggagtgagtaatatatgacgttgatgccgagcaataagtctatgttgtccataataattgttgtacgtagcggtgagatatgcgactgacagcagcagtcgtgagcgtgtcgatgcgcgtgcagctcagtagcagcgggtcatagacattgttatcgtgtgggagaattatcatgagcgaggcggacatatncagtgtagtgtaggtgaggaagataagaattgatagagcaagagtgagagtcgagtaagagaaagataagaaatgcaagagacgtgttcgttgagtatgatacaatcagagacagatagaattaggtctacatgcagtgcgcgtggtacgtaggatgtcatttctggaggcgccgaaggtagagatgagataggcgagcagacgtcgcaggtgcgtatataacagagagtaccgacgcccctgcctaggtagagtatcatcgagacggcaggaggaaggattataatcagtatagacaatgatcagcgtaacgctgcacgcgctctagagatacataatagctctcgaggacgctaatactgtgtgatggggagagtcatatagagatggagtagagttatgtgtgtggtgggcgagaataatgatacggcaagaggtcgactagggaagcgccaatcataataagtcgtcactcagtggtgtcgaggcaaaaagaagtaccgacggaaaaagagaataatgagcgtcaggagcgtaagcttcgctgcacgcagaactccggcccactgcacagagataccataagtaggtgttcactgttctagtttatgcagtgcgcggagtgagtgttaagtcgagatagataggaggatgtgaaggtaatcgatggagtgcagagatgggtggacggctttgaatctatgctcctacagctaggatacgccaggggtgacctcgcccagacccgccgggagcaagacgagaggcagctacgctgaccggtgcgtgggagtaggtaccaactaaactggttaggtgcagcggattgggagtttggttggtccatctacactacaactaaagtccaatgtgattacatgaggacatggtccactactcacttagagtgtctgacgtcttttgctggattatagataggtagaatgaggctgtacgcttcgctcacctaacaaaaaaagaaaaaaagcatgcttcttctgactcttcctgtgcgtcgcgaggggggggggcgtctctactctctgtgtggaggtagtgctgagtagagtgataatagagagtagtcgggaccacacaacagacacactgga

SEQ ID NO: 3579 - DNA, 645 bp, Glycine max
  misc_feature (274)..(274): n is a, c, g, or t
  misc_feature (601)..(645): n is a, c, g, or t
  Peptide Sequence Number=SeqID_8174
  Probeset Number=SeqID_13358
gttgtgaaacagttaaaagtggtcttgatgtctgaggcattggaagaggttgttccttcaatgaaaggagggtgtgaagaagaagggttgaacctggaggctactgagctgaggcttgggttgccagggtgtgagtcaccagagagggagggtgtgtttaagagtgtggtggtgtctggggccaagaggggtttctctgatgccattgatggaaactggaatggtgtaggatctgaaaagatgccgctgccttgttttctcaactccaagggtngctgtagtggtagtgtagtgctgccaagtctctcactctcactgcaacagactggacccaacaaccaactgctttgggtgctcctgttcccaggaaactgttccccctctccaaacccttacatgagattagcccccaattcctgctccgctgcaaaggcccaagttggggaatggccaccaatccgttaattaagaaaaaactccagggtttcccacccccaaaaaatgagcttgctgttaatgaaaaacccaaacccgggagcctttattgtaaagccccgctgggaagggccccccttttttgggggaaagggggctctcaaannnnnnnnnnnnnnnnnnnnnnnnnnnnnnnnnnnnnnnnnnnnn

SEQ ID NO: 3580 - DNA, 531 bp, Glycine max
  Peptide Sequence Number=SeqID_8175
  Probeset Number=SeqID_13359
cttgttccgtccacgacgttaaacttcttcgcgatagaaaggttataacggtagaaaaagagaggactgacaaaggcaaaaagaaaaaaataatgagcaacaaggatttaatgaatttgtttctcagtatcacagaggaatttcctagaggttagagattcaagtaggattcccaggtttcagtcatagtaattagagaaattagaacctcgtaccccaacctcaagatagatcagttccataggcaaccttgttaggaaaatcactcgcatataggtgtcagagggatcccagtaaaatcatagtggcattttgttcagatcgctttctaacataggatttaggtgcaaataggattagtggcatatgaggattttagaaacagtgtttatattccctagcggctggagactaatatgcggtgcttgctgctgcagcggagcttgccctcactgccattcagacatattattcaatccgcaactagtgttttattttaggttagtatagtttttaaatttatcattttta

SEQ ID NO: 3581 - DNA, 559 bp, Glycine max
  Probeset Number=SeqID_13360
aaactcaccataatccccacgcccgaggcttcctcccgcgacgaaaccctactgaccggagcgctcggcggcggcagccatgtagaacgacgattactatgaaggtgacatgggcgatgaggatgagcctccagaatgtgatattgctgaagttgctgaacaagatcctgataacaatgatgatgctcctgatgatgtgctaagtagtgaggatgaccaaaccgaacaggactacactgcccgtgcacgccctacatcgaaaatgtgacctgagatgagcggactcgcatccatggcacacgtagatttgcgataagcatgtatgttccagttatcggtgaccttgagggcgaaactgctcctctggcattggcattgacggaactgagggcccccagatccccttcctggtaaggggggccttacctgaaggaaatttccaccgatggggaaagggaccaaactccttttgtagggccctcgggcacccccccggggggcccgccgccctaaaacccagttatacttggtttcaaagggaaccctctttgggtcccaa

SEQ ID NO: 3582 - DNA, 466 bp, Glycine max
  Peptide Sequence Number=SeqID_8176
  Probeset Number=SeqID_13361
ggagtccgttctgccacggctgagaaaatagcgacacggaatcactctctaactcacaaatccactatccatcgcgaaccatacacacactaacccgggcgaatcgaaaacggcggatccgatcccggcaccaccaagatccgccactgaactcttctcggatccgctggacacccacccgctgtggttcaaaccggcatcgtttctctcccccgacttcgactccgaatcctacatttcggagctcctaaccttattccccttctacacgctccgctcctagcttaacagctacctttccttcctcaaccacgatctcatttaccttatcaaccgagactactccgatttcgtcaacctcatcaccaagctcgtcgacatcgacgctgtcgttgtgagaatgcagtccccgctcgtctgagctccgctacatgatcgaacagttcataggatccgtcaaggtctc

SEQ ID NO: 3583 - DNA, 1791 bp, Glycine max
  misc_feature (1)..(1): n is a, c, g, or t
  misc_feature (11)..(11): n is a, c, g, or t
  misc_feature (83)..(83): n is a, c, g, or t
  misc_feature (87)..(87): n is a, c, g, or t
  misc_feature (186)..(186): n is a, c, g, or t
  misc_feature (201)..(201): n is a, c, g, or t
  misc_feature (203)..(203): n is a, c, g, or t
  misc_feature (211)..(211): n is a, c, g, or t
  misc_feature (262)..(262): n is a, c, g, or t
  misc_feature (282)..(282): n is a, c, g, or t
  misc_feature (340)..(340): n is a, c, g, or t
  misc_feature (375)..(376): n is a, c, g, or t
  misc_feature (380)..(380): n is a, c, g, or t
  misc_feature (418)..(418): n is a, c, g, or t
  misc_feature (442)..(442): n is a, c, g, or t
  misc_feature (539)..(539): n is a, c, g, or t
  misc_feature (541)..(541): n is a, c, g, or t
  misc_feature (587)..(587): n is a, c, g, or t
  misc_feature (642)..(642): n is a, c, g, or t
  misc_feature (644)..(644): n is a, c, g, or t
  misc_feature (745)..(745): n is a, c, g, or t
  misc_feature (751)..(751): n is a, c, g, or t
  misc_feature (754)..(754): n is a, c, g, or t
  misc_feature (780)..(780): n is a, c, g, or t
  misc_feature (849)..(849): n is a, c, g, or t
  misc_feature (890)..(890): n is a, c, g, or t
  misc_feature (910)..(910): n is a, c, g, or t
  misc_feature (941)..(941): n is a, c, g, or t
  misc_feature (967)..(967): n is a, c, g, or t
  misc_feature (969)..(969): n is a, c, g, or t
  misc_feature (1050)..(1050): n is a, c, g, or t
  misc_feature (1120)..(1121): n is a, c, g, or t
  misc_feature (1133)..(1133): n is a, c, g, or t
  misc_feature (1144)..(1144): n is a, c, g, or t
  misc_feature (1149)..(1149): n is a, c, g, or t
  misc_feature (1186)..(1186): n is a, c, g, or t
  misc_feature (1188)..(1188): n is a, c, g, or t
  misc_feature (1198)..(1198): n is a, c, g, or t
  misc_feature (1289)..(1289): n is a, c, g, or t
  misc_feature (1311)..(1312): n is a, c, g, or t
  misc_feature (1338)..(1338): n is a, c, g, or t
  misc_feature (1340)..(1341): n is a, c, g, or t
  misc_feature (1343)..(1343): n is a, c, g, or t
  misc_feature (1346)..(1346): n is a, c, g, or t
  misc_feature (1349)..(1349): n is a, c, g, or t
  misc_feature (1375)..(1375): n is a, c, g, or t
  misc_feature (1377)..(1377): n is a, c, g, or t
  misc_feature (1382)..(1382): n is a, c, g, or t
  misc_feature (1390)..(1390): n is a, c, g, or t
  misc_feature (1397)..(1397): n is a, c, g, or t
  misc_feature (1419)..(1419): n is a, c, g, or t
  misc_feature (1429)..(1429): n is a, c, g, or t
  misc_feature (1439)..(1439): n is a, c, g, or t
  misc_feature (1459)..(1459): n is a, c, g, or t
  misc_feature (1462)..(1462): n is a, c, g, or t
  misc_feature (1522)..(1522): n is a, c, g, or t
  misc_feature (1524)..(1524): n is a, c, g, or t
  misc_feature (1557)..(1557): n is a, c, g, or t
  misc_feature (1559)..(1559): n is a, c, g, or t
  misc_feature (1575)..(1575): n is a, c, g, or t
  misc_feature (1577)..(1577): n is a, c, g, or t
  misc_feature (1579)..(1579): n is a, c, g, or t
  misc_feature (1581)..(1581): n is a, c, g, or t
  misc_feature (1583)..(1583): n is a, c, g, or t
  misc_feature (1585)..(1586): n is a, c, g, or t
  misc_feature (1603)..(1603): n is a, c, g, or t
  misc_feature (1606)..(1606): n is a, c, g, or t
  misc_feature (1636)..(1636): n is a, c, g, or t
  misc_feature (1641)..(1641): n is a, c, g, or t
  misc_feature (1643)..(1647): n is a, c, g, or t
  misc_feature (1649)..(1654): n is a, c, g, or t
  misc_feature (1658)..(1658): n is a, c, g, or t
  misc_feature (1660)..(1660): n is a, c, g, or t
  misc_feature (1662)..(1662): n is a, c, g, or t
  misc_feature (1664)..(1664): n is a, c, g, or t
  misc_feature (1668)..(1668): n is a, c, g, or t
  misc_feature (1670)..(1670): n is a, c, g, or t
  misc_feature (1672)..(1672): n is a, c, g, or t
  misc_feature (1674)..(1674): n is a, c, g, or t
  misc_feature (1676)..(1676): n is a, c, g, or t
  misc_feature (1678)..(1679): n is a, c, g, or t
  misc_feature (1681)..(1681): n is a, c, g, or t
  misc_feature (1685)..(1685): n is a, c, g, or t
  misc_feature (1687)..(1688): n is a, c, g, or t
  misc_feature (1692)..(1692): n is a, c, g, or t
  misc_feature (1694)..(1694): n is a, c, g, or t
  misc_feature (1696)..(1697): n is a, c, g, or t
  misc_feature (1699)..(1699): n is a, c, g, or t
  misc_feature (1701)..(1702): n is a, c, g, or t
  misc_feature (1704)..(1705): n is a, c, g, or t
  misc_feature (1710)..(1710): n is a, c, g, or t
  misc_feature (1714)..(1714): n is a, c, g, or t
  misc_feature (1716)..(1716): n is a, c, g, or t
  misc_feature (1719)..(1720): n is a, c, g, or t
  misc_feature (1722)..(1726): n is a, c, g, or t
  misc_feature (1728)..(1728): n is a, c, g, or t
  misc_feature (1730)..(1730): n is a, c, g, or t
  misc_feature (1732)..(1732): n is a, c, g, or t
  misc_feature (1741)..(1742): n is a, c, g, or t
  misc_feature (1748)..(1758): n is a, c, g, or t
  misc_feature (1760)..(1764): n is a, c, g, or t
  misc_feature (1772)..(1782): n is a, c, g, or t
  Peptide Sequence Number=SeqID_8177
  Probeset Number=SeqID_13362
ngagtgcagtngtgtggtgggtgcaggagcactcgcgcgcgcgcgtcgcgcgcgtgcgcgtgcctagccggcggtgctgcgcngctnggcgtgtgccgacgtggttgtcctctgcttgtgtggcgtgtgtgcggccatcgcacgtgagcgtgttaacactgcgcgcgccttcggttgcacgtcgcngggcgcgcgaggcanantattgatntacgatccacgcacgggcgttactcatactcgtcgctcgtcgctccctgancgcgtcgcagcgtgatcacntctcatcgtctcaacctgtattcgtatcttctcctctcgctctcctgtggtactctgngcacactcctcgatgacgcgcgcttcgatgtcggnngggncggcgttgttcgtcgtgacgtgtcactgcagtcagtgncgaggcgacgagaggagccacaangggcgcgacgatagagccacgacaacgagaatacgacgcgcacatcacacatcatatacacgatggcgaatgagcgagtcacgtagagatgaagacngntcgatattgtaaacacagtgactgatacgtctcatatcagttgtantcgtcggttctcacgtctaccacaactgctcgcgcggtgcgcgagccataggganantgtacagagacgtctagcgatagactagcagaaatacgttaatcataatcgtgtggcgtgttgtcgtactccatcgtgcgttgttagctgtcgctactgcnctctgnctnctgagtacttcaccgatcgttcgctntctgatcgatcacacacctggcgcgcatcgcgcgtctagcgtctctgttcatcttcttcctctctctantgtcctatctccatcatatactactcactcacgactgctcnttcgtgcatcacttattgcnacaccaccacactagtacgcgcatcgttcgncgtcgtctgtgcgatagcttacagcnanatcgctgttcgttggtcgtcggtgtgtgctgcgctatacgcgacgcgctctgtgagcgggagggagccggtgctcgtgatngtaagtcccagcgctcgctcggagccggctctcagtcgttacctcttcatcttaccatccactcgtctcnncacacactgctnatcgacgacanctctncaccacctacccacacatatcctgtctctcgcatcgncngtgcgctctnggcagcgcagtcatcagtaccgacagacagctacctgactagacatacgcgcacgcgagacgactcacatgcacgacatcacgacagccantgatcgatggagaagtagaagnnagacatatgagagggtatatctctcncnnanatnttntcgtgtgttgtggtgggtgtggtggngncgtgnaccacctngtgtttntctctgtgcgctgtgtatgtgnggcgtgcgtngtgatagtgnagactgacagcgtctgtacncgntcagcactagttcgcgccggctctagctgcgcagctgcctcgcgtccagcgctaagggcngncagcgcgagcgcgcaccgacgtccgcagcagtnanggcgaaggagcacganancngnangnngttgtgatagtgaaagnacngagagctcacgacactagctatgtccactnaccgncnnnnncnnnnnngggngngngngagngngngngngnngnggcngnngagngngnngngnngnnggggngtgngnggnngnnnnngngngncccccaccnncccccnnnnnnnnnnnannnnncccccccnnnnnnnnnnnccccaaccc

SEQ ID NO: 3584 - DNA, 1424 bp, Glycine max
  misc_feature (31)..(31): n is a, c, g, or t
  misc_feature (40)..(40): n is a, c, g, or t
  misc_feature (52)..(52): n is a, c, g, or t
  misc_feature (70)..(70): n is a, c, g, or t
  misc_feature (191)..(191): n is a, c, g, or t
  misc_feature (383)..(383): n is a, c, g, or t
  misc_feature (585)..(585): n is a, c, g, or t
  misc_feature (590)..(590): n is a, c, g, or t
  misc_feature (641)..(641): n is a, c, g, or t
  misc_feature (652)..(652): n is a, c, g, or t
  misc_feature (657)..(657): n is a, c, g, or t
  misc_feature (669)..(669): n is a, c, g, or t
  misc_feature (873)..(873): n is a, c, g, or t
  misc_feature (912)..(912): n is a, c, g, or t
  misc_feature (915)..(917): n is a, c, g, or t
  misc_feature (920)..(920): n is a, c, g, or t
  misc_feature (970)..(970): n is a, c, g, or t
  misc_feature (981)..(981): n is a, c, g, or t
  misc_feature (1043)..(1044): n is a, c, g, or t
  misc_feature (1059)..(1059): n is a, c, g, or t
  misc_feature (1071)..(1071): n is a, c, g, or t
  misc_feature (1145)..(1145): n is a, c, g, or t
  misc_feature (1193)..(1193): n is a, c, g, or t
  misc_feature (1240)..(1240): n is a, c, g, or t
  misc_feature (1246)..(1247): n is a, c, g, or t
  misc_feature (1264)..(1264): n is a, c, g, or t
  misc_feature (1317)..(1318): n is a, c, g, or t
  misc_feature (1359)..(1359): n is a, c, g, or t
  misc_feature (1369)..(1369): n is a, c, g, or t
  misc_feature (1371)..(1371): n is a, c, g, or t
  misc_feature (1419)..(1419): n is a, c, g, or t
  misc_feature (1423)..(1424): n is a, c, g, or t
  Probeset Number=SeqID_13363
tgttgtgtggtttgttggtgttgtttgtggntttgtgctnttagagctactnaaccccacccatagagangaagaacaaaacagcaaggagggaaacgacggccccaccactccggagacatacgatcaagataaccaccctccaccccgccagaagattttcatcgtcttgtgggaggaggatcgttctncatcctattcctatgccgttgatatctgggtgggcatggagcccgcgcatgtgtttttatcactagggttcattcccagacttagatagaactggattaaagttcaatagtgagagcactcacgctctcttacttaatatgctgatatacgttctattactacttctatattacactaaagagaattctagnatggataagagtaggctcctactcaagtcgaagaatatacaatgcgataatgcatctatatcgctatgtgcgctttccataagagctcctcgctacctatcatgcagcacgtttataattgactgtgtatcacgtctactcatctctatcacactgatagaccatgctacaactataaaaaaacacagcaaataaagcagangtganatagaatgaaatcattattaagaggagatgtagtagtaatggtgggtatanataaatagtanttganatcatattattnaacaatacgtacccacgaggtcctacacccgacggagagtgggtggtttaagagagatatcaatcagtacgtgaacgctcacatatgtctcactacctctgtggtgtgtggtgatatggttagattatgtgatagtatgattcatacacactctctatctccatctcccgtggcgtagatatcagttacctcacgtgcaagccnacgcagtccctaccacttggaccaccgtcgcacctcgcngcnnncgngagcacaacataccactcctaccacactccggcacttcactggatgggtntctatctcaanattctctactgtcaacacatatcagcacactgactaggcgacacgttgtatataattcaacnncacatacacacaaanacgagatatggnctctttatccagcgcgcctccggcgtggttgcatcactctgtgcagatcgaaatcactctgtgtacgcttactnctattctgtcttctgagtatgtacgctgactaacactcacggcaaatnagtatagtatactgcgtgatgcgcgtagctgtgacgcggcacgatcntctttnnacgatcttcggtctacntgtagacgcaatcatctctacaagtggcactcacacagacaccatatcactcnnagcgcacgtctgagacgactgagtgatacaaccgacaatcntacatgtgtnantcgattgtgatttaatcatgacacgtagtgcggatcgcacgcatgcgngcgnn

SEQ ID NO: 3585 - DNA, 455 bp, Glycine max
  Peptide Sequence Number=SeqID_8178
  Probeset Number=SeqID_13364
ctgaaactcttatcttttctccagacagagcaaaacagtctcacgatggctactaccacgtcatctccgccgtgtcatatctccgtctcattcctccgtcagcttcctccttgcaccactgttcagttcttcggtttctcaccgacccagcgtaaactgggcgggttaacggtagcccggaacaatctggcgcaggattttctcggggacttcggagctcgtgacccgtacccggcggagatagcgagccagttcggagataaggtgttgggaccccaaagcacagagcacaagattctgattcctaatgcctctgttctctccctctcgcagctcgaatgctcccctgtttcgccttctcaggctcctttatcccccgatgaggccaaaacgctcctccataaggttttgggatggagtatagtggaggatgaagcgggcggtctgaaaataag

SEQ ID NO: 3586 - DNA, 412 bp, Glycine max
  Peptide Sequence Number=SeqID_8179
  Probeset Number=SeqID_13365
tgaaaggtcccgtgatgcagcgatgcacccgaaaccccgtatttaaaggattttgaaaaactggcacgggtcctgctatatctctgagacaacaaaaataaaaacacgcagcaacccaataaaaacaatacgtaccggctctgacataacaagaacaacacgaacagaggcgtagctaacagatttttttggagtggatagcttttctgaatcgcttgcctgcaagccgttcgcaaccagacagagaacaataaaactgcctcaaggcggctgccggactggttgggatcaacacgatgaaagtgtcatcagcgctcaaaaaaatacgtttgcttttggtcctgcttagggatcgctcaaaaaagatgtgaagggcaaggctgccaaaaataacaacaggcctccacaaaaa

SEQ ID NO: 3587 - DNA, 227 bp, Glycine max
  misc_feature (145)..(149): n is a, c, g, or t
  Peptide Sequence Number=SeqID_8180
  Probeset Number=SeqID_13366
ctgcagaaaactctgtggtgagccaaaactgagatggcggattgcaaatacattaggcgactgaagctcaccagcagaggccactcgaggggttctcggggtgcccttctgtgactgagttgttaacaattctgggtctcagtgnnnnntctctgctttcaaatgaggtgtggagtgctccttctattaatggtcttgaagatttgatcactaccacagcttcttct

SEQ ID NO: 3588 - DNA, 1016 bp, Glycine max
  Probeset Number=SeqID_13367
aatgcatgctctagtgacttcccgtgcacacggcggagctccatttgggacttgaggcagagtgagggagcgccggcggcgaggcgacattgagttcctaatgcagcccatacgtggatccactttcctggaggaggcaggagagagtatggtgccgcccgctttggcttcagcgacggagggggctgacatggtggtggagcacctggtggtggagcacctggtgctggagcaagcagtggtagagttagaacatgcagtggccagcgcggacgcacaaatcttgtcagccaaggaggcggcggcggcgccgaggggagagagttctccgccaacatcggaactgtcgattgggaagatgaatccttgggcacctggatggaacaaaaggcttaggattggggctgctgcaccaagcagaacaccttgcccaaaaccgtgtcagtgcatttgacagtctagctggtgaaatgaaggacctgcattacggaggccagcagcagtgccagcagctggagtggtgaggtgaaatgctggtgatagggtcgatgctatgctggggcatatcagagtaaggacaggtgccactgcgtgtgacaggtaatgcagatcaaatggaggggttcctacaagaaatcacatcgatgcatgtatctgctgaaggtgggggaacaactatagaagattcagagcatgaagggataggtgggcagggtggcgctgtagtcaatgccgcagctatcaagaaggaggatgatggtgtgggtacggatgaagttaagacagaacgctcaagtgtggtggacattgacaaagagcgtgtgacgcagctgcagacagagctatatgaagaatatgtgacggaggaagcatctcgtcaagcgaaacggtagatatcagtcattgcaccatcaatgattgtggacatcatggacagtgatagcaacgatgatggcgcatttgaagagtggtgagatcctgaacacgaccagctagtggagattgacaggaggatc

SEQ ID NO: 3589 - DNA, 1527 bp, Glycine max
  misc_feature (1)..(1): n is a, c, g, or t
  misc_feature (221)..(221): n is a, c, g, or t
  misc_feature (233)..(233): n is a, c, g, or t
  misc_feature (237)..(237): n is a, c, g, or t
  misc_feature (278)..(278): n is a, c, g, or t
  misc_feature (334)..(334): n is a, c, g, or t
  misc_feature (739)..(739): n is a, c, g, or t
  misc_feature (979)..(979): n is a, c, g, or t
  misc_feature (1445)..(1445): n is a, c, g, or t
  misc_feature (1451)..(1451): n is a, c, g, or t
  misc_feature (1453)..(1453): n is a, c, g, or t
  misc_feature (1463)..(1463): n is a, c, g, or t
  misc_feature (1481)..(1481): n is a, c, g, or t
  misc_feature (1490)..(1490): n is a, c, g, or t
  misc_feature (1494)..(1494): n is a, c, g, or t
  misc_feature (1509)..(1509): n is a, c, g, or t
  misc_feature (1513)..(1513): n is a, c, g, or t
  Peptide Sequence Number=SeqID_8181
  Probeset Number=SeqID_13368
nttgagacacttagcgcgagtgtctctaaatcacagatgcgttccaagtagcgataatatctcatctgacgctctctgtgtgcctgagcagtcgcgtacttcgagtaatgaatgtgtatagaacagatattcgtcagaagtcaacataagtgagagcgtataggagagcgcacatgagagcatcgcgagtgtctagagtcttatatcatcttctccccacncacaagaatgcncgcnaccgcgcatatacgctacgaaatggcgttgagatacgattntaggtgagatcacagatcagtgcgtgtgagcacaagcaaaggcttatatgtgagtngagcgttatgagtataccagtccaagtgcctacgtatccacgataaatactcgtcgtgcatgtatgtggacgcactctaacgatcggacatattatatgtagctcatagattatgagtctagataataggagggcaatacaaataattcgactgcgctgccgcatagagacagcgtgacgaccgataggtcgagtgttagttgtatatatgtagagtactcagcacagatctataatgagcaagtgagtgtgcacgctgtggtataacgactgcgccacgtgatggtagataacgtaatcgtactcaattagcttgttatgagtatagtgaatatagtcacgagatcattggctgaccatgaagatgctatggagacatatgtagactctagtttaatggtaagncagatgcaggagcaggacgtatgatataaatgtattataactcaatgttgacgattagatttgaatattattaattactcttacatatgtctctacacctccctctcctggttatcaacaggacgctccgcagtcgtggatcatatctgacgacatatatattctctctactcagtcgctagtgtgcacacggccgtctagtatatgtaagctatgactctatgtataacaactttgcgntcgatatcgtgcgtatgttgttcttcgtcatgatatgctatatcgtctgtgtgcaatgcacgcagcataggctacgcgtcctcaagcatagcactagaactacccacctgctacatgtagtaagtctactatcatagcgagaagcacgaggagagtacatgtctacaatcccatcaagcgctaggcttgcacattccgacaccactctctcacgtatcatactgcattcactcgctcacggctcgctacacatttctggtcccacgtacttcgcacagagcacactgcgtcgaacataatcacactctcacacgcagctcacacgctgcatgtcgctaaccgttcacgctgctgtcaccaggactcgccctacagcccgaagaagatgagcagatcttgatctatccacaaccctcatcataccccatcgaggcaggggggaatcgagacgtaagatgcacgatgnaaggtngntggtacgggngagaagttttgctttatntatatgtcnttcngcgacttctattgtngtanagattacgcatctg

SEQ ID NO: 3590 - DNA, 1944 bp, Glycine max
  misc_feature (68)..(68): n is a, c, g, or t
  misc_feature (74)..(74): n is a, c, g, or t
  misc_feature (83)..(83): n is a, c, g, or t
  misc_feature (96)..(96): n is a, c, g, or t
  misc_feature (123)..(123): n is a, c, g, or t
  misc_feature (150)..(150): n is a, c, g, or t
  misc_feature (156)..(156): n is a, c, g, or t
  misc_feature (209)..(209): n is a, c, g, or t
  misc_feature (218)..(218): n is a, c, g, or t
  misc_feature (224)..(224): n is a, c, g, or t
  misc_feature (229)..(229): n is a, c, g, or t
  misc_feature (262)..(262): n is a, c, g, or t
  misc_feature (300)..(300): n is a, c, g, or t
  misc_feature (310)..(310): n is a, c, g, or t
  misc_feature (437)..(437): n is a, c, g, or t
  misc_feature (452)..(452): n is a, c, g, or t
  misc_feature (455)..(455): n is a, c, g, or t
  misc_feature (501)..(501): n is a, c, g, or t
  misc_feature (527)..(527): n is a, c, g, or t
  misc_feature (710)..(710): n is a, c, g, or t
  misc_feature (782)..(782): n is a, c, g, or t
  misc_feature (815)..(815): n is a, c, g, or t
  misc_feature (877)..(877): n is a, c, g, or t
  misc_feature (1041)..(1041): n is a, c, g, or t
  misc_feature (1309)..(1309): n is a, c, g, or t
  misc_feature (1883)..(1883): n is a, c, g, or t
  misc_feature (1895)..(1895): n is a, c, g, or t
  misc_feature (1918)..(1921): n is a, c, g, or t
  misc_feature (1925)..(1927): n is a, c, g, or t
  misc_feature (1932)..(1938): n is a, c, g, or t
  Probeset Number=SeqID_13369
cccgctgcatgctcatttctggttggagtattttcgtcagtaataaatcgaatagtcgacaatagttntggggntaacatctnagttacgaaacgntacatacaatatatgtcatcatcgtgngtcgcctataatatattcatatgatanctcagnagacaagcgcgtgtcggtggtcgtgtgtgtactaccatacaacgacgaaggancacgagtcnagtgtncgctngcgcgagtactatcacgagggttcgtcgactcntttatcctctcatgtctaatcttttacgtgtattattnatatcgttancactttattgagtacggagtaattctgtgatgttggtatagtatcaagttgtatgttatgatcaaagtcttactttatcctacatctacgcctctactacacgcatctccactcgttatccttcagntcatactatataggntanatatacgtgttgcgcttgtcgtctcgccgtcgagtccggtgatcgnctgctgtctaatgtacgcgtagttgntagagagtacgagtgagcagccgtcgaacggcaggacacagagtgtaggtcgctatgaatgtcgccttcacagagtactcatatcatgtatccatccgcatctctatattcgctatctatcgttgtctcgtcgtcgttcgcgtcgtacagtctctcgaccagacatcgctacacgatcccgantgtctctctatagattgagtcgagtctagataacactgtcgagcggcacgatataagcgtcgactattatancgtcatacatctattcgcgaatgtatttgtctngattatgtatagctatttctactattatcttctctgcgcgttgcgtctgtcatactgcctantcatgttcctcatctcactctacgcatgaacatctatactctgatatagtctatactgtgatcgttctcatcgtatcgttatcagtcatatgaacaacacgctgtgcagtcacatcagaaccgagatctcacaagaacgacacatataccccagcaagcgttancgtgtcgtagatgtgagtagaacggtgggacagataggagagcggcgacgaagagtggtatcgcgtccacgcagagacatatggctgcggctgctgcgcattatataaacacattattctcgtggatacatcgttcgcatcagcgcgtagctgtccatgagactcatggtcgtgtatctttcagctgcgttgtagatatacatgattatttatagttgcgtagtggtgatagtagtgtcagagtgcctacatatctatagcgcggcanccgtcaaacgcagcgcttatatgtgcgatgtaatacctaaacacgttctgcgtcacgcagctacacatacaaggacgccgcaacgcgggtcaccagccagttcatcttaatacgaatatatgttcgtgctgtatgtatatagttagatctatgtcaatataatctctccgcacactccaccatacagaccaacgatccgtatccaggccaatagatcatatgtaccaatagttcagagcgatcgagacacagccagacagcggtggcgctcatttacatttatcttgttcccgctgtactgctagtgttgcgggacgtcttcagctgcgtcgaatgttgctacgtccgcgttttaggaatttctcgtctaactcacataatccccatccacgccaccataatacctgctctatatatatgaattaaacacggagccgggacgacgaataggcacagcagcggcgcacgtggaagtggttatatatgtcgtgatttcacgtcgccttgactgtctctcatcggaagacgtcacctcggttcggctgacccctgtgtgtgctctcgttgtcgttcncgggtcgtcggngcgcgcgccgtccgcccgccggnnnngggnnnggggnnnnnnncccccc

SEQ ID NO: 3591 - DNA, 1485 bp, Glycine max
  misc_feature (35)..(35): n is a, c, g, or t
  misc_feature (73)..(73): n is a, c, g, or t
  misc_feature (207)..(207): n is a, c, g, or t
  misc_feature (309)..(309): n is a, c, g, or t
  misc_feature (332)..(332): n is a, c, g, or t
  misc_feature (1084)..(1084): n is a, c, g, or t
  misc_feature (1245)..(1245): n is a, c, g, or t
  misc_feature (1283)..(1284): n is a, c, g, or t
  misc_feature (1287)..(1287): n is a, c, g, or t
  misc_feature (1353)..(1353): n is a, c, g, or t
  misc_feature (1363)..(1364): n is a, c, g, or t
  misc_feature (1376)..(1378): n is a, c, g, or t
  misc_feature (1384)..(1385): n is a, c, g, or t
  misc_feature (1460)..(1460): n is a, c, g, or t
  misc_feature (1469)..(1469): n is a, c, g, or t
  Peptide Sequence Number=SeqID_8182
  Probeset Number=SeqID_13370
caatacacacacaatagatctcacactcatttagngctacacccaccagcacacacgcattagacacaccctnttaactcaccacgtctctcagatacatacacaagtcgcgtcgctcgcagtactcagatgtgttgtgatgctcgtcgcgaccgtcgcacgatattatatgttagtcacacgcgcgaccatgttggcgagtgcgantgatagttcgtcgaacacacggaggtaggtaccacctatatattccacacctcccttcctcatatctatattctatcctcctccacgcccgatcgcttgttntgctttctcccgcccacgcaccnattgctttgttagaagactatatcacactaacaaatcacaagcaccttattatattgtgagttctgtgtatctcgcaacacactagaacaggaataacagactatgttgtgttatatgagagattgtattagttgtatcccacacctctcgtatttttattacctcgcgcacccgcgattctatttcctcacaccgccttctttgttcacacctcatcccgaatgtatgatctagccccagcgcccggtttgttatcatatatatgtgccagtgttttggtattatgcttatcgccacgcgcagtatttacttatagtatttctctccgcgtgtattatctgtccacagcaaataagactctcctctcgtctactcacaccccacaccaccaacgattagcgacccgcccagatattatattataacataatcgcggcgccctttcttctctatttttctctctttgaattatttcgtccccgtgtctatttgtgttctctctcgtcccgtctttcttgcaaacccttgtatgattggtgagtaaagggtgtgaaccgcaccacagagaactgtatccacaaccaatctacaacaacacacattcaaatttcgtattgtatatttggcaccagtttattcatcattcaacaacctcacacacacaatccgcgctctcacccactatgtagtgttgttacacagtcgaaatattattggccccccacaccatgctgtcaacagagattttttngggttggcgcgcccgcgcccgcgggccgcgcggcttgcgttctcccaccacttgctctgcgtaccattacttagaacccacacaatattatagaacacccgtcttcttaccctaactcatatatgtccgaactaaaacatttccactcgacacctagtaangtaataaagagacacggtatgctccctgtgattcccanngtnaataccttatacccaccctgttgccgccgcagaggttgtgcgccccctttgtgccccaggccacgnttccggggtnnggatccgttggnnngtgccnngcgcccccaaccagtaagccacccgtcaagacaacacaacaaacatgatgccacaaaacattttgcgcccccccnctttgcccnaacaaaaaaaaaacac

SEQ ID NO: 3592 - DNA, 1469 bp, Glycine max
  Probeset Number=SeqID_13371
aattaatttattttttaacagatcacaatatcatctcatgcaaactgcccttgcccttaaaagagaccacttcctcttcagttctgaagccgtcaccaatggtcaccctgacaagctctgcgattacatctccgactccgtccttgatgctttgcttgagcaagaccccaatgccaaggttgcttgcgaaagtgcttgcaagtccaacttcgtcatggtcttcggtgaaatcacctccaacgccaagatcagctacgaacaaattgtcagagaagccatcaagaacgtcggttacgactcctttgataagggctgtgactataagaactgtaccgtaatggttgccatcgaacaacaatcttctgaaatcgcccaatccgtccacatcgacaagaaggaagaagatttcggtgctggtgatcaaggtctcatgattggttatgcctgtgacgaaactcccgaatgcatgcccttgtctcacagtttggctttgaagatctgcgaaaagctcaacgaattaagaamcaagaacgtcatctcctggttgagacccgatgccaagagtcaagtcaccgttgagtataaacaagaaggcaagaacatcatccccgtcagagttcacaccgttttggtctccactcaacatgctcctgaagtcaccaacgatgaaatcctcaagcaagtcaaggaacaagtcatccaagctgttatcccctctaacttgctcgatgaaaacactatctatcacatcaaccccagtggtaagttcactattggtggacccgctggtgattccggtttgactggtagaaagattatcgttgatacttatggtggttggggtggccacggaggtggtgctttctccggtaaagatgctactaaggtcgacagatctgctgcttatgctgctagatgggttgctaagtccctcgttgctaacaagttcgccaagagagctttggtccaaattgcctacggtatcggtatagctgaccctatttccatccacgttgactcttatggcaccgttgctgaaggtttcactgatggtgatttgagccaaattgttgccaagaacttcaatttgagacccggtggtatcataaaggaattaggtcttaagagacccattttcaagaagttgagtgcctttggtcacttcggtagaaacgatcccgatttcttgtgggaacaacctaaggatttgactcatgaaagaaaataaatacctagattttatacacatatccatttttttaaatatgtatatgctcctgttgtacagttgtagcaataattaaatttgtactatgctcctgtaaaccagttgtagcaattcttaatatatccaataactggctgagattatagtctcaacatacatattttcctgttcagagtatgcatccttagctttttattattttgatgattgtgatctgatagttataatgatatctatcttg

SEQ ID NO: 3593 - DNA, 515 bp, Glycine max
  misc_feature (26)..(27): n is a, c, g, or t
  misc_feature (37)..(40): n is a, c, g, or t
  misc_feature (42)..(42): n is a, c, g, or t
  misc_feature (98)..(101): n is a, c, g, or t
  misc_feature (132)..(134): n is a, c, g, or t
  misc_feature (268)..(270): n is a, c, g, or t
  misc_feature (474)..(475): n is a, c, g, or t
  misc_feature (514)..(514): n is a, c, g, or t
  Peptide Sequence Number=SeqID_8183
  Probeset Number=SeqID_13372
atgtgctatgtgtccgtttaattttnnggccagcaannnnangtttccaatcccggtccatagaccctatggggcaaacgatgttggatcattacctnnnncatcgtcatcaatgcccctatttcaaagtcnnncggtagtggtagaaaatccaatgtgtgttgattcaagtggcaaattggtgagcaatgttgttgttgacgttacagcggataagaaatggcatcatcacatatgaaaggtacagttcgcgtcattacgcatcacnnnagttgctgtcacaggaagatattgtttgtgtatatgaatatatatatgatattgcagccggcaatgggtcattggaaatcaatatttttccaatataagatttggaccaagatcctgtatgtattaatggatatgaggcgagcaatttgtagagagcccacagggcgtgatgtggcgccttgacacaaattttacttgttattnntgttgtgaaaagtaaatcctttttcgtgttcaactgtgnt

SEQ ID NO: 3594 - DNA, 458 bp, Glycine max
  Peptide Sequence Number=SeqID_8184
  Probeset Number=SeqID_13373
cccaggtcgccgccgaccaggccgccccgcaccccggcctcctggcggcctacggcgtccgccgtatccccaaggacggcatcgaccgcgcgtccgccgcgctccgcgtctcgcccgctggccgcgccagcttcaagcgcgcgtcctcctcctcctcttcggcggccaggtccaagcgcgacggtggccacgaggaggcgtcggccggcagcagccacgaccacggtgttgaagacgacggcaaggcgctggcagccgagcagaagaggggacagtcgtcgtcgtcggaggccgaggcgggctcgcacgtgagccaggcagagcagagcgcgagcgccactgtgccgcaggtggcagaggacgacggcgaaattgatctggagctgaccctcgggttcgggccggccacgcgcgtgctgaggtcgccgccggcgcgcttcgaggccagcagcttgagc

SEQ ID NO: 3595 - DNA, 509 bp, Glycine max
  misc_feature (502)..(502): n is a, c, g, or t
  Probeset Number=SeqID_13374
aagtctcagtaatggcgactaccttagtggcgacgacgcgtccatacgttcttctctcctccacaagagcgagccttcatctccttctccgatctccgaagagacccttcgcttcgtttctatcaactctctcatgtgctgccgccttgagaagctccagttcgagatgtttaagcgccgttttgtctcgcggagagactgctccgatgattttcggcaaaggagattctagggtttctgggtttggcgtcgtggacattcgcagccgtgggttcagtgctagatcctctcaaatcaacgatgctgggtctattgatcaaacccttatgcagtccatggagctaaagatcaaagaacagttgaatgcagagtcagtttctgtcaaggatatgtctggagatggacgtcatgtttgcataaatgtggtatcatcggcttttgagggacagtctgcagtgaacagacaaaggatggtctacaaagccatttgggaggagcttcngaacgtt

SEQ ID NO: 3596 - DNA, 2037 bp, Glycine max
  misc_feature (45)..(45): n is a, c, g, or t
  misc_feature (51)..(51): n is a, c, g, or t
  misc_feature (68)..(68): n is a, c, g, or t
  misc_feature (86)..(86): n is a, c, g, or t
  misc_feature (150)..(150): n is a, c, g, or t
  misc_feature (178)..(178): n is a, c, g, or t
  misc_feature (273)..(273): n is a, c, g, or t
  misc_feature (289)..(289): n is a, c, g, or t
  misc_feature (303)..(303): n is a, c, g, or t
  misc_feature (337)..(337): n is a, c, g, or t
  misc_feature (362)..(362): n is a, c, g, or t
  misc_feature (402)..(402): n is a, c, g, or t
  misc_feature (451)..(451): n is a, c, g, or t
  misc_feature (457)..(458): n is a, c, g, or t
  misc_feature (467)..(467): n is a, c, g, or t
  misc_feature (573)..(573): n is a, c, g, or t
  misc_feature (585)..(585): n is a, c, g, or t
  misc_feature (592)..(592): n is a, c, g, or t
  misc_feature (650)..(650): n is a, c, g, or t
  misc_feature (877)..(877): n is a, c, g, or t
  misc_feature (984)..(984): n is a, c, g, or t
  misc_feature (1097)..(1097): n is a, c, g, or t
  misc_feature (1167)..(1167): n is a, c, g, or t
  misc_feature (1391)..(1391): n is a, c, g, or t
  misc_feature (1446)..(1446): n is a, c, g, or t
  misc_feature (1546)..(1546): n is a, c, g, or t
  misc_feature (1638)..(1638): n is a, c, g, or t
  misc_feature (1757)..(1757): n is a, c, g, or t
  misc_feature (1912)..(1912): n is a, c, g, or t
  misc_feature (1983)..(1983): n is a, c, g, or t
  misc_feature (1985)..(1985): n is a, c, g, or t
  Peptide Sequence Number=SeqID_8185
  Probeset Number=SeqID_13375
tgtactctactacacagcgtgtgtcgcagaatgcagattacgtcntatgtnctctcgccgaacgaagngatctttctgacgctcgncgtgagatcaccgcaaccgacggtatgtatcgtcagctatgcgtctgatctgtgtgactcaaanctacaaagcgtggagctatgcatcgganacacccactctaggcaagtatatggtctgtatcatgatgactgctcagtcatcacgcaggagacgccacataccatggaagcgcagtacgcgacnggagctagactattancgttgagacggcgngtgcgtaagcatcgtcaacatctcagcgagtcgnctaagaagtctcagcaatcgtatgncgcatctcgacggatgcacgcatcgttgacatgatgatcncagatgtcacgatatgtcactctcatactgccattaacatcgctatgangtaggnntgccgatgncgtacgacacgccagcagatatcgcaccagctatatactcaactgaacacgatgcagcgaacgatcctcagagacgcagcgccgagcgtgcgaatgagcaactcantgctctcactantgagatngcagacatcagatgatcgtgacgcgaaagtgcaatcatgtccagataggatacgtcgnagcatagtgagtcgtgagcgagatgtaggtcacacgcgagacatttgacatcacgttatgtcatgacatatgctcagacagcgcatactgtctgagatatcacacggcgtgagatgagcagagttcatcgtactgatatattctgtgtgatgcaccagatggagcgcgtcgtggtatcatcagcgaggagtcatattaatcgctgccaatggtacggcactcgtcantgagaagtactagacatctagaacgtatgcacactatcgcggagacggtacacgaatgtacatgagatcttcgtatgcgagtgcgctggagtatctcgcactagcancacagtctccgtctggcacttagacgtagcaggatggtgtagagacatacgcggagtcacacataggtcatatagtagtagcgagcgtagtgtataggctctgtagtctcacnatagacgtgatctatagtagatatgtctacgtagctacgctacacggtagagtagcatatactccttcgncgatatacgctcatatagtgctacaaccgtcgggatcgtcgagcaacgcttaggcgtgtggatcagggtagagaccgtacgagtcgactcgtccgatgcttcgcaggcgtgcgccatctcggctgatatatatagtactaggaaactattacgaagtccgaggtcgagtcaccgcgttgaggcggaatattagcgatgtatgtctcaacaggggctctcgtatnttcggaatgtgtaatttgtatcgatacgagtcacagcgcgtcacgcaatcagtcnctgacacaatcattagcacttcgccggacgcctgtcacagcgagctaccggcaccgtatgcctatacgcagaccgttttgcacgaccatccatagcttcntattcgtagaggctgaatcggagcgagagcagaaagcgtatgtcgcaggtcgcggtcggcctctatcaattcgatataacaaatagtagcangcacaataaaaagccgcagtaggagtggctatctgaggtaagtagtgcgcttgttatacggaatcgtaataggcgctgagagcacgatccgaacagagctatagatgcgtgctgcctangttctgtgagtgcgcggtcgtctaaaaagcaccaaggagagcgtgagacaacacaagatggttctccgagcaatctctctagtttattctatagttattgtcgtgtcgatgcggctaacgaagaagagaagaggagagaacacaaagcatttatncggataggcccatccgcaccctgcggagcgcggcgcgccctgcggtacctccatattgcagcaaataattntntacgcctgatagtgatatgacacccactctcctccaaccttgggtagccggt

SEQ ID NO: 3597 - DNA, 277 bp, Glycine max
  Probeset Number=SeqID_13376
taaaatttattttttcccttttatgcaatgaaatttgagggaggtattcattttgtggcatgccaggcctttacaccggaatccatgcaaaaccaaagcccaaattcaagagcggagttatatttgaatcaacaactgctctgaatgtggatcagacaaacaacctctgtgattagtgctaacatcaaaaccacaccggcgagtgttgcatagtcagcagccaccgcatcaagaggtaataatcaggaacaaacagcagcggatgttaatggttcta

SEQ ID NO: 3598 - DNA, 598 bp, Glycine max
  Peptide Sequence Number=SeqID_8186
  Probeset Number=SeqID_13377
aaccaataatactaccccagttagtaacaacaccactaataccaccagtaataacactaatggaaatgttgcattgagtgctgatcaaatccaaggtcaagatgtccaaaacgctttgaactatggatcaactcaggttgttcaactcggtcaaaaaagcggcaagatccccactgatacttataacatcacccaagttgccagcgtcctcaagaagaaacaacccgctggagccaattacaactgcaccgtgaccctcaagagtgctgctaatgttactgttacgactaactttaatgttttcagtaactctaccagcaacgctatgatcctcaaggcttattcttatcaagttgctggtatcaagaaaaactaaatcgtatgagttctagtcaactaactatgtgaaagtaattggaaagagtaatgaggctggttagttagttcgtaaaattctaaatgaataaatgtttttacccataacaaaaatggtttttattcgtagtgatatgattataaacttttttatttgatatcgataaacatatacatcccgtatattttttactatcaaattaaaaggcaatattttgccttc

SEQ ID NO: 3599 - DNA, 2343 bp, Glycine max
  misc_feature (1)..(1): n is a, c, g, or t
  misc_feature (7)..(7): n is a, c, g, or t
  misc_feature (17)..(17): n is a, c, g, or t
  misc_feature (27)..(27): n is a, c, g, or t
  misc_feature (108)..(108): n is a, c, g, or t
  misc_feature (117)..(117): n is a, c, g, or t
  misc_feature (133)..(133): n is a, c, g, or t
  misc_feature (135)..(135): n is a, c, g, or t
  misc_feature (143)..(143): n is a, c, g, or t
  misc_feature (153)..(153): n is a, c, g, or t
  misc_feature (160)..(160): n is a, c, g, or t
  misc_feature (168)..(168): n is a, c, g, or t
  misc_feature (177)..(177): n is a, c, g, or t
  misc_feature (179)..(179): n is a, c, g, or t
  misc_feature (183)..(183): n is a, c, g, or t
  misc_feature (195)..(195): n is a, c, g, or t
  misc_feature (214)..(214): n is a, c, g, or t
  misc_feature (218)..(218): n is a, c, g, or t
  misc_feature (227)..(228): n is a, c, g, or t
  misc_feature (239)..(239): n is a, c, g, or t
  misc_feature (246)..(246): n is a, c, g, or t
  misc_feature (251)..(251): n is a, c, g, or t
  misc_feature (273)..(273): n is a, c, g, or t
  misc_feature (289)..(289): n is a, c, g, or t
  misc_feature (296)..(296): n is a, c, g, or t
  misc_feature (298)..(299): n is a, c, g, or t
  misc_feature (302)..(302): n is a, c, g, or t
  misc_feature (311)..(311): n is a, c, g, or t
  misc_feature (324)..(324): n is a, c, g, or t
  misc_feature (344)..(344): n is a, c, g, or t
  misc_feature (353)..(353): n is a, c, g, or t
  misc_feature (362)..(363): n is a, c, g, or t
  misc_feature (419)..(419): n is a, c, g, or t
  misc_feature (425)..(425): n is a, c, g, or t
  misc_feature (436)..(436): n is a, c, g, or t
  misc_feature (444)..(444): n is a, c, g, or t
  misc_feature (474)..(474): n is a, c, g, or t
  misc_feature (477)..(477): n is a, c, g, or t
  misc_feature (501)..(501): n is a, c, g, or t
  misc_feature (506)..(506): n is a, c, g, or t
  misc_feature (513)..(513): n is a, c, g, or t
  misc_feature (522)..(522): n is a, c, g, or t
  misc_feature (536)..(536): n is a, c, g, or t
  misc_feature (545)..(545): n is a, c, g, or t
  misc_feature (553)..(553): n is a, c, g, or t
  misc_feature (561)..(561): n is a, c, g, or t
  misc_feature (571)..(571): n is a, c, g, or t
  misc_feature (575)..(575): n is a, c, g, or t
  misc_feature (617)..(617): n is a, c, g, or t
  misc_feature (623)..(623): n is a, c, g, or t
  misc_feature (643)..(643): n is a, c, g, or t
  misc_feature (653)..(653): n is a, c, g, or t
  misc_feature (661)..(661): n is a, c, g, or t
  misc_feature (666)..(667): n is a, c, g, or t
  misc_feature (674)..(674): n is a, c, g, or t
  misc_feature (681)..(681): n is a, c, g, or t
  misc_feature (701)..(701): n is a, c, g, or t
  misc_feature (733)..(733): n is a, c, g, or t
  misc_feature (755)..(755): n is a, c, g, or t
  misc_feature (769)..(769): n is a, c, g, or t
  misc_feature (774)..(774): n is a, c, g, or t
  misc_feature (788)..(788): n is a, c, g, or t
  misc_feature (802)..(802): n is a, c, g, or t
  misc_feature (812)..(812): n is a, c, g, or t
  misc_feature (819)..(819): n is a, c, g, or t
  misc_feature (826)..(826): n is a, c, g, or t
  misc_feature (848)..(848): n is a, c, g, or t
  misc_feature (851)..(852): n is a, c, g, or t
  misc_feature (869)..(869): n is a, c, g, or t
  misc_feature (872)..(872): n is a, c, g, or t
  misc_feature (875)..(875): n is a, c, g, or t
  misc_feature (893)..(893): n is a, c, g, or t
  misc_feature (898)..(898): n is a, c, g, or t
  misc_feature (916)..(916): n is a, c, g, or t
  misc_feature (946)..(946): n is a, c, g, or t
  misc_feature (966)..(967): n is a, c, g, or t
  misc_feature (988)..(988): n is a, c, g, or t
  misc_feature (1040)..(1040): n is a, c, g, or t
  misc_feature (1044)..(1044): n is a, c, g, or t
  misc_feature (1046)..(1046): n is a, c, g, or t
  misc_feature (1056)..(1056): n is a, c, g, or t
  misc_feature (1081)..(1081): n is a, c, g, or t
  misc_feature (1088)..(1088): n is a, c, g, or t
  misc_feature (1099)..(1099): n is a, c, g, or t
  misc_feature (1106)..(1106): n is a, c, g, or t
  misc_feature (1119)..(1119): n is a, c, g, or t
  misc_feature (1139)..(1139): n is a, c, g, or t
  misc_feature (1184)..(1184): n is a, c, g, or t
  misc_feature (1188)..(1188): n is a, c, g, or t
  misc_feature (1247)..(1247): n is a, c, g, or t
  misc_feature (1304)..(1304): n is a, c, g, or t
  misc_feature (1334)..(1334): n is a, c, g, or t
  misc_feature (1336)..(1336): n is a, c, g, or t
  misc_feature (1357)..(1357): n is a, c, g, or t
  misc_feature (1729)..(1729): n is a, c, g, or t
  misc_feature (1744)..(1744): n is a, c, g, or t
  misc_feature (1784)..(1784): n is a, c, g, or t
  misc_feature (1797)..(1797): n is a, c, g, or t
  misc_feature (1936)..(1936): n is a, c, g, or t
  misc_feature (2104)..(2104): n is a, c, g, or t
  misc_feature (2279)..(2279): n is a, c, g, or t
  Probeset Number=SeqID_13378
ngtcgancgtatcctgnggctgctagntcgtagtcgtcgtgcgtgacgtcagtagttagatcagtattagtacttacgatccacgtcatgactttgatctgcatcgcngttccactngcgtcgtagcatcgtncncatgcagnctcgtttcgntcgcgtncatccctngtacgtcgntntctntatattatcatnagcagcagtgcgatactantacnctgcgatgnncgcatgccganctgcgtngtgcntcgcagcttcgtcgaacgtcgnacgggcacgcgcagcncgtccantnnatntcatactangcatgcaggccgntgatgtcgcgtcaggtcgcntcagcaaanacgtcatgnnctacacgcacgtacggtcacgtcaggcatgactactagatactgacgcactgccgntcgacncgtctgccganttacgacntcgcgctgcagcgatgcacgtctactatantanactactgggtcgtacctgcccatnacgantcagttngtagttcgncttcgcctgttctngctgtttgnctcctgcntactgatntcacgtagcntcantttgtactaacgacgacatccgtagtcatcgtagtcgtatantgtcanctgcctctgacgcgcttcgncgttcgcacntcagtcantactnntcactgnctctcgnacgcagctactaaaattctntcatgctcacgtcagacgtcgtcgccgctcgngtgcacgtcgacgagctgagcngtcgcccgacgttntttantttccagcggatcnctgactgagtgcgntcttcgtatnatcgganctgctgngtgtcgctgtcctttccgcgantgnngcgcttacagcatctanatnatnccctgtactatacctatntcgcncggcgtcgcagtgtgacntcatcgccgctcgcgtcatcagtcggcatnctcgccatacgctgtccacnnctcagtgatctactcgtgtgnccacgcgcgcacacgtgtctcatatgctcagttgctcatgtgtctcttcagntatncntgtcgtccgntccgcgctcgtcagcacacgttcantctagcnttgtagagatnaggtcanacgaatgtgttgnggccatcagacgcgctctcncatctctcttctgtcgaatacgctcgtgtgcgcgccggtcgcgtntcgntgatcgcgcggtcaggcgtgactatatatctgcagacgacgtcgtgcgtggcatgacgnactcatattctatcatgtccgcgtcgtgtattatatatactctagtgcgcgccggcnggcacattttgctctcatcacagttgcgtncntccactgcactatgatgcgtnttactatctcatagctcgtgcgatgggcgcgacgatcgtagagcttctagtcgctactacatgcatactgccgcatgtaccgatcggcgcagcctaatcacatccagcatacttatctacgatatgatatctttctgttccacgtctgtctcctccatcgtccgcgagcatctcctcgcgcgcatctgtttactcgtactcaatctattaatgttgctgcggcagatctgtgtcggcgtgttgcatactacatgatgttcgtgtctgctctacgccgatatatgtagatagatgacgtggtggcctgcgcggagtctcatcagcagcgccgcgtcgccgcgctcatacatcctgagtgagcgcaacgtcgtnagtgcgttcgcgtgnttagttcgtcgcggcgcgcgcggctgtatgtagtatatantttgcaggagtgngtggcgtatgcgcgtggacgccgcagacggtataggcgtagtgtggaaccactctaacactgcgcgctctcctctcctctcactagcgcgtatccttctctttactctgatatcgtatagcgctactcacctcgcgtcntgctcgctgcctcacccctgtactctgcgcactcctcgcttctcgtgtgaagagctcggatgcgccggtgttggcgcgctggggtactacatgacttcggcaccactcttgtgtattatggataccatacgctctccctcgtatcctcttttctcggtcgtctcgccnctctctctcttctgccgcgttgggcaaacacgcccgagctcgttctctctcttcctcctctatgtgtttgtgtggagaaaagatacgtgacgttgcttcccgcgctgcgcttcctgtcttgtctacgcctcgagcttcccgtctctctctctctcctccgcgttgtctctcctcncctcccctcgttcacacgtctctctctcgctctgagccggtactcttcttcctctccctcgccg

SEQ ID NO: 3600 - DNA, 1382 bp, Glycine max
  misc_feature (1)..(1): n is a, c, g, or t
  misc_feature (20)..(20): n is a, c, g, or t
  misc_feature (48)..(48): n is a, c, g, or t
  misc_feature (135)..(135): n is a, c, g, or t
  misc_feature (391)..(391): n is a, c, g, or t
  misc_feature (401)..(401): n is a, c, g, or t
  misc_feature (446)..(446): n is a, c, g, or t
  misc_feature (553)..(553): n is a, c, g, or t
  misc_feature (603)..(603): n is a, c, g, or t
  misc_feature (704)..(704): n is a, c, g, or t
  misc_feature (814)..(815): n is a, c, g, or t
  misc_feature (907)..(907): n is a, c, g, or t
  misc_feature (969)..(969): n is a, c, g, or t
  misc_feature (1245)..(1245): n is a, c, g, or t
  misc_feature (1266)..(1266): n is a, c, g, or t
  misc_feature (1293)..(1293): n is a, c, g, or t
  misc_feature (1303)..(1303): n is a, c, g, or t
  misc_feature (1340)..(1340): n is a, c, g, or t
  misc_feature (1343)..(1343): n is a, c, g, or t
  misc_feature (1345)..(1345): n is a, c, g, or t
  misc_feature (1363)..(1363): n is a, c, g, or t
  misc_feature (1366)..(1367): n is a, c, g, or t
  Peptide Sequence Number=SeqID_8187
  Probeset Number=SeqID_13379
nacgtacagtcttatatgantttgatataagatttactcataggtgantagacatataacgttcaattataattgagtgatggtgtgcgataaggagaggcagtcagtacatgccctgtatggtgtgaaatatgnggtggagatggcggtatgcggagatgtcccccgtctcggtgtaatatgatgtatgcatgtggtctagcgcgcgtgtgaatgaatactcacacagccgcatcatcgtgagatgggggctgtttatatctctcgtacacacggtggggcgcgcgcgagtacgatagagaaggaatagagtgaatacaaggcttctttatgtgtatgatgcattatagagagtcgcagggagcgtgtgtctctatatctatttacgctntcgttgttgntacgatctctactttcgttctgcggtcgttcgtgcaaagtggtgngctcgctatacgctatagaggtgtaatgcgacgtggtggggctgtgctcgcgcgcttccatcacatattgatactccctgagagtgggagggggacgaatatcacgncatcatcaccgctgaggatataccgaccgtgagggtgcactctctgttgntgtattatgtggtatttgttgtttttcacacataactctccttcctatcattcaacaacacccacacactatattctattagtgttgtatatcttgtgtanttcaatattctgtgtgagggacgcacaactgtgatagttacttacagttaggcgagaagagcccttgattacgaattaaaaggatgcgttggcgaataccagcgcacacnntcttcttttcgtgcgcggccgtcgttgcgccgggatggcctggtgttgaggatgctggtttgttcgctgttgcctcttcaccgcagcttccngtctctttctatatcttcaatgtgcgttaaataaatattagttcttctctttattagtacanatctctcgtgtacagagtttgtattggatattagcactcagcactcacacagtgtatagcacctctctacacgctacattcaatacattggagtgagaacacgctgggttctttcacttgtgtgtatgcggcgtggtgtctgtttcatgttgttggggtgtctctgtcatcgatgcacaagtgtaacgatacccttctttggtcattatcccgctcacatacaaaatgaaaaaagataatagaatagtatatttttctatttactatctcattctntttgctggagagggaggggangccatccgtcaacctactatgccctangcgcgcctcncccgggcgcgccgaacccgaaccaaacccaccaacancgncncagaagaggaggaagagngannggggccacaccacac

SEQ ID NO: 3601 - DNA, 1592 bp, Glycine max
  misc_feature (1)..(1): n is a, c, g, or t
  misc_feature (4)..(4): n is a, c, g, or t
  misc_feature (25)..(25): n is a, c, g, or t
  misc_feature (99)..(99): n is a, c, g, or t
  misc_feature (101)..(101): n is a, c, g, or t
  misc_feature (185)..(185): n is a, c, g, or t
  misc_feature (209)..(209): n is a, c, g, or t
  misc_feature (258)..(258): n is a, c, g, or t
  misc_feature (329)..(329): n is a, c, g, or t
  misc_feature (363)..(363): n is a, c, g, or t
  misc_feature (479)..(479): n is a, c, g, or t
  misc_feature (481)..(481): n is a, c, g, or t
  misc_feature (515)..(515): n is a, c, g, or t
  misc_feature (520)..(520): n is a, c, g, or t
  misc_feature (528)..(528): n is a, c, g, or t
  misc_feature (587)..(587): n is a, c, g, or t
  misc_feature (700)..(700): n is a, c, g, or t
  misc_feature (788)..(788): n is a, c, g, or t
  misc_feature (801)..(801): n is a, c, g, or t
  misc_feature (1056)..(1056): n is a, c, g, or t
  misc_feature (1294)..(1294): n is a, c, g, or t
  misc_feature (1321)..(1321): n is a, c, g, or t
  misc_feature (1332)..(1332): n is a, c, g, or t
  misc_feature (1513)..(1513): n is a, c, g, or t
  misc_feature (1515)..(1515): n is a, c, g, or t
  misc_feature (1550)..(1550): n is a, c, g, or t
  misc_feature (1561)..(1562): n is a, c, g, or t
  misc_feature (1566)..(1566): n is a, c, g, or t
  misc_feature (1569)..(1578): n is a, c, g, or t
  Peptide Sequence Number=SeqID_8188
  Probeset Number=SeqID_13380
ntancgcgatcaagactgtagcagnagatagatgcgagtgagctatagcacgcgcatggcgaggactggctactagtagcgtagagtccctatgtgatnangcacgagagaggtagagagatgagtcacgtactggcgatcacgtgatgtgtagtagttaggtgatgatctacgtatgtagatgntcgatgtgtgagtgagtacatcgnggtatagcatgtcactctcaatagatatagtacaagtgggagcatgagngaggagagtgtcgtgcgagcgcggacacgtgagtgtgcgtagtgtggcatatatgactatggcgtactgantatatgggtgcagagcagcggcagtccgcgtgcncgcgtgcggcgtgtccgcgtcagcgatgcacggcggataagagcctgtggatagcggcagtgtcatgtgctacactaggtgtaggagagagcatgtcgcgaatcatgtgagtgtcncnaataacgtgcacgcccgctcagatgcgtgccgcnccatntaatctanctcctaccacgggtcgcatccactcgtccatcgccgcgcatcgtcggtgacctgtcacnaccgacatgatcacacacatgcgcacagtgctgtcgcggaggtagcggaaacatagtaactagtgtagacagcacgcgagcgtgcctatatgcgacttgtgccacaatgacanccgtcatctaacaattctcacgagtagagcagatgactgaggcagcgacactgctacgtagtcgccagcgtacgagatgattattatntaagtgatctgcntacgtcaccgcgtcggctgccgcagcttctctgtactactcactcagagtagctatgccctgtgatagtcgatgctggcagtatgagagcaagtacaaataactatgcgagatatcatcggtggagatggcgattcacatcttcgtccgttgttgaacacacagacatgggacggcagatgggcgcgtgtcgcgtttcgcgttatcgttcacgcaagagagccacgtccgtgcacgacatcattccatcaacatncacgcgctgtatctgatcgctgtatctacatcacttacacctctcttattctcacatttctattctatcttctctatgactatgataatttccttatatgatagagttttgtgcttagagttgtttgtgtcggtactattatcagttctctacatcacacacttatatctaactatgtcataatcacaagcgacgaatcgctcgtttaggtgtgacacgacgtgaaacgcgatggtantcgtggcggtctgcaagcggcgccgcncctggcgccgngccacgagctagggcgtggtcgttagagctactgtgtgagcggagatatatttacagtcttctctcttgctgcctggcaatacattcctaatattaaaatactctcttctccgtacccaacggtgaggagcctcagaaaggagagggggacaacatataaataaaataaaagaagaaaaanancgtgattagttgggtgtggtggggtggtttgtttntgaataataannagangannnnnnnnnngggccacacacacc

SEQ ID NO: 3602 - DNA, 1691 bp, Glycine max
  misc_feature (17)..(17): n is a, c, g, or t
  misc_feature (19)..(20): n is a, c, g, or t
  misc_feature (24)..(25): n is a, c, g, or t
  misc_feature (28)..(28): n is a, c, g, or t
  misc_feature (31)..(31): n is a, c, g, or t
  misc_feature (123)..(126): n is a, c, g, or t
  misc_feature (340)..(340): n is a, c, g, or t
  misc_feature (637)..(637): n is a, c, g, or t
  misc_feature (751)..(751): n is a, c, g, or t
  misc_feature (840)..(840): n is a, c, g, or t
  misc_feature (878)..(878): n is a, c, g, or t
  misc_feature (1313)..(1313): n is a, c, g, or t
  misc_feature (1496)..(1496): n is a, c, g, or t
  misc_feature (1546)..(1546): n is a, c, g, or t
  misc_feature (1565)..(1565): n is a, c, g, or t
  misc_feature (1581)..(1581): n is a, c, g, or t
  misc_feature (1673)..(1673): n is a, c, g, or t
  misc_feature (1691)..(1691): n is a, c, g, or t
  Probeset Number=SeqID_13381
tgtggtttgggtgtgtntnntggnnctnttnctttgttttgtatggattattgtaaatatgcaaacaccaaagctggagagcatgaagtgagaaagagaagtagggaaaacaaccaccgaagnnnnaagccccttcctcccttcccacaaaccgcccgtcatgctgcacccagctatcacgagatatatattaatataccgcgaacaccgttgttggagtgtgagatattatactattactcggataaacgtccgtcccttctatgggttgctcacgagtgtgtgagtcgatgtcaatactcgcacatctatctggctcgtatcgtggctcgttcgccgnccgtctcgacgacgcgcgcggtctattattgtttatgtttgtgtgtgttgttgtatatcgtattcggcgctctgttggatctatttgtgtttgttggctctctactttcgatatagctcaccacacacaatctccacctctacttgcgacgcagcgattcatatgcgacatgctctgctctcgtatagctctcgtataacagatagcctatatatatatgaatgtgactctcctcgcatgtatttatcagctcctctccattacttgtgtatctaatgtgtatataacgagagagangtgaggaccgtgcggcatatataatagtgtgtcgtccgtgtacatcgtacatattagattctattatgatcatacgatgctagatcataatttttagatgtatattgcgtcttnatcgtcaatctatatatcggtatattgcagctcgcggctctcctgcttccgtgctttcgttcgaaatgtagtatgtagaatagtgaatncgaacaaagagagaacgtacgttctcgagtgactcgancgtacgcaccggaagttatattcgttactacgttcactcacgtattctgtctgctcagttctgaatcgtcgcgcagtgtagctcacagtacatgatatagtgactaactagagtgtatataatcatatcatatacatgtaacgttactacacaacacaagaccgtgtataatagatgagagagagatacgcacaacaacaacatcatgtcacacgcacgaatcatgtgcgtttctctgtcgctcgtctcgtcgttcgtactctatccacttcacgtgcgtcaatcgatatctgacatctatatctatactatcagaagtaaacaaatcttgtgttgtcttatatgagctgtgggtaattattacttatggatatggatggagggtacgccgaccatcacctcgcgcgctgtgcgtccggatactcgtctttgtgntcagtgatagcctgttctcgtgcgcatgcgccgcgtacggtgacgcagcgtggacgatgacgcgtgcagacgctaattgttatgtcgagctgcggtcgatagcgtggcgatacagtgcaatatcgcactgagacgcacagaatcgagtgcgataacaaacatgatatataacacatatagcgntagaccattctacttactagcatctagcatttctacttctatatccgctncttacgtctcacagcgtcnagtcgcgtgcgtgcgngatggtgtcgcgtcgtacgcacctaggacgtggtcgcgctcgcgcgtcttagcatgtcattgtacaatctcgccaagatgcttctctcacgntcgttctccgtctgtccn

SEQ ID NO: 3603 - DNA, 744 bp, Glycine max
  Peptide Sequence Number=SeqID_8189
  Probeset Number=SeqID_13382
atcagtatcagttgaaatcagcttcgaatcaaaccgttagaagaacccaaacgttcagttattttttcaagtgaacaatttttaaaagtgtagaaaggaaaaaatggcacaaagaccatacttttttgaggaacactttccagcaagttatcacttgacgtttgcaccaccagtacaacgtcatgcaggcgcccttaactatccccgtgaagatcttgataagatggcacacatggataaagacggctatcatttgtatgtcgacgtcaaagaatatgagcccgatgaaataagtgtgcgcacaattgacgagacaattattgttgagggaagacagaagaaacgagccggatcaaacgctttgccacggcactttgttcgtcatttccgtcttccagagcattacgattcagaagacgtcttctcagccatttcggacgataaaattttagaaatcagagctttacccgctcacatgaagagatgtcgtcctcatattgcacctacaaccactgaggaaaagaagtgaggcttcaatcaaataaaaataaaacaaaaaaaaaaaatggtttgaaaaattattgagtgaaaatgggacgaatcaatgtttttccacatcatttctagaccaccattatttgcgcaaattatggtcgaattgtatgtgttcatatataattagaggtcctcaatttatatttcacaaatgtaatcaatttgttttttcttctttgaatgcaattt

SEQ ID NO: 3604 - DNA, 1371 bp, Glycine max
  misc_feature (56)..(56): n is a, c, g, or t
  misc_feature (121)..(121): n is a, c, g, or t
  Peptide Sequence Number=SeqID_8190
  Probeset Number=SeqID_13383
gtgggagctcaactcgccgtgtgagtcaaaacatacattccacagccctgtctatntctcacattacatgcgctggcgtatagtgatgagttaagattagtagcgttacaccccgctttcncgcgctcaatacaactgttcgtgtgtggaacaacaacacacagcgatatatagtccgcggtgcaacacaccgcacgcgcgcatacatatacggctccgccatatatactactatgtgcgcgcaacaataatatagccgcgtgtcgtcgatattcgttacacttctctcatttatcgatcatcatctgacctcgaaatagctaatactaggcaaacacataccatgtccatacaaactataatattagttcttgtctagtcaactgtgtacggcgtgtacaattcccactctcattctcacatcacgcgcctctcgccttattgcgaatatattcctcaccctccaccgattataatacacttttccgtctacatggcaccagtgcgataaggaaggatacacgggcgtactaatattacactgaatatatcagcgtcacaacaaggggcgtaaaactatgtggcggaaaacagcgcggtataaccctccaacaatctgctcaaaacatgcttcgtcaaatcgtcgcaatattcacttatatggcttttggtgctaatcacgtaccaactctggcgcatatatcgtgtttctcaaacgtgtgcggcattatttggccaaacttttactttgtcactctggcgctatcaccacgtgtaaaaaacacatcgatactaggtcaatctctgtctacatcgtgctcacatctcgctaaaactatgggcatacatataggaaaacgtgggtccgtcggggtaaaaaacggtcaaaaacgggcgctacgtgtaaagcgtgtccggcatcagtcgcccacacctcccacgcgcctgtataaaataataaaaattaaaccgcgccctctctgtgggtaaatgtcgggcgtggttcaaccatattatatttcagtctcttatctgggaacaactgtcgacggcgacatcacacctaatcctcagctccctcctatttatttctttcgtatccttccctgggaacacgatacctattacacaagtcgtataatgtgctaacacttacgtctcaaatggtgttgagccgcggcaaaattatccaaataatattgaatactgggcttcaggtccactaaattcaatatttttaggttaaggcaaaaagctaaaaggggacaagggctagaaagggaaaaaaggtgagaagggtaaagcgtactaattgggaaaagggctcgccccgttttcgtacgcaccccgaccctaaaaatagcataacaa

SEQ ID NO: 3605 - DNA, 672 bp, Glycine max
  misc_feature (641)..(642): n is a, c, g, or t
  misc_feature (644)..(644): n is a, c, g, or t
  misc_feature (651)..(652): n is a, c, g, or t
  misc_feature (654)..(654): n is a, c, g, or t
  misc_feature (662)..(663): n is a, c, g, or t
  misc_feature (671)..(671): n is a, c, g, or t
  Probeset Number=SeqID_13384
aggatggccattcttttagaggctcatcccaagttttagcgggtgtactatccaggcttgccgagtcaccctgaacatgagcttgccaagaggcagatgactggtttcggtggtgttgtcagttttgagattgatggagatctacattccacaataaaatttattgattcattgaaattcccatattttgcggcctcgtttggtggctgtgagagcattgtggctcaaccagctaatatgtcttactggaatcttcctcagtcagaaagggccaagtacaggtgttatgacaacctggttcgcttcagctttggagttaagttttttagtatttgaagggtggatgtcaacaaagctgtggacgctatataaacagttttcctcattcaccgcgagtttttttcttttataaaagaaaatatttgtattgttatcaccatgctggcggatctcaaattgcaatatttagaatcgatacatagatagtatacgtgtatgggatatttgtgttgaaagaatgatactgtgtgctgctatattatggcatgctattgcccccctgaaaaagaaaatgaataaaaaataaaaacctaataaaataaataaataatacaataaaccagattattacacaacaaaannanaaaaaannanaaagggcnnggccgctnc

SEQ ID NO: 3606 - DNA, 1880 bp, Glycine max
  misc_feature (4)..(4): n is a, c, g, or t
  misc_feature (19)..(19): n is a, c, g, or t
  misc_feature (30)..(30): n is a, c, g, or t
  misc_feature (37)..(37): n is a, c, g, or t
  misc_feature (43)..(43): n is a, c, g, or t
  misc_feature (62)..(62): n is a, c, g, or t
  misc_feature (78)..(78): n is a, c, g, or t
  misc_feature (90)..(90): n is a, c, g, or t
  misc_feature (94)..(94): n is a, c, g, or t
  misc_feature (198)..(198): n is a, c, g, or t
  misc_feature (259)..(259): n is a, c, g, or t
  misc_feature (339)..(339): n is a, c, g, or t
  misc_feature (344)..(344): n is a, c, g, or t
  misc_feature (346)..(346): n is a, c, g, or t
  misc_feature (349)..(349): n is a, c, g, or t
  misc_feature (536)..(536): n is a, c, g, or t
  misc_feature (551)..(551): n is a, c, g, or t
  misc_feature (559)..(559): n is a, c, g, or t
  misc_feature (764)..(764): n is a, c, g, or t
  misc_feature (888)..(888): n is a, c, g, or t
  misc_feature (904)..(904): n is a, c, g, or t
  misc_feature (915)..(915): n is a, c, g, or t
  misc_feature (922)..(922): n is a, c, g, or t
  misc_feature (1172)..(1172): n is a, c, g, or t
  misc_feature (1243)..(1243): n is a, c, g, or t
  misc_feature (1253)..(1253): n is a, c, g, or t
  misc_feature (1332)..(1332): n is a, c, g, or t
  misc_feature (1357)..(1357): n is a, c, g, or t
  misc_feature (1468)..(1468): n is a, c, g, or t
  misc_feature (1514)..(1514): n is a, c, g, or t
  misc_feature (1516)..(1516): n is a, c, g, or t
  misc_feature (1553)..(1553): n is a, c, g, or t
  misc_feature (1596)..(1596): n is a, c, g, or t
  misc_feature (1640)..(1640): n is a, c, g, or t
  misc_feature (1684)..(1684): n is a, c, g, or t
  misc_feature (1763)..(1763): n is a, c, g, or t
  misc_feature (1833)..(1833): n is a, c, g, or t
  misc_feature (1842)..(1842): n is a, c, g, or t
  misc_feature (1862)..(1862): n is a, c, g, or t
  Peptide Sequence Number=SeqID_8191
  Probeset Number=SeqID_13385
gcgngtcttcttgctcttntgtgttatatngttgttntggttntagatacgcgcgaaaacanagtatcttagtgcaanacaaagccacanaaanagagcggcaacacaccgacctatcactccaaatacatattataaataatactacaagatggcgaggctccctcagcaaatctcgaattacgacctatcttacancgtcgcatcctccgctgcgagagttattgtatggattggaggtgtacacacgcacgattgncgggcggcgccgcggcgcccacgcccacaagagagtgctggactacctctcactctaaaaccatctcaccgcatgatcgntccanancanccacaccgtcccccacacaccctgcgccaagtctcatcctgctgtcgcttcagatagtctgctcaacctctcctctatctctactgacactctcgcgcttatgttttgctgtcatctcttcgtgtctggcgctgcgcgttattattgtcgtgggtgatgatgaattggtgtgtaagctaatggttangctctgcacgctatntcactcanacgtctactatctatctcacagatgtcttctgtcgatctcatgtgtctggaatcacacaatatcgcgttacttgtaactatgttagctcgccaactgtatagcctctgctgtctgatttccttctgtcagcaccgtccgaggctgctctccgctcctgcttcatactacaccgacatctcgatcgcgctagatgtctattcagantctaccataacatacgaataacacagcgcaaagaccgcacaaaacaaacaactacacaacaagtcgaatagtgtactcacaactcctctcactacgcgattggcgcgtccgcatagctccgagngacgacctgtcatctntcgtatcatangtagatngtatagagtcatcgccactcctacgatgtactacgtgcaatagtaactatcttatactatgtgtattagattcgcacttagtgagtgactagacgcttagaagctcttcacgccactcgcgacgtcctctgcgctctccgctcacatccagctctctctgcattgactatctgctctcatcgttcagtagatgtatactcgctagcctctatgacgcactctaatagaagttatatagatatgagtgttncgacactacatctcatcgatatacattcatctcgttcttatatctcgggaaagtaatgaatcatatgtatnagcaatgtgnattatagactatattcatcatcttacactatctacgagtacacactagctcatatacaccacttatatactgcacacancacgtgaacatacacagttatgatnttactagatgcgagtgagatatcgagcacacgcacgtctccactagatcacatccaatcgtagacgtgtaaagtcgccctcggccccgcctctcgcacgctcccctccgcnactgtcggaactgctctcgcgcccttcgcctccatctacctgatcncnagatctcatattcatctccgcaccacatcacgctccntctcgcacatatagtacagatcaacgtcttacatctcagcctntatcgatagaggatgatgttagtgacattgtgtgacgcgtcgantatcatcacctcctctcatcattctacttgagtgtgatttatcntgatttgtagatatcgcgtcttctccgcaccctcacccattatccctccactcacctcgctcaccctccctaccagagnacgccgctcgcgtactcagccatgacgcatcgtgggactgcgccgacgccccatgcaccgacaagtgatngacataaanatgacaactacaatgatcanatgctatatgacatgaag

SEQ ID NO: 3607 - DNA, 1352 bp, Glycine max
  misc_feature (17)..(17): n is a, c, g, or t
  misc_feature (27)..(27): n is a, c, g, or t
  misc_feature (167)..(167): n is a, c, g, or t
  misc_feature (169)..(169): n is a, c, g, or t
  misc_feature (173)..(173): n is a, c, g, or t
  misc_feature (176)..(176): n is a, c, g, or t
  misc_feature (244)..(244): n is a, c, g, or t
  misc_feature (282)..(282): n is a, c, g, or t
  misc_feature (434)..(434): n is a, c, g, or t
  misc_feature (517)..(517): n is a, c, g, or t
  misc_feature (639)..(639): n is a, c, g, or t
  misc_feature (943)..(943): n is a, c, g, or t
  misc_feature (951)..(951): n is a, c, g, or t
  misc_feature (953)..(953): n is a, c, g, or t
  misc_feature (1287)..(1287): n is a, c, g, or t
  misc_feature (1350)..(1350): n is a, c, g, or t
  misc_feature (1352)..(1352): n is a, c, g, or t
  Probeset Number=SeqID_13386
tgtggcttcttttcttntttttctttnttctcctccgatgtgtcctctcgtcgtgccgctcttcctcacggggtcggcgtgtggggtttgatttctgggcatggcgtgctcgggtggggtgggggcgcggcgcgggcggcgggttgagccgcggcaggcgcgccaantnttanatnctcaatacccatcaaaaatcgatgaaatatcatcacatacaagacaccgacacacccacagcaagagnatgaaaatggtagacgacagtgaatagacacctggagnagctggcttgatagtcataatagatcaagacgaccacgccctcgacccgccgcgcaacatcgaactccacaatacacgcgccagacacaaagacacgacgagaaatagctgcagcgcaccaccaccaccgacccgccccgaccccgacacancaacgctccgaatattatcgacaagcgttgctcgcataaatgatgaagctatataaataaatattaagagacaacgcctatanttaatacaatctataaaatataacaatagatgcgagcgaaataagaaacatcaacaagcagtagaatcgtgaccatctatagctgcagtggcgtctggtcttctctgtcgtgtaggtgtagntgtgacgtgatatatcaacatgtctatttaccatactacactaatagtaagaacgttcgttgttcgatcgtgatatatatactatatatcagtatgtcttctatatattcaccccccacacactattctcgatatacacctcctctgcagcggatgtctagacgacggcctactgatcatatgcacaagagatatagcacgagggtgaggcagcgtcgtattgcagattctgtacttagtgccaatctagtagtcatgcatcatctcatcgagacgacgtacatagcgacgacgccgcatactngcattgcnangcatcgtggttctgcacaactatagaatattttataacgtcgatactgtgtgcgatcgaagacggctttagtgatcatatgatggtatctatgtactaacaataaatctgattaacagcgctgtacatatatctatcctgtcagtcaggacaatacacgcatgcaccacagacaggtagagatatacacgtctagctcaatatatataataacatcagatacgggacactgcggcgattacctgaccgtcgtgacgacgcgcgcacgaccaccagacacgtcacgcatagcgcagcttctagacacaccatacgcagtatatatccgcagacgncgaccaacgacagagcgtaatctctcgtactactacgtgcgcatcatattactctatacgcgnan

SEQ ID NO: 3608 - DNA, 1955 bp, Glycine max
  misc_feature (118)..(118): n is a, c, g, or t
  misc_feature (135)..(135): n is a, c, g, or t
  misc_feature (137)..(137): n is a, c, g, or t
  misc_feature (139)..(139): n is a, c, g, or t
  misc_feature (176)..(176): n is a, c, g, or t
  misc_feature (333)..(333): n is a, c, g, or t
  misc_feature (370)..(370): n is a, c, g, or t
  misc_feature (418)..(418): n is a, c, g, or t
  misc_feature (467)..(467): n is a, c, g, or t
  misc_feature (620)..(620): n is a, c, g, or t
  misc_feature (639)..(639): n is a, c, g, or t
  misc_feature (1048)..(1048): n is a, c, g, or t
  misc_feature (1213)..(1213): n is a, c, g, or t
  misc_feature (1285)..(1285): n is a, c, g, or t
  misc_feature (1407)..(1407): n is a, c, g, or t
  misc_feature (1685)..(1685): n is a, c, g, or t
  misc_feature (1879)..(1879): n is a, c, g, or t
  Peptide Sequence Number=SeqID_8192
  Probeset Number=SeqID_13387
tgcgagcgcgcgtcagtggcaggacagagataggtacgcagcgaagctgtggatgcgcatacgtagtgcggagcgcgtcgagcgtgcagacctgcacagcagacattagcacttacantaattataaacagaacntntncgcgatgccgcggcacgcagcgcgtgactgacgcgtngctataggtcctgatcgatacataacaaacaacatgtgggtgctgctggagcgaggtatcagactatctcgggtgcacgagtgtgtaggaaccatgcactgcgtcgcaccgtcgctacgactgctgagcatacctataccacagcgctacgggctcntggagtgccgccttcgccccactccccataatagacnacatgaacgtctcgtgcgcctacggcgagctctggctcgcggtagatnacacagacacaatactagatgcctcacagctcgccgatgagtcagcganatgcgcagtgacgtccagcacctagcgactggagatgtcgcgatatactcgatatggatcccgccaatctcaatatacacaagcacgcgtgtgcactctcatcgaccagataggatacagtggcgcgcggcgtagacgcggcgcgctaccatncacgcgttgtccataatanccgtaacaagacgtcttcctgcgcctgttgtcggccgcacgccgctctcctatctcgacctcagtacatctgcgcgttgcagcgcagatagcacctgcaccgagagaacacatagcagcctacgcgcggagctacgatacagatctgcggttaaagatgaagagatgaaattgtatcgtggtgagtctgcgcacagtctccgcgcagcctgacatacacacgctcgctagcctcgcgactatacacagaggcaagcgcggcgtgtggcgccactaacaaagccacgcggacgagcggcgcgcgcggcgtctcggccattacacggcatactggtgacgagcgctccgcaagctgtacaataacagcaccgcccgcaggagcgcgcgcagctgcgactgaaacaacaccnagacgcgcacaaacagcggagtgagcttatccgtcactcatcgacccgtcgatacacccacacgattcaagtacacctacgtacaccaccacgccaatatcacacagaaacgacaccaggccggccgaacggggagacgcgcggcgtcggctggtagagcagtcntttagagtcggtgcggagcgggagatataatactgcggtccacgagcgcacacgcagacgacgtgcgcgcgncaccatactcgcaccgtcgtagcgcggctcgtacgcagggcagaaaggagtgtgcagcacagagaacgacagcatcgccgtccgctgccgcagcgtcccagtgagccacgccactcgcgccntctctcccgcgctcgtccacgccggccacccgcggcgcgatgtgccacttccgcgaccggcgacgctcgcgtcccagcgtcgccggtgactggtggagcggcaggtggtcattcatatggtgagtggtaccacggttgtggcacctcaacacacaacacacacacgcacagactgcactgcggccaggacagagtgcatgaggtacatactatatcatatgtgtacgctgagagggagaaaacacagagtacagggtcacgagtaagcgtagaaggtntgcgccgaccatcgcctccacgaccaggcagatagtgagaagagtatgagtaccatcaccggagtaccacactcgacataggcacagcgaggaggcatgcacacagcatcagttggcataggagacaccgacacacgacgcactcactaccgtgtgtattattatctcttaagatgagagctatcgtacacacncgttgatcctcgcgcagaacggcggcgcctcggcgagggttgtgcccgccgtagcggcagtaagtatgatgaaaaa

SEQ ID NO: 3609 - DNA, 1582 bp, Glycine max
  misc_feature (19)..(19): n is a, c, g, or t
  misc_feature (33)..(33): n is a, c, g, or t
  misc_feature (36)..(37): n is a, c, g, or t
  misc_feature (41)..(42): n is a, c, g, or t
  misc_feature (47)..(48): n is a, c, g, or t
  misc_feature (58)..(58): n is a, c, g, or t
  misc_feature (61)..(61): n is a, c, g, or t
  misc_feature (64)..(64): n is a, c, g, or t
  misc_feature (81)..(81): n is a, c, g, or t
  misc_feature (89)..(89): n is a, c, g, or t
  misc_feature (127)..(127): n is a, c, g, or t
  misc_feature (155)..(155): n is a, c, g, or t
  misc_feature (171)..(171): n is a, c, g, or t
  misc_feature (396)..(396): n is a, c, g, or t
  misc_feature (547)..(547): n is a, c, g, or t
  misc_feature (677)..(677): n is a, c, g, or t
  misc_feature (680)..(680): n is a, c, g, or t
  misc_feature (727)..(727): n is a, c, g, or t
  misc_feature (754)..(754): n is a, c, g, or t
  misc_feature (759)..(759): n is a, c, g, or t
  misc_feature (1029)..(1029): n is a, c, g, or t
  misc_feature (1045)..(1045): n is a, c, g, or t
  misc_feature (1056)..(1056): n is a, c, g, or t
  misc_feature (1223)..(1223): n is a, c, g, or t
  misc_feature (1285)..(1285): n is a, c, g, or t
  misc_feature (1287)..(1287): n is a, c, g, or t
  misc_feature (1313)..(1313): n is a, c, g, or t
  misc_feature (1419)..(1419): n is a, c, g, or t
  misc_feature (1547)..(1547): n is a, c, g, or t
  misc_feature (1582)..(1582): n is a, c, g, or t
  Probeset Number=SeqID_13388
tggtgttgattgtgtgcanggctatactccctnttnntttnngttgnntatgtgcgcnagncanccacagcccccaaaccncggcgtanacgtcgacaccatatattagatatatagagtgacgatnatgatatcataatataggtctgaataantctaagatgtagaganaatatatagagtagtgatgattatctatttctataatataaaatcagagaatataggccacacacatcgacatgaccaacgagctatgtgttgtatgtgtctgcgatggcgtaatattatatgttatcgactattctatcactgcactatcatacgaaagacacagcagagcagacataacccgttagcgtgaggaaccctaccgccgactgtcgcgcgtcgccntcactatccgctcgctcgtacgctataacgagactacgatagaagacagaacttgatcacaatcactctttgctgattctccccagctccatgccttcatgtagctcgaggggatgctatcaagtgcgaaggctcgatacatcgtgactantgagagcatcctctaccgatctcgtcagccaaccgattagtcggcgcagaggcgataccgcgcagacagatatacagctaatattaatgatatagaacacattatactaataaaaatcaaacacgcaggnctntatgcgctctgatgcgtctcgcagggacgctgttacgctatctctcntatacagtgacgcggccagatctcgancgcangtagatagcatgagcagacgtcgatgacactgcgcgacactcacattctatcatacatgtctactctctgttctctacgcatgctcgtcgctacggcgagtgagcacgcacgctccagtgcgctcgctccgcgcgtccgctgcacaacacacgcacatatctagcatgcactaagactcaccgcacataccacagtgagagacgatgagtaggagagagtgtcaacgctggagtgcgcatagattcagatgtgatagatagatatatatnatagagagagggaagngagaacagtgntgctatccgcagacatctactcacttgatacagacgcacacgtgtacagcagtacgaccgtgactcgcacccacatacttatgtgtgagctggtgtacgacacaccacacacacgagcacatcaagatatcacgataagtactagggaatcggcagtactccacgcntgtgagagaaaatagctaatcatatcgagagcatgctagcactcgctcggcgcaccatatgnanacgcgacgcatgaacccgtgactcanactgtatatctgcatacggctaagtgtatgacacgtcacactgtgacactcagaccgttgcactgcacgtggtatgggcactgtcattcgatcgtctgtcagatanagacgactccatatcaacatacacgtcatactctaaaaaaatacatatgcacacagtacgtagtagctcatcactgcgttcatagacgtcaacacagaagtccgatgatatattgatcactgcagtanctacaacgagagtggcgtagctctgctggtagacn

SEQ ID NO: 3610 - DNA, 237 bp, Glycine max
  Peptide Sequence Number=SeqID_8193
  Probeset Number=SeqID_13389
ttattccaactgtaggatagcatttgcatgtttccgaagtcaactcatgaaacatttgcaaataagctttatcaaacatttaagaatcacaagcgctttattaagccaaaactgtctcgaacagatttcacaattgctcattatgctggggaggtacgactaatctcatagcattagctgctgcttaaatgcgatatctttgcttattcaaatttaccctcctaaatctgcaggcat

SEQ ID NO: 3611 - DNA, 1405 bp, Glycine max
  misc_feature (1)..(3): n is a, c, g, or t
  misc_feature (8)..(8): n is a, c, g, or t
  misc_feature (21)..(25): n is a, c, g, or t
  misc_feature (33)..(33): n is a, c, g, or t
  misc_feature (879)..(879): n is a, c, g, or t
  misc_feature (1222)..(1222): n is a, c, g, or t
  misc_feature (1248)..(1248): n is a, c, g, or t
  misc_feature (1356)..(1356): n is a, c, g, or t
  Peptide Sequence Number=SeqID_8194
  Probeset Number=SeqID_13390
nnnccccnccccccccaaccnnnnnccgccccncggccgccccccggccggcgcggcgaaaaagctggcagctccaccggcgcgtggcgcgccgcctcctcgaactagctggcatcccgccggcactggcaggcaattcgacacgcaccacccctcaccccacaaatcccgctcaatgcaacaaaacgcatcgcccggctgagcacacggcacacggaacacgaaaaacagcacgcctgacgggcccgatctatcctatgactctctgcctaccaaactgccgaagccccacggcaccccagaccccgtgacacaggcctcacacccctcacagacgggggcacgacgcccgcaccggtacgaggggcgggggaggggcgggcgaacgcgagtgggggacgggggagaggtagagaggcagaggagaagcgagcagcgggttattgatttctcactacctccttattgcacgtttgataatctttcctttcaataccactgttggatatgtcttgcacatgtatcgtgaaacgacaccttcggcccccggacgcgtggccctccccgtggcggcttatacagcgtctagtaataactagagtaaacggcccggcacacgcatcatttgataatatggttgatgggtcacgccgccgattacgccccggccgactcagtggagccgccgcgggcagcgtgagatggaaaggagaacgagaaaatgacgcatagctgataaactatttgtcgctcgcgcgtgcggcccgcacgcgctcgcaagtcgctcccagacgcggtattagttagtcggggccggaagggtaagcaagtcgtctcggcagtactaacagcgggagaagggaggtgcatgaggaggtnatgaagagatcaagcgggaacaagttgtcaacctaccacatacactggcgcactcgcgatccttcatgtctccacctaccgcagcggcgcgccgcggcattgccccgacctcgcacagataaatcgtcgatgaatggtcgccgcaccgccttctccttctcgtaccgggcagcgctcgtgtcttatggacccgaggacgtactgccggagccgccgagtcgacgcacccggatactgaggacagcgacacaagaagtaggagagaagacacaaaacaagagagagtccattagagatacggctcgtgacgagcgacccgcgggaggatcacccgaccatagangcactcgtcacgtatagagaagctanatggaacagtatgatgtgaagtaaaacagagaactcatagtaaatgaagaatgtataccgtccgctcatcgatcgtcgtcgcacgataactcgcttgtatgagacgangtctgttggacggagagttgggagtgtatcgacagacgatgtgtgataa

SEQ ID NO: 3612 - DNA, 771 bp, Glycine max
  misc_feature (1)..(1): n is a, c, g, or t
  Probeset Number=SeqID_13391
nacaacaagaagttcttctctccgccgcgaggagggtggtgtcctccggaggtgatcaaagacactgacgacggcggcagcagctaattcattattcttgtggcagcagcaccggcataatagttggcggcctcgttcttggtggaggaggtattattgtgggcctcctcttgtaggtggtagtaatccctccgcaggcgagaagtacagcaacctcttccaccacgtcatcatcatcatcttcagcggtggaggaatactttctaatacggcggcgtattcctcatcatactccttacgtggcggcagccgcctctgcggcggccgttgttgaacaattagtagtaaagaaggtggtcatcatagtgggaggagcatcgatcatcatcatcatcctcggcgccaccattgttagtgcaacaacaacagcaggtggggggggcgcaaccaccatcctacaaataacaactaaaaaggactagggggggggagaccaccgtcgttcctcctcctcgttgttagtattaggaggacagctgcaacttcaacgacgagaaaatagtcggcattttcatcaggaagagttgttttttcaacacggaagaataatcagcagtattacgacaataataataggtgaagaaaaatacttcagctagtttttttttttcaaccagcacggcatcttggtcagcatcttattaaaaaaatcaacaataattttttttgtttcctccaaaaaaaaaaaaaaagaaaaaaaaaaaaaaaaaa

SEQ ID NO: 3613 - DNA, 619 bp, Glycine max
  misc_feature (601)..(619): n is a, c, g, or t
  Peptide Sequence Number=SeqID_8195
  Probeset Number=SeqID_13392
ggcacgaggtttttctctgtcttcgccacttctcttcgcgtccgcttcttacttcactgcacgtttttcttcactctttctctctcttacatgccggaatttcctctctcttctctcccggagaatagaataaaaaccctaaaccttcgctttgctgccacacacatcagatctacactacaacttccaagttcaagaattatgtgtcactagcgatgtccgattccgatcccaaaacgagaccccgtccggggccgtggccgccggcgcccggacgccaaggcaatgccgcctgcttcctgggctaagaaaacgggcttcaagcccaagttctccggcgaggccaatgccagcgactcgggccagataagcctgcagcccaagcccagggagcccgacacaaacgtggatctcgaagcgggtcggctccggcatccgcatggcccaccaagccttccaaggatcaggtcgtaaagaagcgaaaggactccgacggactgcccaagagctctggtcccatcacccaatgggccaggcggggaccggttccgccttcctagtaccaatggccaagccactgcggagcctccaccgccgccgnnnnnnnnnnnnnnnnnnn

SEQ ID NO: 3614 - DNA, 1451 bp, Glycine max
  misc_feature (1)..(1): n is a, c, g, or t
  misc_feature (51)..(51): n is a, c, g, or t
  misc_feature (108)..(108): n is a, c, g, or t
  misc_feature (114)..(114): n is a, c, g, or t
  misc_feature (118)..(118): n is a, c, g, or t
  misc_feature (134)..(134): n is a, c, g, or t
  misc_feature (293)..(293): n is a, c, g, or t
  misc_feature (315)..(315): n is a, c, g, or t
  misc_feature (419)..(419): n is a, c, g, or t
  misc_feature (432)..(432): n is a, c, g, or t
  misc_feature (493)..(493): n is a, c, g, or t
  misc_feature (497)..(497): n is a, c, g, or t
  Peptide Sequence Number=SeqID_8196
  Probeset Number=SeqID_13393
ntgtgcaatctagcgcgcaggcgtaggtgacaacacacaactccagcgctngtgatgatcgccatccgagagacacacgacgagtagagtgatcatgagtcgctgcangatagngtgncaatacaagtcacggncgaactggtacacatgacgagactctgtaagtaggcgttgtagtagcaatgtcgccagctaatgctgatattatggcaatgtctcatatcatctaccacgtctggtctggtgcacacgagcagacgttatttcgtactcttacccatgttcatgcagtncagttagtctagatcgggtgcnagtgcctccgctggttgtagacatagtctccagtaggagtgggacatagggcgcgagaaagtccaggagacatcatacatctctgttagtgtggtccttgtggncttatcgcgagtnaacactctcattcgtccgtcctcgtctaaccacagtgaactattgtcactgactcgacgtnacanagtcgcgtatccgtgagccaccaatgatctacaggcatgagacgacgtggcgtcgaatcgctgtctttgtgtaggtgacagacgacagatatattctgaataatatactgatgctgtaatagtgatattcatatacatatgctccgacgacgcgagatcgactcgtcttgagagagaagcggcaggtgacaacaactagtgacgcaagcggcagtaggggtcgacgcaacgtatgcatcaccgtagtgagagtgaggtgtcaccataaatgactagcctggcgggtgagtgttggccgtatcttctacgcaaactagatccgcgcgcgggcaagtttcgttgtatcggcgaggcatatcggcacatagagtcacctacaactcattacagcaccgacctgtcgatctgacgcactagtcacaacgctgctcgtgcagtgctgcggtagttaggtagctagtgaaggtctcgtaccacgcaacaacgtataatatgacctattcgctccaaacttgggtaatacaagagcgaatagtggggccagcttacaccgctgctttgtcagcgagtacctaggtacacaagagtagtcacagcgggggcttatagccctgtgactatcaaggatacagcaattagcgcggcatggagccacatctgctttactccgcgagtatgctttgagtaccagcgtagatactgagaacagggggcacgaaaggcactgtgaggcttatatcacacagtacaatcgttgtgtggctctaatgaccatgtctatctccgtcgtgtttctgccttcaaacaacacaaagaagaaaaaggacgtctgtagtggatgccacgaccgcacctggagagggagaggaccacccgctcgcaccatagagtggcgtgtatgtagtcgtggagggtgtgtgagagcgtccagagttactagctgcacctactact

SEQ ID NO: 3615 - DNA, 1641 bp, Glycine max
  misc_feature (5)..(5): n is a, c, g, or t
  misc_feature (7)..(7): n is a, c, g, or t
  misc_feature (33)..(33): n is a, c, g, or t
  misc_feature (44)..(44): n is a, c, g, or t
  misc_feature (56)..(56): n is a, c, g, or t
  misc_feature (63)..(63): n is a, c, g, or t
  misc_feature (98)..(98): n is a, c, g, or t
  misc_feature (104)..(104): n is a, c, g, or t
  misc_feature (112)..(112): n is a, c, g, or t
  misc_feature (114)..(114): n is a, c, g, or t
  misc_feature (124)..(124): n is a, c, g, or t
  misc_feature (127)..(127): n is a, c, g, or t
  misc_feature (130)..(130): n is a, c, g, or t
  misc_feature (141)..(141): n is a, c, g, or t
  misc_feature (167)..(169): n is a, c, g, or t
  misc_feature (174)..(174): n is a, c, g, or t
  misc_feature (182)..(183): n is a, c, g, or t
  misc_feature (210)..(210): n is a, c, g, or t
  misc_feature (212)..(213): n is a, c, g, or t
  misc_feature (217)..(217): n is a, c, g, or t
  misc_feature (225)..(225): n is a, c, g, or t
  misc_feature (231)..(231): n is a, c, g, or t
  misc_feature (243)..(243): n is a, c, g, or t
  misc_feature (251)..(252): n is a, c, g, or t
  misc_feature (255)..(255): n is a, c, g, or t
  misc_feature (264)..(264): n is a, c, g, or t
  misc_feature (270)..(270): n is a, c, g, or t
  misc_feature (275)..(276): n is a, c, g, or t
  misc_feature (283)..(284): n is a, c, g, or t
  misc_feature (291)..(291): n is a, c, g, or t
  misc_feature (293)..(293): n is a, c, g, or t
  misc_feature (298)..(298): n is a, c, g, or t
  misc_feature (307)..(307): n is a, c, g, or t
  misc_feature (311)..(311): n is a, c, g, or t
  misc_feature (318)..(319): n is a, c, g, or t
  misc_feature (323)..(323): n is a, c, g, or t
  misc_feature (336)..(336): n is a, c, g, or t
  misc_feature (347)..(347): n is a, c, g, or t
  misc_feature (351)..(351): n is a, c, g, or t
  misc_feature (356)..(357): n is a, c, g, or t
  misc_feature (360)..(360): n is a, c, g, or t
  misc_feature (365)..(365): n is a, c, g, or t
  misc_feature (367)..(369): n is a, c, g, or t
  misc_feature (389)..(390): n is a, c, g, or t
  misc_feature (394)..(394): n is a, c, g, or t
  misc_feature (397)..(397): n is a, c, g, or t
  misc_feature (399)..(399): n is a, c, g, or t
  misc_feature (402)..(402): n is a, c, g, or t
  misc_feature (405)..(405): n is a, c, g, or t
  misc_feature (409)..(409): n is a, c, g, or t
  misc_feature (411)..(411): n is a, c, g, or t
  misc_feature (414)..(414): n is a, c, g, or t
  misc_feature (422)..(422): n is a, c, g, or t
  misc_feature (424)..(424): n is a, c, g, or t
  misc_feature (426)..(427): n is a, c, g, or t
  misc_feature (451)..(451): n is a, c, g, or t
  misc_feature (471)..(471): n is a, c, g, or t
  misc_feature (479)..(479): n is a, c, g, or t
  misc_feature (488)..(488): n is a, c, g, or t
  misc_feature (490)..(490): n is a, c, g, or t
  misc_feature (498)..(498): n is a, c, g, or t
  misc_feature (514)..(514): n is a, c, g, or t
  misc_feature (516)..(516): n is a, c, g, or t
  misc_feature (524)..(524): n is a, c, g, or t
  misc_feature (532)..(532): n is a, c, g, or t
  misc_feature (544)..(544): n is a, c, g, or t
  misc_feature (546)..(547): n is a, c, g, or t
  misc_feature (549)..(550): n is a, c, g, or t
  misc_feature (558)..(559): n is a, c, g, or t
  misc_feature (562)..(562): n is a, c, g, or t
  misc_feature (569)..(569): n is a, c, g, or t
  misc_feature (571)..(571): n is a, c, g, or t
  misc_feature (599)..(599): n is a, c, g, or t
  misc_feature (615)..(616): n is a, c, g, or t
  misc_feature (633)..(633): n is a, c, g, or t
  misc_feature (643)..(643): n is a, c, g, or t
  misc_feature (653)..(653): n is a, c, g, or t
  misc_feature (661)..(661): n is a, c, g, or t
  misc_feature (722)..(722): n is a, c, g, or t
  misc_feature (728)..(728): n is a, c, g, or t
  misc_feature (772)..(773): n is a, c, g, or t
  misc_feature (790)..(790): n is a, c, g, or t
  misc_feature (805)..(805): n is a, c, g, or t
  misc_feature (892)..(892): n is a, c, g, or t
  misc_feature (922)..(922): n is a, c, g, or t
  misc_feature (1061)..(1061): n is a, c, g, or t
  misc_feature (1071)..(1071): n is a, c, g, or t
  misc_feature (1140)..(1140): n is a, c, g, or t
  misc_feature (1315)..(1315): n is a, c, g, or t
  misc_feature (1478)..(1478): n is a, c, g, or t
  misc_feature (1482)..(1482): n is a, c, g, or t
  misc_feature (1497)..(1497): n is a, c, g, or t
  misc_feature (1499)..(1501): n is a, c, g, or t
  misc_feature (1503)..(1510): n is a, c, g, or t
  misc_feature (1512)..(1512): n is a, c, g, or t
  misc_feature (1514)..(1514): n is a, c, g, or t
  misc_feature (1565)..(1565): n is a, c, g, or t
  misc_feature (1567)..(1567): n is a, c, g, or t
  misc_feature (1571)..(1572): n is a, c, g, or t
  misc_feature (1580)..(1580): n is a, c, g, or t
  misc_feature (1591)..(1591): n is a, c, g, or t
  misc_feature (1609)..(1609): n is a, c, g, or t
  misc_feature (1617)..(1617): n is a, c, g, or t
  misc_feature (1619)..(1619): n is a, c, g, or t
  misc_feature (1622)..(1622): n is a, c, g, or t
  misc_feature (1626)..(1629): n is a, c, g, or t
  misc_feature (1631)..(1631): n is a, c, g, or t
  misc_feature (1633)..(1634): n is a, c, g, or t
  Probeset Number=SeqID_13394
cagancnaggtagagcagtattctatcatctangcacatctcancctcgttacgangaaggtntgcttccgcgcggtcgacacgctcatctatcaccncacatncattcccncntacgcgaaantgnctnctcgacagagngctgagcagatgtcgattccacactnnngtctnatactatnncgcgtgtcctgagcgcggcgcgtgggngnncgtncagcgggngcgctncccgcttggcangcacagannagnacgagcgcncggtgngtgcnncggcgcnntagtcangncgacnagttgttgngttnacgatgnngcgngcggggcagtgtnggcggcacgtnccgncgtgnntgnctctntnnntgacggtggacgtggggagnnacancancnagntgntgtngntgncagctagnangnntggtcacaccacctctctcccgcngttggcggcgacacaggggntgttgtanggaacatgngngcatggtnccttcgcgtcacccgntnctcgatgntttcttanctgctgtcccgncnngnnggagtcgnngantaaggcntngaccaccacgcctactcaccacactcanaccccaccacctcccnnctcacacccgatcgccncactcacacnacgtctctcnccctcacngtgggtggcatccctacgcgccgaaattctcgaggtctagtctatagagagagggtgtcgngtgtcngggtggggggggcaacagcgcatccgtggactattgttatgagnntacagtcggtgctcggnctctatatcatcacnactccgtagtagatatattgctcaccgccgcgcagacacggagcggcgagaaccgtacgtctagcttcctctcacgtgtgggccggnactcgatataccacgatagatcactgcctnaatggcccccaactccgagctgtagttcgaacactaccacacggatgttctcatcggtgatcgcacctatactctaacatccctagtagtaggcgcggcgcgctcgctctcccgcgacgtgctcctttgctcgaggagngagagagagngtgataaataggatgccatggtgcgtcctcgcagacatggaggaagctaatcatactacgacacgcagnccctcgtagcgctacctcatactaccctatctagcagcgcctacaggtacacgacgattctgcggcatccccgccagacgcctcaagcacacacacactaacgcactccatcgcggctgcggcactagtgtttagacactcttcacgcttctgacttgtaaaggtaagtgtcgantatcaggggctgacacgcgtgctcctcgccgttgataatcacatcctccctaccgcgacccgccagcgggagagagcataccactaccatattcttaacataggaggcgggggcgcaccatcccgtgcaccataagatgtagatatcccacaccctactcttnattnaggagtgggggagangnnncnnnnnnnntntntaataactcacaaccacaccacctcttgctgttgggcgtcaacgcctcgtnanctcnnttcgctcncaacataactncaccataggtgtgctatntctcaatntntanttcnnnntntnnactcctc

SEQ ID NO: 3616 - DNA, 1547 bp, Glycine max
  misc_feature (1128)..(1128): n is a, c, g, or t
  misc_feature (1299)..(1299): n is a, c, g, or t
  misc_feature (1346)..(1346): n is a, c, g, or t
  misc_feature (1353)..(1353): n is a, c, g, or t
  misc_feature (1405)..(1405): n is a, c, g, or t
  misc_feature (1409)..(1409): n is a, c, g, or t
  Peptide Sequence Number=SeqID_8197
  Probeset Number=SeqID_13395
ctgtgcgcggccgcgtcgatgttccaaatagcatcactcttctttccttttcttctcctcttctgtcactggtttaccgtggttcatccccttcgaaggcagggtatgagagagacccaccccctccgcccaaggatacatggagttgcgtcgtcgacctccagcagactcggacggcatattatttcctttactacggtcccacgcactaggcaccatacgattatctctttgtgtcaaaaaggtatcggcactactccacctataatcacccgagggccctcactcatcttctctcagccagtgcacaataattagacacgtaccatctctgctctcgtcacgccgctgcatacttccgtggctagacgtatgataccgtctccatctgttagcatggctctcatcctgatgacgcatacagtcatgtgtagatgctcgcagcgaccgatgaagatcgcatcgagctcgcatagtaaatatcacttacagtgtgtgtagataaatatgagaagaatcctcgctggagttctagaactcaggtaatacttatattgagccttgcagcatcttgtcatatgttggcggacagtattatgacgacatatatgcccgcgcgccacgggtcttgcgcatcgttctgtccacacttcacatagctatcgcagcctctacgctcagagtaccgcacaggcacacttttgccttaatctcaggcacgcccgatcgacaacaacatgactaggtggcgttcgcattgtgcaccgcacgtgtctgcgtcgtactagcgttcctacgcgtattatcacagagtcctatcttatctcaatatagctctatctacgattcgcaccactatagactggatgttgtaatattataccagccaggatgtaactatcagacgagatctatttaggagtacaatcagagtactgcaccaacggccaattatgtatataacgtgaagctcttgcattctctaccatactctccgtatcgctggatttatgctctaaacatgatctgatccatgcatgcgatcgtgtatactgctcacccaccgctctcacacttcctccataccaatctcactacatattgattatactctccactggctcaccncacacactcttatagtatatcctgaatgctggaccgactcgtacctgagacgacagcgccgagcacgttgttcggatgtatatgtcgacgcgatcattagagctacgatgcatctaacgctacgccacgacgagcttcgatctctcgctctatcgtgtgacctacgtcgtngtgtgtcctgtctgatggcgcgggtgtgtcatagagagtgcaccatnctacatnatatcacgatgcgtatacggtgtgcatcacattacgtactacctctgttcanacgngataccagtcgctcgtactctactggatcacacgctactcattgctaactctggtggcagtataatctgctcactgtcacgatgattatcgagcacgaactatactgtcatcaactctcgcgtcagcgagagatgtag

SEQ ID NO: 3617 - DNA, 377 bp, Glycine max
  Probeset Number=SeqID_13396
ctcttcgtttagcttcgctcatccccagctgcatatcgcacgacttcaagatgccgtcccacaagtcgtttatgataaagaagaagctggccaaaaagatgaggcaaaacaggcctatccctcactggattcgtcttcgtaccgacaacactatcaggtacaatgccaagcgcaggcactggcgcagaaccaagctcggattctaagtggaagctcaagactgtttgtcttctgttcgatttagcatttccccgaatcttcttgatttttgttataaacattttcacatatcttgtaagacttttgatgttaccagattttatctttataagagctacgtattagcgcttgcagtttaaaaaaaaaaaaaaaaaagc

SEQ ID NO: 3618 - DNA, 589 bp, Glycine max
  Peptide Sequence Number=SeqID_8198
  Probeset Number=SeqID_13397
ttttttttttttttttttcttttttttttttttttttttttttttttttttttttttttttttttttttttttttttttttttgggagcaagggactttgatttttccaaaaaagttaaagcaatggaatttttggccgccccctatagcttttacaagttagccctcaacaggggtcgaattttggctctaagcccaaaaaaaaaaacagttatttcagggggttgaaaatgggcccttggattaaaaaaacccccaaaaacctccctaataaaacggccaaattccccacttaataatgaattttccaaattcaaaattatccccccctcccccagctctgtttctctttcaacaagaaaattggccttaagccttaaacttctgcttctggttcgaagcctatggtcatcatcaaaagaactataatcttcattaaaatggggaaaaaggctatgctcatgggccgacaaaatatcatccctatgtccttgtttggaaaaagggtgctcctcctccgaggaggagctttcttttttatgaaaaagatgccttgaacgaaaatgttcctcatccaaggagcttttgg

SEQ ID NO: 3619 - DNA, 1422 bp, Glycine max
  misc_feature (104)..(104): n is a, c, g, or t
  misc_feature (112)..(112): n is a, c, g, or t
  misc_feature (116)..(116): n is a, c, g, or t
  misc_feature (988)..(988): n is a, c, g, or t
  Probeset Number=SeqID_13398
tttttttctttttctttgttctttcgtgtgttatgggtgaggcagtggcgacgcggggaagggtggagagtggcataggggggtgggggggagggacaataaancaaaaaanaggnagactgcaaagaggtgggggagagggggggctccctccgtggggaggtgagagggagggggaggcgccccccacccagtccgggtgtatatgagattatctgtactgcaagacagtcctctaatttatgtgtgaggaatgaagtttggggtgtacatgcacataagtagacatacgagatagcttgggatgcagaggccggcgagattgtggagaggtggaggtgctaataagatacgagatactagatgcaggtagtaggatagggggaagaagagaagggtattcctctagacactaagtcatagaattagtagaatagagatataacactagtaagaacctagattaatgacacgttagggttgttgttcacagagggatagtgatgggttgctaagacgtgacatacactagaagggagtggacgcttcgcgggcgagtcctgcgggtgtgggaggggtagggtttttctcatcgtggagtaagaagtcccgttgtaggcgtgctgcgaatgataggatgcgcgagagagtggccacagtgaatgcgtctcaagaggtagagggtgggagtgtgggttcgcagttgcgtgagtagagtggagtagagagggaggagtagcggtaggacgtagataggatgattgagcgagattcggctagtgatgactctaaagacagatcattgggatgaagagagtactgtatgtatgttgcggagagcactcactatgtgtatctggtgcgacagatggtctcatcagcgtgcgagatgtgtagcggtatatgttatcctgggcgttaatgatacgcaggtgtgtatggcgcgcggcacgaagatgacagcattcggtaagatactggagcgaanatcgcgccgtcgcggcttctaacatcttatccaccaacatgcgtggacagaggagaatacagcaggtagttatagactgatggcatgagtaagtaacagaactcacacgaatatgagtgagtgtgttcttctgacagacgaggtgtgtggtggtgccaggataagtggtgttgtttgtatctgtgtatgctgcttatctggatgcgagcgggtgcgcgtgtatgagaacacgtgttgaggtgtgagaagtcgcggagacctatttctaatctacagcactcagcgcagagacgtaatagtgatgtgattatagcggccgccacgcgcgtgcggacatctatttgtgtgctgtgatgcgtgttagggtacgagggagtatgtaacgctggatgtgtcgtcatggtatgagcgtacgaagtgtgctcggcgagagg

SEQ ID NO: 3620 - DNA, 1685 bp, Glycine max
  misc_feature (1060)..(1060): n is a, c, g, or t
  misc_feature (1255)..(1255): n is a, c, g, or t
  misc_feature (1260)..(1260): n is a, c, g, or t
  misc_feature (1276)..(1276): n is a, c, g, or t
  misc_feature (1312)..(1312): n is a, c, g, or t
  misc_feature (1340)..(1340): n is a, c, g, or t
  misc_feature (1348)..(1348): n is a, c, g, or t
  misc_feature (1422)..(1422): n is a, c, g, or t
  misc_feature (1442)..(1442): n is a, c, g, or t
  misc_feature (1496)..(1496): n is a, c, g, or t
  misc_feature (1519)..(1519): n is a, c, g, or t
  misc_feature (1576)..(1576): n is a, c, g, or t
  misc_feature (1586)..(1586): n is a, c, g, or t
  misc_feature (1592)..(1592): n is a, c, g, or t
  misc_feature (1664)..(1664): n is a, c, g, or t
  misc_feature (1678)..(1678): n is a, c, g, or t
  misc_feature (1685)..(1685): n is a, c, g, or t
  Peptide Sequence Number=SeqID_8199
  Probeset Number=SeqID_13399
tatcgtacactcaactcgctctcaccatatcctccacccagcctaacgaagagccattcggctcgaataaggtggtggctctctacgggcggcgggttgtggccggcctctcataaactacaagagaattactccgggcgctgctggggcgaagactccctccaggttcgatacgcaatcaccactcagagaccacagtgtataacgcagtccctcgttagcatagcccatttgttttctcccccactatattctagaaacgcaccactgccccgccgtcgtatcgcgcgcttacaatagaggactgatgagcaagtcaagactcgtgtagttcccacctctagcgagcgagtactagaacctacagtacccagctaggcgtggctggtcagtagggaggcgctgcgtaacttaggtctggtctgatgagttctaagttcaatcaaggcttgagtttattcatgctgcaaatacacgagcgagaggcctatacatcagcctcatggaagcgcacacagatagtatggatacaaacaaactcaggcctcacactcctcgtctactttaaactagttgcgcccacacgggtggtgccagccaaccgtacatctttctcgcgttatcttgtggactgctgcttcatagcgtaatgtagctagtataggactccatgtatgagctgcggacgccaacttatccttttgacactcatgtgtatcatcgtccttacatttcagccgctagctgtattctcattaccacgccttgaatgtcttatggaagcgagtgagcgtctcagaggtgctctgaggataaacatcgtatggcagcacacagactcagtcgcggtggtctaagcgagtgttatgtcacgcgcattccatcccacggttgtgataactcgtcgctcactgcgcacgcacacgccagaccgtgcacacactggctctctagcgagcatctgacgtcttgtctcgatctacaccatttcgagcattctagccattcagattacacatgtatgccttctgatgtctgtcggcattagacacggcagcanaggactacggtcatgactcactgctaaccgtgcacgctatgtatacgccaacagcgatgtacgccacacgagagagacgcgtgtgaacgatacgccatagcgatctcatgaggtgtacacagagtgagtctgaccgcgactccatgtaacgactcgctgtgtcgggcgtgtgcagaagagcggtgcgcgaactgncgcgncacaacgaggacactnacctactgtcgcagtgtcactcctgatcgatacagnacatcgtgctcgtctcatcacagaccgntccccgtncatgcccatcgacgctcacgtgtaagtatcactccctcgagccacgacgatgcgtatgcacacagtaatctacntcagctgctcctgctgcacnacgtgcagtcgtacgctcgtagcgaagttctagtgtattcatactgttataacntcgcactagcaaatatactactnagcatcagctataccatggcggactatcgacggtgcaatgagcagtagcagatactngatgcttgcncgtgcngcgctcgagagcgtcgatcatagtaattacgatgatacgtcagtcacactaacatcggctatctcatgtctnatgtcatctctgcncgtaggn

SEQ ID NO: 3621 - DNA, 908 bp, Glycine max
  Probeset Number=SeqID_13400
gaatatttgagttatttagttttaatttagacaaatgtctttcagtgattatcaagatcgtttaggaagatcaatacgagtattaaatcttccagaaggctatgacaaagaagatattttgaacaaccttaaaaatgcaggcactatcgatgatattaaacttggaacaactaaaatgatagtcacatattctaattctaatgaaaaagatttaagtaagatgtacgatggttgtccagtaggtgattacgtcataaagttggaggatacagaaaactttgaagttaataccatccaaaatattgaagaccaagagaagattgaagatcaaaataaaagcgctcaaaatcaagtagaagaaattgaagagatccaaagaactgaaaaggttgtagaacccttttctgctcctcagaatgagaatattttgaatgacataaaaagtgaaacagagcagcctgcagtaccaagatatgaagaaccacaatctacaccaatttctgcaacaataacaaactttaaagatcatgagaaaaaggtggaaacatcatcaaatcacacaacacaagctgattatcaagaaatagctcaagcaaaatcaagtgatggtacaaaagaacttctcaaagaattgcaaaccacaaatctgccagctcgagttggattaccaccaactgatttattcaatgtggtagcaaatagaaattatttattaatgtttacactgatttggggtttacagctattcttaagatctatattttaaagaaaccttataagattcataaaagcagtgaaatttcattgagttcgcttttaattcttaagaaagtgagttaagaagtatattacgagtaatatcaagttatataaagattttgatgataatctgattatgacaaattctg

SEQ ID NO: 3622 - DNA, 525 bp, Glycine max
  misc_feature (259)..(259): n is a, c, g, or t
  misc_feature (428)..(428): n is a, c, g, or t
  misc_feature (474)..(474): n is a, c, g, or t
  misc_feature (479)..(479): n is a, c, g, or t
  misc_feature (512)..(512): n is a, c, g, or t
  misc_feature (520)..(520): n is a, c, g, or t
  Peptide Sequence Number=SeqID_8200
  Probeset Number=SeqID_13401
ttttttttttttttttcttttcattcatatgttcgtttaatctttcattttcaccaacaagatagttgaccttgttttcatagttgttagagcttctcttggtcttttcgacttctctgttcaaattagcattcctgccttcaatttcagcatgcttatttctccattgttcagcttctcttcttctttcttcgatttctctggaaagtctttccttttcagtcaagagtaaagcaagcttagcttgagcatcaccaanatccttctgcattctttctaattcagcacatcttgatctcaatccatcaagagctctatccttatccacaataatgtcatttaatctttcattttcatcgatgaggatcttgaccttttcttggaggactctaacagtattgttaagttcttccaattcggcacatctnttgaacaaagcttctctttctctgctcatttcactgatgatgttgntcagnctttggttttcatcaccaagcttgccgaatctntttttaanatcct

SEQ ID NO: 3623 - DNA, 567 bp, Glycine max
  Probeset Number=SeqID_13402
tttacgtgtctgctgagtttgttttttataatctgagagataatagaatagaccgaattcaagattttgattcctacaagttttcatttctctctcatgattatgttccaagcttggttttgccatataaaaattaaggggatcattgctggcctgggaatttggggttccatgtgagtttcttcatttctgtttgagacatcagcaatgacatctccctcatcacacaaccttttgtgtgttttcattgttatgctgctattatcgtccaagttaggtttcgccatagaaaaattaaggtactgcgcattggtcgttttcgctgggtcttaaatcatgtaagtgacatgaaggctaaaatggtgctgatcggaacggcttgctctcgtcaggggatgattccccgcctgggatttggggttctaagaggtggtctgcatttctgtttccgactcctgctatggcagctcccccttctctctcccccgttgtgcgttttccccaatgtactaataaaaaaaagagtcttgccatttactatatggacaagacagggcatgaataact

SEQ ID NO: 3624 - DNA, 665 bp, Glycine max
  Peptide Sequence Number=SeqID_8201
  Probeset Number=SeqID_13403
caccccctttgtttctttttataaaaaccgctttttgtcggggggggggaaaattccaaatcttttttcctgtaattttaaaaatttttttattccacaatttaaatgaccctaatgcgtatttttttaagttgtccgttttgggtttcctcaaaatttaagccgatttttccatcccccctgtttcgactaaaaaaaggaccggggccccaaccccctttgaacaaaagtttttttttttatcccccaattttttttttttttccaacctgatttttacttcccccctgttaggacaaaaaattggtcctccccccccgttgccttttaacaaaagtttctttttttttccccgaattttctattttccccccccatgtaagggacttttttctaaattccaaaaatattctttttacaaaaaaaagattccttcctccatttttttacaatgtatgggggggaaaacaaaattatagaaatagaagtttgattcaatttcatacatccccaaaggaatcaaacttcaattgtaaaaaaaaattttttcatttcgtatattccaaagaaaattttttaatttcccttaaaaaaaaaaaaaaaaaaaaaaaaaaaaaaaaaaaaaaaaaaaaaaaaaaaaaaaaaagaaaaaaaaaaaaaaaaaa

SEQ ID NO: 3625 - DNA, 1830 bp, Glycine max
  misc_feature (20)..(31): n is a, c, g, or t
  misc_feature (33)..(34): n is a, c, g, or t
  misc_feature (36)..(38): n is a, c, g, or t
  misc_feature (41)..(41): n is a, c, g, or t
  misc_feature (43)..(43): n is a, c, g, or t
  misc_feature (45)..(46): n is a, c, g, or t
  misc_feature (52)..(52): n is a, c, g, or t
  misc_feature (55)..(55): n is a, c, g, or t
  misc_feature (59)..(59): n is a, c, g, or t
  misc_feature (63)..(63): n is a, c, g, or t
  misc_feature (65)..(65): n is a, c, g, or t
  misc_feature (67)..(68): n is a, c, g, or t
  misc_feature (70)..(70): n is a, c, g, or t
  misc_feature (72)..(75): n is a, c, g, or t
  misc_feature (78)..(79): n is a, c, g, or t
  misc_feature (88)..(88): n is a, c, g, or t
  misc_feature (100)..(100): n is a, c, g, or t
  misc_feature (102)..(102): n is a, c, g, or t
  misc_feature (104)..(104): n is a, c, g, or t
  misc_feature (111)..(111): n is a, c, g, or t
  misc_feature (136)..(136): n is a, c, g, or t
  misc_feature (210)..(210): n is a, c, g, or t
  misc_feature (218)..(218): n is a, c, g, or t
  misc_feature (247)..(247): n is a, c, g, or t
  misc_feature (271)..(271): n is a, c, g, or t
  misc_feature (291)..(291): n is a, c, g, or t
  misc_feature (307)..(307): n is a, c, g, or t
  misc_feature (316)..(316): n is a, c, g, or t
  misc_feature (353)..(353): n is a, c, g, or t
  misc_feature (407)..(407): n is a, c, g, or t
  misc_feature (526)..(526): n is a, c, g, or t
  misc_feature (529)..(529): n is a, c, g, or t
  misc_feature (544)..(544): n is a, c, g, or t
  misc_feature (597)..(597): n is a, c, g, or t
  misc_feature (613)..(613): n is a, c, g, or t
  misc_feature (649)..(649): n is a, c, g, or t
  misc_feature (754)..(754): n is a, c, g, or t
  misc_feature (774)..(774): n is a, c, g, or t
  misc_feature (867)..(867): n is a, c, g, or t
  misc_feature (933)..(933): n is a, c, g, or t
  misc_feature (935)..(935): n is a, c, g, or t
  misc_feature (950)..(951): n is a, c, g, or t
  misc_feature (953)..(953): n is a, c, g, or t
  misc_feature (1050)..(1050): n is a, c, g, or t
  misc_feature (1064)..(1064): n is a, c, g, or t
  misc_feature (1105)..(1105): n is a, c, g, or t
  misc_feature (1183)..(1183): n is a, c, g, or t
  misc_feature (1188)..(1188): n is a, c, g, or t
  misc_feature (1358)..(1358): n is a, c, g, or t
  misc_feature (1389)..(1389): n is a, c, g, or t
  misc_feature (1400)..(1400): n is a, c, g, or t
  misc_feature (1406)..(1406): n is a, c, g, or t
  misc_feature (1411)..(1411): n is a, c, g, or t
  misc_feature (1419)..(1419): n is a, c, g, or t
  misc_feature (1421)..(1421): n is a, c, g, or t
  misc_feature (1428)..(1428): n is a, c, g, or t
  misc_feature (1455)..(1455): n is a, c, g, or t
  misc_feature (1476)..(1476): n is a, c, g, or t
  misc_feature (1520)..(1520): n is a, c, g, or t
  misc_feature (1536)..(1536): n is a, c, g, or t
  misc_feature (1547)..(1547): n is a, c, g, or t
  misc_feature (1568)..(1568): n is a, c, g, or t
  misc_feature (1570)..(1570): n is a, c, g, or t
  misc_feature (1641)..(1641): n is a, c, g, or t
  misc_feature (1696)..(1696): n is a, c, g, or t
  misc_feature (1700)..(1700): n is a, c, g, or t
  misc_feature (1721)..(1721): n is a, c, g, or t
  misc_feature (1725)..(1725): n is a, c, g, or t
  misc_feature (1727)..(1727): n is a, c, g, or t
  misc_feature (1729)..(1729): n is a, c, g, or t
  misc_feature (1758)..(1758): n is a, c, g, or t
  misc_feature (1821)..(1821): n is a, c, g, or t
  misc_feature (1830)..(1830): n is a, c, g, or t
  Peptide Sequence Number=SeqID_8202
  Probeset Number=SeqID_13404
ttggggtgtgttggtttgtnnnnnnnnnnnntnntnnnccntntnntgcccnacncgcnccgnangnnanannnnggnngggtattcntttggtgatcanananaacgaangccagaacaatgagggattatacgngtgaacaccctcccccctcctccagatcaacgacattaagatgtagaggagaggggctcgccgcccaacccacncacacaancctgtatatgtatagatctaacaatggcnagctgtatatatctcatcacctanaacaaacacatctacacacnctacatctaatcactnccccccacnctaatacacttccccactacgtggtgacagtggtcanaacaccctcccactcctcctgcactaccacaaactcaagacacgacaacagaanatataaacacatgacatcactctctgatacacaaattcgatagaacagtaagccgtagaaagagagagatctagaaatataatacgcattcaagatactaagtgattatccactctccngtntgtggttttactatncacgcctactcaaaatatgacattcgtcatactgcgtcgcggtggatgatatnggagtaactttcacantgacagttaacgaagagagcacagaccatgacggtnagagatagatattcttgtaatgtaatacattcactatgcttcgctaacctctctaagatacgctatgctatatattaaatgaggaggagtgtaggggcgtgaggngctcgtagaaagtaagcgantatatactacaacatctacaaatctatattcttcaagtcaccatgagaacacgatatgtacatgtataatgtatacatctatctctattattnatctaattatagatgttgagtagatgcacagaactgtaagagataaataagtagtgtgttgtggananaaaacacacacccannancacaccacacacacacccagtatagtgagcgtgtgcatgtcgacagtcacgactctctgtgacgtgatggtgcgtgacccccagcgccgctaccacnagcctcatcacgantgttgatgtgctgagatgctaatacagctcacagcgcaaanagccaacacacacgtgcttatcgcacactgcgtgctgcatcgatacacatcgccattatgatcagctatatctcacanctcancccacatacagactgctgcaacgtacgtcatgtatacgttgatagacagcagataccatgcgaaccaatacactcagtcctcatatcatagcacccacgcatcaatgcggtcgcgctccgcgtgtctcagctgtgctcgacagacgacagatgacacagtacccgatcancatctgctgcagacactatactgctatctcnacatacacacncaacancacgnacctcgcntntcatganatcagcatagtacgaccgtgcgctgtncacactctatcctgtgactantctatcgtatatatgcatatgattctcatatgctcctgtgagcnatagttcccactatgncaatctcatantcggaaagcccacgatcagancncagcactgactatggcccgtgcgccagacgcagagctagtcagacgacgagtcactcgtagtagtacatantgtctactgcatgacttagagtatactacagtgatctgtgctagtccacactgcnacgntgctgacactgcgtacaacancatnanancacgacatactgatctgcacatgtactgnattatgtgatcgctcatctgcacatcgactatagcgtcgggacgtgcgagattgcgcggtgantgtgatctn

SEQ ID NO: 3626 - DNA, 667 bp, Glycine max
  misc_feature (1)..(24): n is a, c, g, or t
  misc_feature (625)..(667): n is a, c, g, or t
  Probeset Number=SeqID_13405
nnnnnnnnnnnnnnnnnnnnnnnnttcctaggaacttcctaatggaaaattcgttctaaagtatccaatgcttttatacgtgtattttgaagcttctttccggtactagttgttgcttcctatcttctattcttctgcatcatacctacaaattttatgctttggaggtgctcaaaggtcatcgacgccgcctggctgacatcctaatcagtgggaccgaggagttcaaagataagggggcacaacatgcaaatgagtcacggcggcaagcaggcgaatcagcaatggaaactagtggcaaaacgtccattggtgatgaagactactggtgcaatgagaacctagctcaagacaatgggcctgcttgcttcctagcaagcaacacggctgcttcgttaagcttcacggagcaaacatgtagcaagtagtaggtattttttgcttggaaacaggaaatgacatgcctgcttgtaaatgttcacgaaagtgaacgaacatgaagctagtaggaagcatgtagcaccaatggccagcttgaggggccgcattgtcacatcccgtacagaagcaagtaaggaaactagtgggagaatatccaatttgtaaggaacgattcgatgtaaannnnnnnnnnnnnnnnnnnnnnnnnnnnnnnnnnnnnnnnnnn

SEQ ID NO: 3627 - DNA, 508 bp, Glycine max
  Peptide Sequence Number=SeqID_8203
  Probeset Number=SeqID_13406
gtgtgtttcccggtggttaagttcgtgcgatcaaggaactggtctacgacgaaaaacctcacgtgcatagggctgtagctttttgtttgtgtgcacaaatccactttttgagatttgaaggcaaaagggcattgttcttacggtgatcatgataaaagggtcactttgtttgctctattagttagtgcccttgctttggcctttgctaaagtaagtaccttcctttcttcgcccaaaactgtttttagcatctaatcattaaccttcatcttccgtgctttcccaaaactgttcttagcatcatctaatcattaaccttcatcttactctaaaaaaaaaacgaagaaactttcttatacaaccccccctctctctccttttctctttaagagaccttttctcctcatctctgcttgctcctcttgtgaacaaaaaaagtggtgtctcccttgagagctacactcccacttttccacttgaaaaattttccaactttatccaacaagtg

SEQ ID NO: 3628 - DNA, 1703 bp, Glycine max
  misc_feature (17)..(17): n is a, c, g, or t
  misc_feature (20)..(22): n is a, c, g, or t
  misc_feature (28)..(28): n is a, c, g, or t
  misc_feature (30)..(32): n is a, c, g, or t
  misc_feature (34)..(34): n is a, c, g, or t
  misc_feature (46)..(46): n is a, c, g, or t
  misc_feature (90)..(90): n is a, c, g, or t
  misc_feature (154)..(154): n is a, c, g, or t
  misc_feature (211)..(211): n is a, c, g, or t
  misc_feature (215)..(215): n is a, c, g, or t
  misc_feature (248)..(248): n is a, c, g, or t
  misc_feature (287)..(287): n is a, c, g, or t
  misc_feature (294)..(294): n is a, c, g, or t
  misc_feature (342)..(342): n is a, c, g, or t
  misc_feature (482)..(482): n is a, c, g, or t
  misc_feature (484)..(484): n is a, c, g, or t
  misc_feature (489)..(489): n is a, c, g, or t
  misc_feature (495)..(495): n is a, c, g, or t
  misc_feature (511)..(511): n is a, c, g, or t
  misc_feature (517)..(517): n is a, c, g, or t
  misc_feature (523)..(523): n is a, c, g, or t
  misc_feature (666)..(666): n is a, c, g, or t
  misc_feature (675)..(675): n is a, c, g, or t
  misc_feature (757)..(757): n is a, c, g, or t
  misc_feature (761)..(761): n is a, c, g, or t
  misc_feature (813)..(813): n is a, c, g, or t
  misc_feature (821)..(821): n is a, c, g, or t
  misc_feature (825)..(825): n is a, c, g, or t
  misc_feature (842)..(843): n is a, c, g, or t
  misc_feature (858)..(858): n is a, c, g, or t
  misc_feature (860)..(860): n is a, c, g, or t
  misc_feature (885)..(885): n is a, c, g, or t
  misc_feature (966)..(966): n is a, c, g, or t
  misc_feature (970)..(970): n is a, c, g, or t
  misc_feature (974)..(974): n is a, c, g, or t
  misc_feature (1010)..(1010): n is a, c, g, or t
  misc_feature (1014)..(1014): n is a, c, g, or t
  misc_feature (1023)..(1023): n is a, c, g, or t
  misc_feature (1030)..(1030): n is a, c, g, or t
  misc_feature (1056)..(1056): n is a, c, g, or t
  misc_feature (1073)..(1073): n is a, c, g, or t
  misc_feature (1075)..(1075): n is a, c, g, or t
  misc_feature (1135)..(1135): n is a, c, g, or t
  misc_feature (1145)..(1145): n is a, c, g, or t
  misc_feature (1195)..(1195): n is a, c, g, or t
  misc_feature (1227)..(1227): n is a, c, g, or t
  misc_feature (1243)..(1243): n is a, c, g, or t
  misc_feature (1246)..(1246): n is a, c, g, or t
  misc_feature (1260)..(1260): n is a, c, g, or t
  misc_feature (1264)..(1264): n is a, c, g, or t
  misc_feature (1273)..(1273): n is a, c, g, or t
  misc_feature (1277)..(1277): n is a, c, g, or t
  misc_feature (1326)..(1326): n is a, c, g, or t
  misc_feature (1342)..(1344): n is a, c, g, or t
  misc_feature (1372)..(1372): n is a, c, g, or t
  misc_feature (1389)..(1389): n is a, c, g, or t
  misc_feature (1391)..(1391): n is a, c, g, or t
  misc_feature (1398)..(1398): n is a, c, g, or t
  misc_feature (1434)..(1434): n is a, c, g, or t
  misc_feature (1443)..(1443): n is a, c, g, or t
  misc_feature (1459)..(1459): n is a, c, g, or t
  misc_feature (1490)..(1490): n is a, c, g, or t
  misc_feature (1548)..(1548): n is a, c, g, or t
  misc_feature (1555)..(1555): n is a, c, g, or t
  misc_feature (1608)..(1608): n is a, c, g, or t
  misc_feature (1610)..(1610): n is a, c, g, or t
  misc_feature (1654)..(1654): n is a, c, g, or t
  misc_feature (1657)..(1657): n is a, c, g, or t
  misc_feature (1660)..(1660): n is a, c, g, or t
  misc_feature (1679)..(1679): n is a, c, g, or t
  misc_feature (1686)..(1686): n is a, c, g, or t
  misc_feature (1688)..(1688): n is a, c, g, or t
  misc_feature (1703)..(1703): n is a, c, g, or t
  Probeset Number=SeqID_13407
tgtgtgtgccccccccnccnnncaacancnnncntccttctacaanacaacaattaaagtatatccacctctccctaccaaggtgtgggnaagtaacaacagagggggagtgctctccgtctcggaggtgtgtgtgtgtgatcttcgtatgtanttctgtagtgcagagtccgccgctcctctgtgtgtgggttgagacctagtgaattcncccnttctctctcactctgtattcacgtcgctctctngcagctgcagagtcataccattacatgagccctaccgcntcagagntagataatgaatagagattaggcgtgagatataccacacccttactgntagagcccctcgcgtgactaagagcaaaagagccagagatactctgtcgtgtgcagctggactagggcggggagtgcgtacgtccccgtgtgtctagtatcgggtgacacacgtgtgccaccagacgagcgagagagcangnagcgncagcancaactacacgaagagnagaatngactcnctgttggagtacctatagacgtcatacaacagagatgacatagctcagagagaagggcaagactcgtaataagttctcgtcgtcagagtgagcggtctctgtcgtctctgggactagtggtcgcatgctgttagtagtgtgtntgcagctgnctaatgtgcatagagatagacgagaagtccacttagcctagtgacagacgatacattcgctcgtgaccaccactctcacgcnactntatcatagtaaatatatggccgtctacaactaacacactatagggatatgtntcgttgcncgcntgttgtggtgaggtatnnatgtcgtatatgggncnacacggcatcaggccgcatcgcctngccgcctctcagtcgacctcactctctcaccagtcgagtgatagagttgcggtcgttcgcttaccctcctacactgcaacnagcngcgncataactgcgatgagtgcagctatgcacgagggggncgcngcgagtctncagtgancaatactataactagcaggcgtctgngtgtgtattctagcggncngagtcgtgcgctctacgtagtatagttgaccggatgtgtatagataacgcatatctcatnatagacccanatgacgccactgcgacgtaacgcgtgtagagtagccgcgagtcacggcangacaggatcagacactcaccctcgtcctcatntcctcgccctcgacgngcnggagagtgtgaaanaganagagcaganctcncagactccagtctcacgcgcgtcgtgggaagatcactcccgagccggangtgcgtgatgtatgannngctgtatagaagtgagtgcgcgtctcgngtgatgactggggcggnancgcgtgnacgtgggcaacgagaggagagctatcagatgttgcngctcgtgtntgctcgtctccactcnccgcgcctgcatcagagctatctaccagagngacgctatagagcacacgactcggcactcatacgcgatagtccacctacgatcactcncactgcnctctatagtacattaactacatcatattgatcgcacctacgcctactctatanantgcattactaacacaacgctgtctcgctctacgctgatgcaganggngancgggagctgagacgatcanctctcancncggatactgctgcgn

SEQ ID NO: 3629 - DNA, 541 bp, Glycine max
  misc_feature (16)..(16): n is a, c, g, or t
  misc_feature (24)..(24): n is a, c, g, or t
  misc_feature (68)..(68): n is a, c, g, or t
  misc_feature (187)..(188): n is a, c, g, or t
  misc_feature (207)..(207): n is a, c, g, or t
  misc_feature (494)..(494): n is a, c, g, or t
  misc_feature (528)..(528): n is a, c, g, or t
  misc_feature (535)..(535): n is a, c, g, or t
  Peptide Sequence Number=SeqID_8204
  Probeset Number=SeqID_13408
ccccctttctgagccntctcgganttatgtgtgatcgtctgcgatcaatattctcatttaatgttccntgtttgatttgcagtactgctgatggcgtaaagttaatgagttctggttaacttactcgccattcatatcaagttccaataaacaaataaagcagatagccgaaccaacgggaatctgnnacaccaaaactccaaaaangtttatacgatcctgttaggccaagaaataaaataggggcggagaagattcgccctattccgtagtttttggatagaatataggattcgtatagctataaggaaattggaatcagggatagatttactaaaactcatacaaagctaaccagagaaaaagattaagtttctgtgtaaatcaccatttcttaacggtgaaaacacggaatttttcagtgttctaacttcgtatttttcccattccgggacctttcaccccatcatttcttcaatttgccggtcattcantggtttaaaataggctttttgcaccaatggatangtcatancccttt

SEQ ID NO: 3630 - DNA, 1414 bp, Glycine max
  misc_feature (105)..(105): n is a, c, g, or t
  misc_feature (201)..(201): n is a, c, g, or t
  misc_feature (246)..(246): n is a, c, g, or t
  misc_feature (368)..(368): n is a, c, g, or t
  misc_feature (408)..(408): n is a, c, g, or t
  misc_feature (472)..(472): n is a, c, g, or t
  misc_feature (478)..(478): n is a, c, g, or t
  misc_feature (517)..(517): n is a, c, g, or t
  misc_feature (562)..(562): n is a, c, g, or t
  misc_feature (604)..(604): n is a, c, g, or t
  misc_feature (879)..(879): n is a, c, g, or t
  misc_feature (1025)..(1025): n is a, c, g, or t
  misc_feature (1175)..(1175): n is a, c, g, or t
  misc_feature (1286)..(1286): n is a, c, g, or t
  misc_feature (1380)..(1380): n is a, c, g, or t
  misc_feature (1382)..(1382): n is a, c, g, or t
  misc_feature (1385)..(1385): n is a, c, g, or t
  misc_feature (1391)..(1393): n is a, c, g, or t
  Probeset Number=SeqID_13409
acaggacgatctatcgattagaatacattgtggtatcatacatatatataatattatatatgataatagagacttgccatgcggacagcaccacgttccaccganaccgcgacagagatgcacgatctagtcccacaagaccacgggcagacaaatacaccatacaacagtaccgcacgcgtgcgattaccttgacatcangacgcgtgccacgtaggctgcagtcattcgacacacgaacgaggnagcgacggcagaaactcaacaacgcagaagagagggagtatcgcgtcgttacaatcttagtcttctatacactctcatatgtagtgtaatatcaacaatctcagctagacgcctcaagcgtngtgcaagacatgcgtttatatatggattctaatagatgantatgagagcgactagtgtgttgacatcgtgtgcgcgtctcacattcatcaaacatatcaatacnacatanttctaacttgtatgggtgtcagccatatagtgtgggtgngtttgcatagtgactcaaacacaatcagtcagaaacaatcagcgncaagcagacagtgttgccgagcatcacatcactagtgtatanttgtcgtgagtcacattcagatcattccatgtctgaccttcgtcacaatgtaattatgtatgagtaacgtggccgtgatagttctatatggtcattataatataatatgatatacaatataatcattcactcgtcatatataactcttgtcgtgtcggtgtggtggtgtgggttgcgactctccctccacgccacaataatgagaggtgagaggggaggaacgaagaccacgactaagtctgcgtgaaataatagcatatacacaaatatgcgtngacggaggttgtcgatataaagatgttaggatgggcaggccataattgagtagagtaggttagatatatccataaagagacaaacagtctagagacagatgagaatcagacacatatattaactctcaggtcgcgttatgtacgtnacgtctggttgttgagttgtgtattgtatacttattgatattaagtgtaatgagggtcaagacgagcatggtagcgtgcaactactcctacactcactccaacttcatcataataaatataaatagcgttataaatgtaaacatagtctnacaccatcatatatattcaaatcaccaaaacaaattaaattacacatataagactcatatatatcacactttgtgggtagtcgatctgtagttagaatatgtagagagtgngtaccgccaggcacgatggcatcataatcataaatattcgacatgagagctaatagatatcgtcgccacacagggagagagagaataatatggnanganggagannnacaaccaccccaacacaaccc

SEQ ID NO: 3631 - DNA, 724 bp, Glycine max
  misc_feature (724)..(724): n is a, c, g, or t
  Peptide Sequence Number=SeqID_8205
  Probeset Number=SeqID_13410
gaagcacaaccacagcaaaaaccatcattccacgagcagacgcgggacagtgcagagcttcccagagaagcttacgagcaacgatgaagagtagcacactcctggtcatcctgatccttcaggccgtcctggccatgggaatcctctcacagggcgaacgcccagtcccccaagtgatgcgacaactgcagattcttctcggggggccggggcctcgccatgacgccggcccccaagtgacggaacggctgccagaaactgccgccggtgtgcaaacaagaccctaacaacaaccccccgacgccgctgactggctccccgccggacacacgggaacgccccccccaggccctggcaacaaagaacttgcaacgcaaatgtgccccccccccctaccccatgggttgggaccgcaaaaccaacacaccctccgcatgggcgtccgaaaccccacgccagtgggtgggcttcccacccccgccccccccggccccacgggcccaaaaagaacacctggacatcggccacaccccacatcccctcactccacttttccccccctcccaccccaaacaaaaggtggttcgggacttcgaccacccgcgcgatcaaacaccccgccgaagcggccaccgcgcggggggagggcccgcccgaaccaaaagaacaaagcaagacacgcgcccaactccccgacgcaccacacccgtacacgccccacccn

SEQ ID NO: 3632 - DNA, 1506 bp, Glycine max
  misc_feature (37)..(37): n is a, c, g, or t
  misc_feature (78)..(78): n is a, c, g, or t
  misc_feature (118)..(118): n is a, c, g, or t
  misc_feature (121)..(121): n is a, c, g, or t
  misc_feature (124)..(124): n is a, c, g, or t
  misc_feature (262)..(262): n is a, c, g, or t
  misc_feature (500)..(500): n is a, c, g, or t
  misc_feature (705)..(705): n is a, c, g, or t
  misc_feature (785)..(785): n is a, c, g, or t
  misc_feature (799)..(799): n is a, c, g, or t
  misc_feature (847)..(847): n is a, c, g, or t
  misc_feature (1239)..(1239): n is a, c, g, or t
  misc_feature (1302)..(1302): n is a, c, g, or t
  misc_feature (1422)..(1422): n is a, c, g, or t
  misc_feature (1492)..(1492): n is a, c, g, or t
  Probeset Number=SeqID_13411
ggggttccagtgcgcggggggtgtgtcgggcgggganacaagcgaataaatattaaaaacataaatataaacagcctntgactgcaaatcctaaacacacgtacaacacccccccganagnaancgaggactccctaccccccaccccaccacaccgacgcacagcaacgataggaacacacacaccaaccaccaaacatacacatgcttggatgacagagagtagcagaatcctcgcgcacttcgagagagaggagagagnacgatagccgcctagccacgcgcgcgcgaccacgcgacaacgaactaataataatataattctgtatttgaatcttctactgttcattacccaatgtccctctacacaatagtactcccgagcaccaacaacacaacaaataacacaatatatgaggacccagtcgacgcaccgcatatggcggtcctgcttgtctctctcctcgcgctttcactatctctccaatgactcttctatntattacgataagatagctaaacccactctgtgtctacccgccaacagccaccacatctgctactctcggccactcttagctccgtcatgactcgtcccataagttgtgtgtatacactgctatacaaatattaatcacataaaagtaatcataactcgatagaaatagttatacaaaatagcgaacagaccattctacacccaancaacaatacaataacaaccaacacaacaaataaaactagtaacggagatggaatgagagaaagacactagcactcatatnactgatagacgaancagtgcaatagtatactatatacatgagtctctgtctatataacgatntattaataataatatcatcgataatattgatgtaggaatacgtgtggaactgcgcatctatacatacgtcggccaagacctcacccctcgaaccgctgtatacggacactgatcgatataggaaacataaacgacgccacaccgaccacaacgacgactataatagtagtcatagaagcacaccacatccgctcctcatcatgcgcgtacaggagccgcttaactatcgcatcgatagcaaagataaactctcaccacacctacttcacgtctcacacccactcgcgcgacgtcggaacaccgcgcgcgcgtcgcacccacgaatatcgacgcgcgattcacgcaccgttaccacgaccgcaaggaatgggactagaccgactcgcgcgganatcatagcactcgagcatatgctcgagtatagtagatatatacaactgtcacgtgaggccaanacgatgactacatcatatgcactctcaacactacctctagtaatacacatgcgatcactaacatacttctcgtgcgtgtctgtctcttcgcctcatgtatcagttcccattcacctctcnccagctcgcatacactacacacatgacacagaacgaacgcggcgcgccactctctaacaggcgagacaancgatgccgtatccg

SEQ ID NO: 3633 - DNA, 1520 bp, Glycine max
  misc_feature (25)..(25): n is a, c, g, or t
  misc_feature (200)..(200): n is a, c, g, or t
  misc_feature (265)..(267): n is a, c, g, or t
  misc_feature (400)..(400): n is a, c, g, or t
  misc_feature (409)..(409): n is a, c, g, or t
  misc_feature (501)..(501): n is a, c, g, or t
  misc_feature (542)..(542): n is a, c, g, or t
  misc_feature (545)..(545): n is a, c, g, or t
  misc_feature (603)..(603): n is a, c, g, or t
  misc_feature (741)..(741): n is a, c, g, or t
  misc_feature (817)..(817): n is a, c, g, or t
  misc_feature (903)..(904): n is a, c, g, or t
  misc_feature (1004)..(1005): n is a, c, g, or t
  misc_feature (1059)..(1059): n is a, c, g, or t
  misc_feature (1112)..(1112): n is a, c, g, or t
  misc_feature (1123)..(1123): n is a, c, g, or t
  misc_feature (1149)..(1149): n is a, c, g, or t
  misc_feature (1183)..(1183): n is a, c, g, or t
  misc_feature (1197)..(1197): n is a, c, g, or t
  misc_feature (1283)..(1283): n is a, c, g, or t
  misc_feature (1285)..(1285): n is a, c, g, or t
  misc_feature (1287)..(1287): n is a, c, g, or t
  misc_feature (1289)..(1290): n is a, c, g, or t
  misc_feature (1339)..(1339): n is a, c, g, or t
  misc_feature (1351)..(1352): n is a, c, g, or t
  misc_feature (1354)..(1354): n is a, c, g, or t
  misc_feature (1373)..(1373): n is a, c, g, or t
  misc_feature (1435)..(1435): n is a, c, g, or t
  misc_feature (1461)..(1461): n is a, c, g, or t
  misc_feature (1464)..(1464): n is a, c, g, or t
  misc_feature (1466)..(1466): n is a, c, g, or t
  misc_feature (1520)..(1520): n is a, c, g, or t
  Peptide Sequence Number=SeqID_8206
  Probeset Number=SeqID_13412
cgtcacactaactctgtgcccaccnaccatcgccccctccaccccaacaacgcttctcatcctttctccctttgtacttactctctcgcgctctccctcctctcgcgccgccgcgcgccccgccctcatcgcaacctatgttgtgtatcacaccacgcgtgccctgccagcgcagtttgctgcatctcttattctcaccncctcatatctttttgcaagtcacacacacggcatgtcgaccactacacatatatacaacatacannnacacacgtactaacaatctcaaccgcgctcctaactcccgcccatcgttcgactacacaacgcacctctcgtgtgctcgaaagagtgcaatatctcaactaccttgtcaataagctgatatactgcgctcacngcgtctctnttaccatacacacgatattctacctattctccgccccgcacacacactatcgcaactccagaatacgtatagcaggtgcctcctcccccttntccgcccgcactgccgcgccgtccgacggccgtcgtactanaanagctctaaatatctaaccaactattctatctcttccaatctagatctgtcttattctncacttataccccaccatcctctcccacgctactatgctactacccaaccgtgtagtctcgctagacctacctattccgtacgaccctctatcaccgaccacccccatacccatactattcgtactgaacatcgacttntccacctatgtcatacgttatatcgtgccaccacatatatcacgacccatcgccatgccctgtacgcgtctctctncatgttacctacccaccgccactttcttactcttcgcgtgctcgctcgctccatgatgccactcttctgactaatctctctcatcnncccagtgtacccctgcgcgctactttcctatctatccacgtcgcgtcgccttaactgcatccctctcttacgtcgtatctactcctcgcgcccacaaccnnttgtatcatacgcatcattcatcgtcgcacagccccagcgatgacactgtctgnattatactcgtcgctcacacactctcctccgctacactacaacaccaccaccncacacttgtgnagatgtttttccactaccatcctatnacagccagtcatcacacctcgcgcctacctgcantacacacgaccatncacgtccaccacatctcgccactctcgtctcgcggccttactatacatgacctattgcgctgagtcacgactcaccattctacaantncntnntctcacatacttgcaccactagactatgcattctagcaatacacaccancaactcagcganncntatatcatctcgtgcacgntcgatcactgcaccatgtgcgcagctgccgactcacggcacactcacctagcagtacattanacggagatatctactcctctcccacngcnanataccactacgacccaacactcatctcattcgcacgcacaatatgtcatatccn

SEQ ID NO: 3634 - DNA, 2457 bp, Glycine max
  misc_feature (20)..(20): n is a, c, g, or t
  misc_feature (24)..(24): n is a, c, g, or t
  misc_feature (37)..(38): n is a, c, g, or t
  misc_feature (44)..(44): n is a, c, g, or t
  misc_feature (47)..(47): n is a, c, g, or t
  misc_feature (55)..(56): n is a, c, g, or t
  misc_feature (60)..(60): n is a, c, g, or t
  misc_feature (62)..(63): n is a, c, g, or t
  misc_feature (75)..(75): n is a, c, g, or t
  misc_feature (77)..(77): n is a, c, g, or t
  misc_feature (88)..(88): n is a, c, g, or t
  misc_feature (133)..(133): n is a, c, g, or t
  misc_feature (138)..(138): n is a, c, g, or t
  misc_feature (155)..(155): n is a, c, g, or t
  misc_feature (191)..(191): n is a, c, g, or t
  misc_feature (194)..(194): n is a, c, g, or t
  misc_feature (197)..(197): n is a, c, g, or t
  misc_feature (246)..(247): n is a, c, g, or t
  misc_feature (266)..(266): n is a, c, g, or t
  misc_feature (295)..(295): n is a, c, g, or t
  misc_feature (300)..(300): n is a, c, g, or t
  misc_feature (323)..(323): n is a, c, g, or t
  misc_feature (330)..(330): n is a, c, g, or t
  misc_feature (333)..(333): n is a, c, g, or t
  misc_feature (357)..(357): n is a, c, g, or t
  misc_feature (359)..(359): n is a, c, g, or t
  misc_feature (382)..(383): n is a, c, g, or t
  misc_feature (387)..(387): n is a, c, g, or t
  misc_feature (389)..(390): n is a, c, g, or t
  misc_feature (394)..(394): n is a, c, g, or t
  misc_feature (398)..(398): n is a, c, g, or t
  misc_feature (404)..(405): n is a, c, g, or t
  misc_feature (419)..(419): n is a, c, g, or t
  misc_feature (426)..(426): n is a, c, g, or t
  misc_feature (429)..(429): n is a, c, g, or t
  misc_feature (435)..(435): n is a, c, g, or t
  misc_feature (439)..(439): n is a, c, g, or t
  misc_feature (458)..(458): n is a, c, g, or t
  misc_feature (460)..(460): n is a, c, g, or t
  misc_feature (468)..(468): n is a, c, g, or t
  misc_feature (488)..(488): n is a, c, g, or t
  misc_feature (498)..(498): n is a, c, g, or t
  misc_feature (515)..(515): n is a, c, g, or t
  misc_feature (518)..(518): n is a, c, g, or t
  misc_feature (524)..(524): n is a, c, g, or t
  misc_feature (534)..(534): n is a, c, g, or t
  misc_feature (537)..(537): n is a, c, g, or t
  misc_feature (555)..(555): n is a, c, g, or t
  misc_feature (562)..(562): n is a, c, g, or t
  misc_feature (573)..(573): n is a, c, g, or t
  misc_feature (575)..(575): n is a, c, g, or t
  misc_feature (602)..(603): n is a, c, g, or t
  misc_feature (611)..(611): n is a, c, g, or t
  misc_feature (617)..(617): n is a, c, g, or t
  misc_feature (619)..(619): n is a, c, g, or t
  misc_feature (625)..(625): n is a, c, g, or t
  misc_feature (631)..(631): n is a, c, g, or t
  misc_feature (666)..(666): n is a, c, g, or t
  misc_feature (673)..(673): n is a, c, g, or t
  misc_feature (677)..(677): n is a, c, g, or t
  misc_feature (682)..(682): n is a, c, g, or t
  misc_feature (696)..(696): n is a, c, g, or t
  misc_feature (701)..(701): n is a, c, g, or t
  misc_feature (706)..(706): n is a, c, g, or t
  misc_feature (732)..(733): n is a, c, g, or t
  misc_feature (739)..(739): n is a, c, g, or t
  misc_feature (748)..(749): n is a, c, g, or t
  misc_feature (751)..(751): n is a, c, g, or t
  misc_feature (758)..(758): n is a, c, g, or t
  misc_feature (774)..(774): n is a, c, g, or t
  misc_feature (785)..(785): n is a, c, g, or t
  misc_feature (824)..(824): n is a, c, g, or t
  misc_feature (834)..(834): n is a, c, g, or t
  misc_feature (841)..(841): n is a, c, g, or t
  misc_feature (844)..(844): n is a, c, g, or t
  misc_feature (847)..(847): n is a, c, g, or t
  misc_feature (852)..(852): n is a, c, g, or t
  misc_feature (877)..(877): n is a, c, g, or t
  misc_feature (891)..(891): n is a, c, g, or t
  misc_feature (900)..(900): n is a, c, g, or t
  misc_feature (929)..(929): n is a, c, g, or t
  misc_feature (976)..(976): n is a, c, g, or t
  misc_feature (1011)..(1011): n is a, c, g, or t
  misc_feature (1020)..(1020): n is a, c, g, or t
  misc_feature (1037)..(1037): n is a, c, g, or t
  misc_feature (1043)..(1043): n is a, c, g, or t
  misc_feature (1050)..(1050): n is a, c, g, or t
  misc_feature (1060)..(1060): n is a, c, g, or t
  misc_feature (1063)..(1063): n is a, c, g, or t
  misc_feature (1067)..(1067): n is a, c, g, or t
  misc_feature (1082)..(1082): n is a, c, g, or t
  misc_feature (1104)..(1105): n is a, c, g, or t
  misc_feature (1107)..(1107): n is a, c, g, or t
  misc_feature (1115)..(1115): n is a, c, g, or t
  misc_feature (1119)..(1119): n is a, c, g, or t
  misc_feature (1128)..(1128): n is a, c, g, or t
  misc_feature (1133)..(1133): n is a, c, g, or t
  misc_feature (1158)..(1158): n is a, c, g, or t
  misc_feature (1163)..(1163): n is a, c, g, or t
  misc_feature (1165)..(1165): n is a, c, g, or t
  misc_feature (1178)..(1178): n is a, c, g, or t
  misc_feature (1180)..(1180): n is a, c, g, or t
  misc_feature (1199)..(1199): n is a, c, g, or t
  misc_feature (1218)..(1218): n is a, c, g, or t
  misc_feature (1228)..(1228): n is a, c, g, or t
  misc_feature (1237)..(1237): n is a, c, g, or t
  misc_feature (1240)..(1240): n is a, c, g, or t
  misc_feature (1251)..(1251): n is a, c, g, or t
  misc_feature (1337)..(1337): n is a, c, g, or t
  misc_feature (1385)..(1385): n is a, c, g, or t
  misc_feature (1446)..(1446): n is a, c, g, or t
  misc_feature (1473)..(1473): n is a, c, g, or t
  misc_feature (1480)..(1480): n is a, c, g, or t
  misc_feature (1489)..(1489): n is a, c, g, or t
  misc_feature (1523)..(1523): n is a, c, g, or t
  misc_feature (1542)..(1542): n is a, c, g, or t
  misc_feature (1546)..(1546): n is a, c, g, or t
  misc_feature (1588)..(1588): n is a, c, g, or t
  misc_feature (1628)..(1628): n is a, c, g, or t
  misc_feature (1632)..(1632): n is a, c, g, or t
  misc_feature (1683)..(1683): n is a, c, g, or t
  misc_feature (1725)..(1725): n is a, c, g, or t
  misc_feature (1743)..(1743): n is a, c, g, or t
  misc_feature (1795)..(1795): n is a, c, g, or t
  misc_feature (1815)..(1815): n is a, c, g, or t
  misc_feature (1842)..(1842): n is a, c, g, or t
  misc_feature (1850)..(1850): n is a, c, g, or t
  misc_feature (1869)..(1869): n is a, c, g, or t
  misc_feature (1871)..(1871): n is a, c, g, or t
  misc_feature (1896)..(1896): n is a, c, g, or t
  misc_feature (1928)..(1928): n is a, c, g, or t
  misc_feature (1934)..(1934): n is a, c, g, or t
  misc_feature (1938)..(1938): n is a, c, g, or t
  misc_feature (1988)..(1988): n is a, c, g, or t
  misc_feature (2001)..(2001): n is a, c, g, or t
  misc_feature (2015)..(2015): n is a, c, g, or t
  misc_feature (2061)..(2061): n is a, c, g, or t
  misc_feature (2067)..(2067): n is a, c, g, or t
  misc_feature (2101)..(2101): n is a, c, g, or t
  misc_feature (2104)..(2104): n is a, c, g, or t
  misc_feature (2112)..(2113): n is a, c, g, or t
  misc_feature (2115)..(2115): n is a, c, g, or t
  misc_feature (2124)..(2124): n is a, c, g, or t
  misc_feature (2172)..(2172): n is a, c, g, or t
  misc_feature (2197)..(2197): n is a, c, g, or t
  misc_feature (2204)..(2205): n is a, c, g, or t
  misc_feature (2208)..(2208): n is a, c, g, or t
  misc_feature (2256)..(2256): n is a, c, g, or t
  misc_feature (2260)..(2260): n is a, c, g, or t
  misc_feature (2275)..(2275): n is a, c, g, or t
  misc_feature (2277)..(2277): n is a, c, g, or t
  misc_feature (2280)..(2280): n is a, c, g, or t
  misc_feature (2285)..(2285): n is a, c, g, or t
  misc_feature (2287)..(2288): n is a, c, g, or t
  misc_feature (2290)..(2290): n is a, c, g, or t
  misc_feature (2293)..(2293): n is a, c, g, or t
  misc_feature (2296)..(2298): n is a, c, g, or t
  misc_feature (2314)..(2316): n is a, c, g, or t
  misc_feature (2326)..(2326): n is a, c, g, or t
  misc_feature (2328)..(2328): n is a, c, g, or t
  misc_feature (2333)..(2333): n is a, c, g, or t
  misc_feature (2335)..(2337): n is a, c, g, or t
  misc_feature (2341)..(2343): n is a, c, g, or t
  misc_feature (2351)..(2351): n is a, c, g, or t
  misc_feature (2353)..(2353): n is a, c, g, or t
  misc_feature (2356)..(2356): n is a, c, g, or t
  misc_feature (2363)..(2363): n is a, c, g, or t
  misc_feature (2366)..(2366): n is a, c, g, or t
  misc_feature (2368)..(2368): n is a, c, g, or t
  misc_feature (2371)..(2371): n is a, c, g, or t
  misc_feature (2373)..(2373): n is a, c, g, or t
  misc_feature (2377)..(2380): n is a, c, g, or t
  misc_feature (2382)..(2382): n is a, c, g, or t
  misc_feature (2387)..(2387): n is a, c, g, or t
  misc_feature (2389)..(2389): n is a, c, g, or t
  misc_feature (2391)..(2391): n is a, c, g, or t
  misc_feature (2393)..(2393): n is a, c, g, or t
  misc_feature (2396)..(2396): n is a, c, g, or t
  misc_feature (2398)..(2398): n is a, c, g, or t
  misc_feature (2400)..(2400): n is a, c, g, or t
  misc_feature (2411)..(2411): n is a, c, g, or t
  misc_feature (2419)..(2419): n is a, c, g, or t
  misc_feature (2426)..(2426): n is a, c, g, or t
  misc_feature (2432)..(2433): n is a, c, g, or t
  misc_feature (2435)..(2435): n is a, c, g, or t
  misc_feature (2444)..(2444): n is a, c, g, or t
  Probeset Number=SeqID_13413
catcgatgggtagtcaatgntcgntgcatggtgggtnnctgcgncgnggtactcnnccancnncaacacatagcntngtgggcatcangtagtcgagtcaggtgacgggtaaagcattcgagatcgccctgantggantaactacggatccgggntcgtctggtaagtgagagtatcgatcgcagtaactnctngcngcgtatcgtctgatcgtcagcagtggtttgtcctgtactatcatgcgtnnccttacgtcgactacgtantattggagtacatgagcatgacgatcgcnagggnagtcgcaagtagtcagtagtcanactcgancgnatggccagatgtagtactattgcntncggatatcagtcatcatcacatnnctantnnctcngcantcaacnnaagacaggtgatantggtacntangtaggncgtnactcggcgacatgaacatngnacgatgcnagtagcgactgatgacagtnatcagtacangtagacgatcgtacctngangatgcntagtcagtantcngacgcatcgggcagggcnactcggngcatctacagncnggcagtcgattgcatagtgtgctgatnnccgacgtngcgtangnacatcnatcagngtcgcattcgaggatcatgtatgtcgcatcatcgncgaatcnttgnactgntcccgctcagtatnagtgnatganctggtcgtcgtagtgatggtcatcgnncggtgngtcatccannanaatcacnagctaaactagcttangctcatcatgntggtcgtggtttacgtttgggcgtgtcctgcagcatgcngcgcacctcntgtcgcntcngtnatcancatgtcgtcatcagtttacgcgtcncagcacgagcgcancaacatcgntgtatctagatcagcgacgcacctagtangacagcacggaaagcgcagacgtcacagacccatcgcagcagagatnggagcaccagtaggaaaactagacgacgacgcgangccgtcgcnagcgcgatgctcatctnggtcanttagctntatcatcgancancganactgcacttctctantcatcactcacgtcactctatnntntcatcatnactngatagccgncttgntgacgtagcaagacgtgcatacgtnggcgntngtcgcgtgatcantncgcacgctcgctagtgtgnctgatttgatctatctatntcatcatctnctacaacanctnctacacagtancagtaccgtactgcagcgacgctcgtactgcatctgctgactccgcgcatctctactcactgctatacgtctatagtctcgtcacnatgctcagacgcattcggtcatctcggtggctgatgagctaactgagngtgctgtgtatactactgacgttgagtgccaagaagtaggtatagagtaaagtattagtcnatactgaactatacatttacctgtacnctctcanactattgcntcgtctatcgctgctgattcctgctgatactggngcgtaagcaggtagtgtantgcnatgtgtcagtctctgatgagtagagacgatcagtgtattgcntcttgttgtatgttaatcgagtatacgtatgtcttaactnctantttatacatatgcacatctatctctactcacacacaacactacgagcatancgcctcacgcgagcagcgcataagatcgtcgtagatagatgnaagatcacgggagctagnatggatcgtgatggtgttatctgaggagatgtctagcgcgacaacgactatngatacacgacatcagtagtnaagagagcgaagtaaataaagagatgnggaggaancaagtagagtatgacagcngnaagcagccagcacccgacctcgagngatgggggtgggtgtggcggcgcaggcgcgcncccgcngagncgatggatcggagcagagagagaagcaggatgacatctatatatataaangataaagtatatntggatgtcacgcanacatgtacaggccgagtatacatcatcacacctcacactatatatnaatttnttatgcatctgagctcgctgtcgcgtacctgtgncantgtgtagnnantggccgtgnggacgcgcgaaaacaggatggcaatggtcacagcgtgtcagtgacgcnacaccctcggacaccgccgtcctcncctctcnnacnacatatacccgagacagtgcgcggacaccgacgtgtgagctagcggangtanggggtctgcagccgncntcngtctntnntngtncgnnngagattgagagaaaannncaccataccnanggagntnnnggcnnnaaatcacnanccnaacacancananccngnggcnnnngnggagnangngnaanananacgcggcgcgngagacgcngggggcnacaganncnccacacacnaacacccaaacca

SEQ ID NO: 3635 - DNA, 848 bp, Glycine max
  Peptide Sequence Number=SeqID_8207
  Probeset Number=SeqID_13414
gcgggtatcggatttggaaacatcatttcagcgaatcggatgatttcgatcgtcagtccggaatcagcaccgattaaacgaatgatacaagacgcaagagatcgaggcatgctcatagatgctacatacggaagaagaacccgtgctgttgtcattatggacagtgaccatgtcatcttatctgccgttcagcctgagactgtcgcgcaaagactttctgtaaaagaagaaatcatagatgaagggcaggggtaatacgccattatgaaagaaagaggacttttaatcgttctctctggaccttcgggagttggaaaaggaacggtcagacaagccattttctcccaggaagatacgaaatttgaatactctatttctgtgacaacgcgcaaaccgcgtgaaggtgaaagaaatggtgtcgattatttctttaaaaccagggaagaatttgaacatatgattgaaaacaaaaaactgttagaatgggcagagtatgtcgggaattactacggcacgcctgttgactatgtagaacagacattgagcgaaggaaaagatgttttccttgaaattgaagtgcaaggcgcacttcaagtaagagaagcattcccagaaggtctttttattttccttgcaccgcctagtctttcagaacttcaaaaccgcatcattactcgcggtacagaatctgaggagctcattcgaaaccgaatggccgctgcgaaagaagaaattgaaatgatggatgcttacgactatgtcgttgaaaacgatgatgtcgagcttgcttgtgaaagaatcaaagcgatcgtccttgcagaacacctgcgcagagacagagtcgcacc

SEQ ID NO: 3636 - DNA, 1592 bp, Glycine max
  misc_feature (135)..(135): n is a, c, g, or t
  misc_feature (498)..(498): n is a, c, g, or t
  misc_feature (573)..(573): n is a, c, g, or t
  misc_feature (846)..(846): n is a, c, g, or t
  misc_feature (865)..(865): n is a, c, g, or t
  misc_feature (980)..(980): n is a, c, g, or t
  misc_feature (1009)..(1009): n is a, c, g, or t
  misc_feature (1093)..(1093): n is a, c, g, or t
  misc_feature (1162)..(1162): n is a, c, g, or t
  misc_feature (1249)..(1249): n is a, c, g, or t
  misc_feature (1261)..(1261): n is a, c, g, or t
  misc_feature (1360)..(1360): n is a, c, g, or t
  misc_feature (1370)..(1370): n is a, c, g, or t
  misc_feature (1416)..(1416): n is a, c, g, or t
  misc_feature (1442)..(1443): n is a, c, g, or t
  misc_feature (1549)..(1549): n is a, c, g, or t
  misc_feature (1571)..(1572): n is a, c, g, or t
  misc_feature (1574)..(1574): n is a, c, g, or t
  Peptide Sequence Number=SeqID_8208
  Probeset Number=SeqID_13415
caaagaacaaaaaaaacagataacaataagagagagaagacgacaaaaacaagacacagcgagaccgggaagagacaccggtaaggcaagaaacacaaggctgcagagctttccccaaaaaaggacaggaggcgngacgagacacacgttgtaccaccaaaggacaggcagggagcaggagagaaggaagagaacgcagggaaagaacacgaccgacgacgggaacgctttttgaccgcccgggagaggacagataggaatgataagagacacgaggccgaaacggccgcagcgcagaaaagacacaagcacacaggaaccatagaaacacataaagacgagagtccgcggcacgcgacggacagacgaaaagagagggaggaggagccgcgaagagagaagggagagagaacagagggacgaatgcgccagaacaggagaagacagagaacacagagagacagcggacgggacagaagagacaggacaagagagaanagccgcgggcaggcgcgggcgcccgcgggtgcggcgcggcggaggaagacgtggcgggaaggacggaaggagagnagaaggagagagacgagcaacaaatagtagagaaggcaagatgaaggacaaataagacagagaagaagacgactagaaagggacagcgagcaaggaaatatacgaatacacgatgagagcacgacaacagacaagcagcgtacacgggcacacatctacgagcgagcagcgagcgaacaaaatcgtatccgacgagagacggcgccagatagagcgcgtcagtaaaggcaagcgtgaggacgagcgcacgagaatagatataacagcggcgcnccgagaagacgagggtgcngtagcagtataataaaaacagacagctcccaacacacgcaagaaagtagaagtcaacacgtgggcggtatacgagcggcgggacgagacagaggtgagggagaggactagacgancgaaagacagacaataagagcacgaacanacgatgtacacgagagagccacgagatcgggacggatgactgcgcgagtgatcgaggagcatctaaacacacacacaccgggangcgagccggaagatagcacagagatgagtacacgcgagacgagcagaaggtagcggacagcggccgcgntagcgagacaagacgcgcgcgatacagcgacagagctagcgagagtactcagcacgcagcggacgagatgcgcatgacaatataganattacgaaccgnagacagcgcgcggtcacgagcgacgaccgccacacagcgagctagggctacacagcggtagatgatggacgaactcgataccgagtaggcgaacactancgtgacgggnagacagcgagagcgaagacgagactgacgatacagatacacgctangagtcacggcaccggcgcgcgaacgnngcgcacgaaggagtgacccgtgtacgcagacaatcgagatagacgcatggacatcgcgcacacatacgtctcgaaggacatggaatccgagcgtcgcacaagtgantgagagacacgaagacgcaggnngntcgcgccgctagaaacag

SEQ ID NO: 3637 - DNA, 1835 bp, Glycine max
  misc_feature (84)..(84): n is a, c, g, or t
  misc_feature (230)..(230): n is a, c, g, or t
  misc_feature (260)..(260): n is a, c, g, or t
  misc_feature (281)..(281): n is a, c, g, or t
  misc_feature (297)..(297): n is a, c, g, or t
  misc_feature (320)..(320): n is a, c, g, or t
  misc_feature (361)..(362): n is a, c, g, or t
  misc_feature (452)..(452): n is a, c, g, or t
  misc_feature (494)..(494): n is a, c, g, or t
  misc_feature (583)..(583): n is a, c, g, or t
  misc_feature (622)..(622): n is a, c, g, or t
  misc_feature (681)..(681): n is a, c, g, or t
  misc_feature (687)..(687): n is a, c, g, or t
  misc_feature (712)..(712): n is a, c, g, or t
  misc_feature (1424)..(1424): n is a, c, g, or t
  misc_feature (1575)..(1575): n is a, c, g, or t
  Peptide Sequence Number=SeqID_8209
  Probeset Number=SeqID_13416
gctactgatacacagacacggatgacgcgtgcgatgagcgagtctcgtgcagtcctatacagcgtcagtgtgagcgcgcgcgtncttcagcacgcttcgctgacacatcgattcaagtgtgagagtctcggcgttggctcgctagtgtcgctgttacgagatgtgggcgtctgcgacacacagcactccgtgtctaacacatgcaagtctgacactcacaggtctctctncttgcgtctcgctgtctgtgtcgtgtgganacaatcgcgcgtctcgtgtgncatctcgcttcagcgntccatacactttacgccgcgagncaagacgcatcatcgtagagtcgcgagctcgctagctagtnntgctcgtgtcgcatacacggtcaatatgtcatgcagtgattacatatcgacgagacatcctcagacacccatgctgcgcatgaacatcgngcggggacatgtcgattggctcgcaagactctatgaatgtgntagatcaaggcgaatagcagagtcgtatttgcgtcgctcccctcaccctgcgcattcgccccgcaagtacacgtctggtgcacctctangcgagtgtcttggcgctctcttagttactcggcctctgnaccgagtctgcgcgtcctgctgtcgcgcgcgtgccgtcctctatatacacacgcacgcngacgtntctcgtatgcgcgtgccagtgtagngcggatgcagtgtatcagtgcaaattagtctacgtatagtgacgtattgagacgagccgtgtctatcacattcaacagccgacggcgcggtgtatccagcgtgcgcggtcgaggcgcgggggagacggtcatcgggtgtagtgttagatactcgcaatgcatcgtagttacacaagcatatcagactgcgacatgtatatctctctcctacgcgagtgttgtggaatgcctcgacgtgtcgtttgtgatgcgtggtaccgacacgagtctgggccgcatcggccggtgatgtcgttgctgtcgaaatgctgcgagtgtgccggctcccatcatgcattagtgcgtctgggcgcgtttgctactcgcgccactacgcggcgcgggccgccaggccgcgtactcagggacgaagtatcattacatatatatttgagcgtcggacacggcggtgagcgaggacagccgggccggggcgtgctggttgcgctatcatgcgcaccgtccgctgcgtacataatgtacgcgtataggtgagacaagcgaggagtcttgaatgagacgcattatactaagtattttgcacgcacatactacgctcggctcgcggcatctgcgtttggtattcgtagatgaattataggcgaatgaagcgctgcgggacctatcacgcgcatcctatgaatcaacatactccctatctctcgcgatcacnatctctgatcgcgcgattaactctatgctgtataatactctgtttctcggggagagggtagctgtgtgtgtggatggatgtgggtgtgtagagggtcaacacccaactacttcgtactatacgtggagcctctaagtggcgtcgttgcgcntaacgaggacaatattgtgtatactcatctgtcattgttcgtatcccatacaggggtcgcgtggccgtggtgcgccacatactccgcagccgtgcaacccagcgcggctttgtgtggggacgcgccgggcgcggacataaaggaggtgaaaaaagggtgagtaataatgatatagtggcgggtttatgagttgtgtgatagtggtcttcctcacgtctctctgtgcgaaaaatacggaaaacggcgggctggcggggcgt

SEQ ID NO: 3638 - DNA, 476 bp, Glycine max
  Probeset Number=SeqID_13417
ccggctcgagaaagtgccttttcttaggatgaagctcttgtggaaatctcacgtgagggtacaagtaattagattggtttgtgctctccttttggtgacactgctgagctcagaggtagctgagagcagaaaagccaaaactgctagaacttcctttgagcacaaagctataaattgcagggctcatagtgcctcattgattgatgaatttgggggcgccggacatgggaatacatcaaattacaaaggcttttcagtctgcaatcagtcatctgagccagtatgctgctcaaggaggggctcacgtgaatgtccctgctgcgaagtcgcttactgccgatttcagcgctataaatcacttcactttgcatctagacgaagaggcgtctcctctggcatcgcacgataccgcacagcgcgcccgcgtggaagcactccgatcggacgtcagagggagagcggccccgggcggccgg

SEQ ID NO: 3639 - DNA, 1374 bp, Glycine max
  misc_feature (9)..(10): n is a, c, g, or t
  misc_feature (29)..(32): n is a, c, g, or t
  misc_feature (52)..(52): n is a, c, g, or t
  misc_feature (64)..(64): n is a, c, g, or t
  misc_feature (78)..(78): n is a, c, g, or t
  misc_feature (100)..(100): n is a, c, g, or t
  misc_feature (179)..(179): n is a, c, g, or t
  misc_feature (198)..(198): n is a, c, g, or t
  misc_feature (208)..(208): n is a, c, g, or t
  misc_feature (513)..(513): n is a, c, g, or t
  misc_feature (635)..(635): n is a, c, g, or t
  misc_feature (1079)..(1079): n is a, c, g, or t
  misc_feature (1146)..(1146): n is a, c, g, or t
  misc_feature (1341)..(1341): n is a, c, g, or t
  misc_feature (1343)..(1343): n is a, c, g, or t
  misc_feature (1345)..(1345): n is a, c, g, or t
  misc_feature (1354)..(1354): n is a, c, g, or t
  Peptide Sequence Number=SeqID_8210
  Probeset Number=SeqID_13418
tgtgggggnntgtgtgtggttgggtgtgnnnnattgctggatttgtgcattnctctatcccgtngcccgccgcgcacngcagccccaccacattatatantccgcgctccgcccttagtgctacagagacaggagagtcacctagccggcaggcgggctatggatgttattattactancttctcatgtctctctccnccattcaccnccccgcggggagagataaagagtaagagagtagagatgaatatctatttcctccccacaccacccctgcagcgaattctcatcatccgtcgcgctctctcttccgcttcttacttctccctacctaaatcctttattctccattaccgcacaacacgaaagcgaagaacacacagcccgaacatagatggggaccggctctatatgtcttccacctgtctctctcgagcgtccatccagcgccgccgggggcgtgtcgcaggtctctaggacgaggtgatcgggtaaccccaatcataccccccncggccaactgacaaaccctgaatcaacatcaattagtgtcatacaaccactcatcacacattagaagagcgacacaacgaaccttatctcaattctacttattataataaaatagagcggangacaaagatgaccaggcgacgaaaggttaaagaggtacttgtgatggtcgaatatttggattggtcgtccaccactactatttcatgacaccgacatgactcacataacttccaaccaatactctaccgataatactacacctataccactactgagtattgaatataatatggtgtatggtctttacggtcccgatcccattgatgagtgtctatagcaaattataaacatcttacgtactcatctccgtctcgaacacaccattgccgtctcttaaaagacacgataactattacacacatcattggccgagcaaagaatgggtggcagacatgaagtattaataataacttccaacccacccactcacctacacatacactgcacagaagaatgtgaggttactgtttattgatactctctctgcgcctagtcaacacaangcgtacaccaggtaagacgactaagctgacgatactaatatgctcgtaacagaaagactaatatatntcaccccacacaccaacacaccacagatatacgatgaataatattttaagaatcatagctctttcattgtgtgagtgtcttctgttgtgatgtgtaccgttcaccctctccgtcacactatcttacaataccattctatctctctcacccaactcacccgctgccctagcagagatatacagagattgatagatntnancaacagaanaccgtcaaccctcccccgcg

SEQ ID NO: 3640 - DNA, 1378 bp, Glycine max
  Probeset Number=SeqID_13419
aaatcagacaaaacacgatggcatcagcagcgccattctccggcaccggcagtctccttcgcctgacaaaaccaggaacgccacagccccagttcttctcccctccgccgtctcgctcccacttccaccttcgaacccgccccgccaaggcaaagagcccaatcgccggagccatcgcctcctcttccatggcggcagcccagccccagacgtgcgacggccaacaacaacgggcggaggaggccatgaagctgctgttcgtcgagatgggcgtcgggtacgaccagcacggacaggacatcacctccgccgcggtgcgcgcctgcaaggatgccatctcctccaactccatccccgccttccgccgcgggtcgataccaggggtgaacagtgaacagatgaaactgcagatcaagctgggtgtcccgaggccggtgcagcatctgttggactttgagagaatcaaggccgtcttcccctatggtgagatcaccagctgcgaggtcattgacggcgggatgatctgttcaagtggaacatgcatcgaagcaatgggagataaaaacgatgactgctacattgtcaatgctgcagtctacgtcggttactaatgctagcctggaggaattgttgtattggaacagtggaaaacttgaaaaaaaaacctggccgggagaggggaactggaaattctcgtaggcaataagtatgtataactgttatgaacagagaaagggtcaaaatagggggaggccatgaagcctcccggtagtcctgctgcctggtgtcgccggttatcttaccctaagaggctaagagggcaatctcgcggtgagctccattgttggagttcattggaattggcatgcacattgtcatctcgtgttgtatggtgtggggaggttgaggatgttgaccgcattctcttctttttgtgccgtgtgatcgtttgagaggttgccctgaagtattgccttgctactaggtccacggactcattcaaacccaatttgtcttaagctgggagaatggagtcttgtcttctttctgctgcagttatggcttgggtggtcttgcctttgtggctgctaaccaggaatcatgcggtggattcacctctgcatccagttacacaagttgttgaacatatggggctggtctcggcaaagcgcgtgcagtcagtcggagctgaaggtgtgctggatctgtacaagattcaaaccgggctactcaaaaatagactggtgggcatttaggaaatactgtactactagtaccaagatggcacaggaagaggcaagagcactagagacccagaaacttgcgttgtatgtgatggtttagtccataaacttgcaaaagatgatctattcatgtg

SEQ ID NO: 3641 - DNA, 475 bp, Glycine max
  Peptide Sequence Number=SeqID_8211
  Probeset Number=SeqID_13420
aacatctgactaatcttggaatactcagctcctctctaaaattcagctcttccttttaaagttattcacggtgttgaactgacatgtgaaaatcttcagaagcgaggtgaaaacacaaactggatcagacgcggtgctacagagaccatgttacatctctttcgccaaacaggtttgggagttgatcccatggctcttcaactcaagtttggctgaatcattcggtaaagggcaagagacatcccacctgagaattaatctacaaggctttcgccaaggaccaatctctttccaaggttgcttgtgctatcaggaactccagaactaactcctcatcgagaacatgatcaatctctgttgcggcatggaaaacggtcaagaagagggacggattcgattggatcttcactgattggcaccaaacaatctctctcggtatcattcatatatggcttagaccagtctctcaagagct

SEQ ID NO: 3642 - DNA, 1440 bp, Glycine max
  misc_feature (1)..(1): n is a, c, g, or t
  misc_feature (563)..(563): n is a, c, g, or t
  Probeset Number=SeqID_13421
ntcgcgcgcgtcacgtcacacgctgggactctcgagaccggctcgtatcgctctaacagagtcaactcgctcgcaacagaccacataagcgcgtcatacactcgaggtcacacggtgcgctgtcgcagagcacgaagattctctaactcgtctacgatcgcgtgcgctcacatggataatgtatatggtacatcaccatgcgcagcgagcgtccgtaacgagggcaagtatttgtgagtgagcagcaggtcaacacacatagaagggcatcataccgagccgctagtacaatatcagcgtaatacactaacaatcacacgagatcaagccgtcgggaaagtgtcgccgaagagtcgctcgagtaatgagtagagagtggtatctcagatatcgcatttgatcgatcgtagcaattgttatcttcgtgggattacacggctatcgcgccttcgtgcgccaataccgagagtgacgtatcagtagatgagggccaccgcgcgcaagcgcgaagatcggactatcagaacgaccaccctatactgatcacatatatatacactccncagtctggaggctagcgtccgctggttcactgtgtgacgccaagatcgccgcgtagaagcatacaatcacggccagtctgtgcgcaagcgagggggtactctgcaaagaacgatgcgggccctcgtggggcaggatagggtgatatacgcaccatggtcgaaacgtagcatcgcggctctttcgcggacacgagcgtctgggcataagcgcaggctgcagcgtataacgtcattcggactgatagatctgagacgtttcgaccagaagcgaagaaactatgcttggagggtgactaagggtcctctgggtttctacgacgacgagacacggcactcatacgggtgcgatgctgcattgatgcatggcgacaccatctccgccgcgcgtgaaacacatgcgaggagaatctggtccggggtatataaaacgaaaaaggaggacatctgctacttcatgccaagctgtgtgggtcgagacggacatgtatcaatcggaaatcgcagcctccctcgctgcgcgcacatccgtctactcctccgaggtcgccctactgctgcgtatactctatagcttactcagtaagtctttaggcacaggccctcaattccttcactcctgcaacgaacgtacggaggatggcgcgggaggtcctactatgcatgccgtcgggtcgaggctgcaggataatgaatagtctttggcgtactgggcatgttatgcggtaagtggtctacgtgcgaaattccacgcagccccggggggaccctctcactcttagactcgccccgcccccgccggtggagctgcccaccccgggggagacgctcccatcacacataaagagggagaatggaagggggattaaagttataaatg

SEQ ID NO: 3643 - DNA, 1882 bp, Glycine max
  misc_feature (1)..(1): n is a, c, g, or t
  misc_feature (8)..(8): n is a, c, g, or t
  misc_feature (10)..(10): n is a, c, g, or t
  misc_feature (39)..(39): n is a, c, g, or t
  misc_feature (42)..(43): n is a, c, g, or t
  misc_feature (89)..(89): n is a, c, g, or t
  misc_feature (207)..(207): n is a, c, g, or t
  misc_feature (287)..(287): n is a, c, g, or t
  misc_feature (366)..(366): n is a, c, g, or t
  misc_feature (374)..(375): n is a, c, g, or t
  misc_feature (409)..(409): n is a, c, g, or t
  misc_feature (420)..(420): n is a, c, g, or t
  misc_feature (432)..(432): n is a, c, g, or t
  misc_feature (550)..(550): n is a, c, g, or t
  misc_feature (552)..(552): n is a, c, g, or t
  misc_feature (597)..(597): n is a, c, g, or t
  misc_feature (601)..(601): n is a, c, g, or t
  misc_feature (624)..(624): n is a, c, g, or t
  misc_feature (692)..(692): n is a, c, g, or t
  misc_feature (721)..(721): n is a, c, g, or t
  misc_feature (736)..(736): n is a, c, g, or t
  misc_feature (792)..(792): n is a, c, g, or t
  misc_feature (795)..(795): n is a, c, g, or t
  misc_feature (819)..(819): n is a, c, g, or t
  misc_feature (839)..(839): n is a, c, g, or t
  misc_feature (887)..(887): n is a, c, g, or t
  misc_feature (1016)..(1016): n is a, c, g, or t
  misc_feature (1122)..(1122): n is a, c, g, or t
  misc_feature (1176)..(1176): n is a, c, g, or t
  misc_feature (1382)..(1382): n is a, c, g, or t
  misc_feature (1560)..(1560): n is a, c, g, or t
  misc_feature (1609)..(1609): n is a, c, g, or t
  misc_feature (1723)..(1723): n is a, c, g, or t
  Peptide Sequence Number=SeqID_8212
  Probeset Number=SeqID_13422
ntcattangnttcgtcgcgtgcacgacgctcgttacacnagnnccacggagcagcaacgacgcgcaatgtatgatgatatatatcacangtaatagatagtgagagggcgataaatagtgcgctatcgtgcggcgcagcatcgacgtatgtgcatatacgtaatacatatatttatatatgtttcctagcgatttgcatcgcaacgngcagcgactgacatgatagtggcgagcctagctctaccaggacttacactgtctgtcttcggttctcggctcgtcgtcgntgcgcgtccgtagatagatatatatatgaaagatggatgcgaccgtatgtcgcttcgttggcgcgtatgcggacagcgnccgtaacnntccgagctcgatcagcgatatatcgctctatctnaacgaagcgcnctgacgaacgcntgggggcgcgtaaacgcatgattatacgtatatacgggacagcgcaccaacatgtcatgtcttatgagtccgctcagtcacgtgggtcgcaggatatcgagcacgcgcataactaatnangcgcggtagtgtgatatgtcggagcgggcgcgacgctgtggccanatcnagatgcgagagacatagcatgantctgtgacgcgccacagtctatagctgtgtatacttgcgcggtggtgagagcgacgcgccgccgcgantattcgctctgcagcatcgagacccacangagcagcatgagtgnacgcgtatacgcatcaagtcgccgcgtcgcgcgcacgcgtgatcgcgtgatgtatnatnggcgagtgcctgagcgctatactncatatcgatacgtctctcantcgtcaccaacacagcgacgacacagtgacatgagcgcggctgtggcngcgttatcgcgtcatgccactcgcacacacagcacgcatcgcttaatacacgcgacgccgcacgcatatattggcgagacagcgtccgcgacatcgctaccgatgcatcgtcacaccgcaggccggcgnaacgtcaacgcggcgatgacgtcgatgcgggttgtatgccgacggcgcgtacgagtgcgagatgtatattgcgcgtccacaactacgcactctcgtgcgcgcagcncgccatcgtcgtctgcgggagacacagacacaggacgcgcgagagacactaganagagtatatacgtcgaggcgcgtgtctgtgcgtgagttctgcgactatctctcgtcttatctgtcctatttcataaatacgtctctcgagtcgcgacgacacagcgtcacgcgcacgctcgagactgtgcgctcgttccccgtctctattcgtcacgcgtgatagatgcgccgatatacacagcggcgccactgatcgtcgatccnacatcaccgccgcgtgctgtgtgatcgtcgtgaattggaggccgctcatatcaccgccgcaggcagttcacatacggcgcgcgcaacacaccgaagtgcgcatctcttcggatcactagcgattagagagacgccgcgcacatatcacacgttcgcgcctcctttcgcccatcatcgngaataatatataatagtgcggcagtcgagcgagtatgtattgcgggcantggcggagagggaatgaaaagacgagaataactactacggcgtcaggctgcgcggatggtagcactgcgtcataatctcaaatcatctatatagtccatgcgcgtcagaatatncaggatataactactgcctcgcggcgcgtcttacgtccgccgtgcagtgagatggttattcgagcgtgcgaaggcgcgcgagcgctcgtgccgtagcaatctacctcgacatagtcctgtcgcgcatacacctccgcctacagtcaacagggcaatcaa

SEQ ID NO: 3644 - DNA, 1867 bp, Glycine max
  misc_feature (1)..(1): n is a, c, g, or t
  misc_feature (34)..(34): n is a, c, g, or t
  misc_feature (118)..(118): n is a, c, g, or t
  misc_feature (146)..(146): n is a, c, g, or t
  misc_feature (153)..(153): n is a, c, g, or t
  misc_feature (215)..(215): n is a, c, g, or t
  misc_feature (284)..(284): n is a, c, g, or t
  misc_feature (677)..(677): n is a, c, g, or t
  misc_feature (1137)..(1137): n is a, c, g, or t
  misc_feature (1264)..(1264): n is a, c, g, or t
  misc_feature (1289)..(1289): n is a, c, g, or t
  misc_feature (1499)..(1499): n is a, c, g, or t
  misc_feature (1547)..(1547): n is a, c, g, or t
  misc_feature (1633)..(1633): n is a, c, g, or t
  misc_feature (1674)..(1674): n is a, c, g, or t
  misc_feature (1697)..(1697): n is a, c, g, or t
  misc_feature (1749)..(1749): n is a, c, g, or t
  misc_feature (1836)..(1837): n is a, c, g, or t
  misc_feature (1839)..(1839): n is a, c, g, or t
  misc_feature (1851)..(1851): n is a, c, g, or t
  Probeset Number=SeqID_13423
nagtgatgacatagcgtgcgagacaggaggcganttacgtgtcacgtgtgagctcgtcggcgcgaggcgtactcaacactacagttcatctatcagactgtacgttttgtagtttgantaaattgtcgctgcgcgtgtcgtgtctntcctctngctgtctatcgatatctgatatatgtgcttgttataacattgagagatagctgttattcgtnattgacaggagttctggtgtggtcgaatatattaagtgtgccagagaggacatagtttcagggtcatcncgcgagcgtatattgagtagagatttagtgtgagcagaggttgaacgaggtcgatatgctaagggagtatagtatgatgtggcgataatagcgagtggtgtgtggacacgtgtatgagcgtgatcgatctatgtgactcttatttgtgacatatatgtgttcgtgttctccgtctacgcctgatattagatccgctcgtcgtggatatctctggtctgctgatactcttgaattgtcatcctatacagagagatcaggtagtatataacgatacatatactgatgtattggtgttattctccagctaggcgtctcatatgtacgaatttgtccatattggtctcgtcgagacatctgactaacatctaagacatagatgagatacaagaacanagctgtgtgttcatatagcgatttcatatggtagaggtacgttggctatactgtggtgtcagtgaggagtacttgcgagcagagattaagggtgagtgtgaagagtgtgagcgtgatatttggcggctgtctgatggcacgggtgagatgtggggtgtatatctacgtgtgaagatagaggtgagtgagttggtagtcagagtttgctggcattatgttcagataccatgtgatgatgtatcaggattctttcatcgactgataagaacagttattgaatggcagttatatgcgcgtgtcggatcagatcttgcgagctgttgagacgatggctggacagaatcctagatcagatggacggcctcgtcaggctgtataatataactgttgagagagtgaaggtttataagtagagtcacattactgagatgatgtagtagtagcgagaggttaggcgagnattaagagatgtaatagagagcgcacgtaaccgatagtagtgttctttattacagtatcatactaatatatacctatgagctaaacagtagctgtgagaagatatattgttatatcatgtgtagtcnttcttgtttgttattgtgttttatngtgtattgtatctatcgtgcgttgtgtttgtgttgattggtggttagtctaaagatgcaagaagtggcagacatgagaagatatgagagggagtcgtgagggagttggttagttgtgtgcagtgcggtggttgggtagagtgagggggtgtggagtgacgttgagtgtgatggctgagggtgatgtatgtaaatatagataggaggaggnggtgtgcggtgacggttgatgtgggagatgtgatggtagtgtagtgtntatcgaatatagtcgcctcgtacttagtatgctgtgagagacggttcgatctatatagagagagctagaatattatgtctgtgcgnttatcatttagaatgtcgagcagtaagagtgtcagaactgntggtggagtgggtagagtgtagngtcgtgcgattgcaataagctcgtgtgcgagtgtattagttatctgcatagncttttctttgctgatatttcttttgttggtataacgaggttgcggtgtgtacaccgagataagcttagggagcgggagaaagagggnngnagggaacgacangggggggggggggggc

SEQ ID NO: 3645 - DNA, 1858 bp, Glycine max
  misc_feature (1)..(1): n is a, c, g, or t
  misc_feature (47)..(47): n is a, c, g, or t
  misc_feature (75)..(75): n is a, c, g, or t
  misc_feature (113)..(113): n is a, c, g, or t
  misc_feature (167)..(167): n is a, c, g, or t
  misc_feature (205)..(205): n is a, c, g, or t
  misc_feature (228)..(228): n is a, c, g, or t
  misc_feature (253)..(253): n is a, c, g, or t
  misc_feature (275)..(275): n is a, c, g, or t
  misc_feature (278)..(278): n is a, c, g, or t
  misc_feature (292)..(295): n is a, c, g, or t
  misc_feature (327)..(327): n is a, c, g, or t
  misc_feature (361)..(361): n is a, c, g, or t
  misc_feature (365)..(365): n is a, c, g, or t
  misc_feature (428)..(428): n is a, c, g, or t
  misc_feature (431)..(431): n is a, c, g, or t
  misc_feature (535)..(535): n is a, c, g, or t
  misc_feature (540)..(540): n is a, c, g, or t
  misc_feature (577)..(577): n is a, c, g, or t
  misc_feature (677)..(677): n is a, c, g, or t
  misc_feature (681)..(681): n is a, c, g, or t
  misc_feature (697)..(697): n is a, c, g, or t
  misc_feature (784)..(784): n is a, c, g, or t
  misc_feature (818)..(818): n is a, c, g, or t
  misc_feature (891)..(891): n is a, c, g, or t
  misc_feature (918)..(918): n is a, c, g, or t
  misc_feature (920)..(920): n is a, c, g, or t
  misc_feature (954)..(954): n is a, c, g, or t
  misc_feature (1105)..(1105): n is a, c, g, or t
  misc_feature (1119)..(1119): n is a, c, g, or t
  misc_feature (1164)..(1164): n is a, c, g, or t
  misc_feature (1170)..(1170): n is a, c, g, or t
  misc_feature (1214)..(1215): n is a, c, g, or t
  misc_feature (1337)..(1337): n is a, c, g, or t
  misc_feature (1339)..(1339): n is a, c, g, or t
  misc_feature (1357)..(1357): n is a, c, g, or t
  misc_feature (1361)..(1361): n is a, c, g, or t
  misc_feature (1370)..(1370): n is a, c, g, or t
  misc_feature (1373)..(1373): n is a, c, g, or t
  misc_feature (1378)..(1378): n is a, c, g, or t
  misc_feature (1395)..(1395): n is a, c, g, or t
  misc_feature (1398)..(1398): n is a, c, g, or t
  misc_feature (1408)..(1408): n is a, c, g, or t
  misc_feature (1486)..(1486): n is a, c, g, or t
  misc_feature (1521)..(1521): n is a, c, g, or t
  misc_feature (1525)..(1525): n is a, c, g, or t
  misc_feature (1546)..(1546): n is a, c, g, or t
  misc_feature (1562)..(1563): n is a, c, g, or t
  misc_feature (1568)..(1568): n is a, c, g, or t
  misc_feature (1582)..(1582): n is a, c, g, or t
  misc_feature (1612)..(1612): n is a, c, g, or t
  misc_feature (1615)..(1615): n is a, c, g, or t
  misc_feature (1618)..(1618): n is a, c, g, or t
  misc_feature (1622)..(1622): n is a, c, g, or t
  misc_feature (1640)..(1640): n is a, c, g, or t
  misc_feature (1698)..(1698): n is a, c, g, or t
  misc_feature (1744)..(1744): n is a, c, g, or t
  misc_feature (1756)..(1756): n is a, c, g, or t
  misc_feature (1758)..(1758): n is a, c, g, or t
  misc_feature (1780)..(1782): n is a, c, g, or t
  misc_feature (1788)..(1789): n is a, c, g, or t
  misc_feature (1793)..(1794): n is a, c, g, or t
  misc_feature (1798)..(1799): n is a, c, g, or t
  misc_feature (1805)..(1806): n is a, c, g, or t
  misc_feature (1810)..(1813): n is a, c, g, or t
  misc_feature (1815)..(1815): n is a, c, g, or t
  misc_feature (1817)..(1817): n is a, c, g, or t
  misc_feature (1825)..(1825): n is a, c, g, or t
  misc_feature (1832)..(1832): n is a, c, g, or t
  misc_feature (1834)..(1835): n is a, c, g, or t
  Peptide Sequence Number=SeqID_8213
  Probeset Number=SeqID_13424
nctctgatagagcgtgatgcagacctcgcgacgtcgcgcagtgccantcggcagcgcactgatcctctactctcnatcgtcgacactactaactcatcccactccatctactntcctacataatctactcgacgctgagtacgacatcagcagcgacatgcgtctcntacacagcagcacagtctagagtgatagtacgacgcanagacgcagacgctagtcaatacntctgctaattcgccctacatgtcgnagcgtctcgtgctgcgtgtganganctgcagagatgcannnnacgtcattgagtccgcgcacggatcgatgcangtcacagacatgcgtatcttgcaaagtacgatgnacanaaaacaaacatgataggcaaggcacataagagactagaggatcacatctcgcagaagcacagngancgagcgatggatgtacactcggtctgcagaaagcgacaggagcagtgcatgcgagcagagcgtcgcgcggctgggctatgtgcgatacttatggcgacagactngtcangcgcgtgagcgcgtgcgcgtgctcgtgtctcatatcncagtgttcgtgtataggcggcagatagagtgagcatgacagtagagcacaagtgcagcgtgtgccataagatagatacaatcatacactacacacgctcncgangacacacacaacactngcgagtgccacgcacccgtccatcacatcaggcgtggcgtatataattaaagagagtgaatgagatagagcgtgtgtactatagatngaggttgtttgagagtgtagatgatggatctatntatctatcttgctattgctggtgctaggagaggagagcacagagaagcagagaagtctagtcagactgctctnactctgtatcgttcctgtactctcctntnttgttcttggtgcgtgttgtccaacatcaagcanaggtatatctgacgcggggagagcgcgactgtcgtctcattcacagccatagtttcattctcttcgtcggctacgtacgctcgcatgtaggatctcatccattccggcgcggcgtggtgcgcgcgcgcggctgcgcacacgcctacacaancacaagtagagagntacaaggaggacaaattagtctaacaacttatgagatgatctgtntggtgnggagggttgcgccgcggacacgagagatcgctacctcgacgccnnatgcgaggaccggcacgtggcggccatcctacgtacttcctagctgtgaggcctgacggtatgcggtcctttatgttgatcttatgtgctccggcgcggagaggactgatataagatacctntnctgtgagcggatactgantcanggtatctcnctntgagntagcgtgtgtcatactntcntccagcttgngtcgtcgttgtgtcgcgctatacgtgttgatgtgatacatctgtgaagttgaatgctaagccagtacgcgatgcttgntgcgtctcgcgacagacgagtagtgcgagcaacanacanccaaagcacgcggacgagagnggagaagaggcgaggnnagagntcactagcgtacgncttccgacgactcgccgcatcacatcatcnccncgncacnccgccgcgcgacgcgcancccgtgcccgtgttcgccgccggccgcacgcgcaagcaccatacatactcacaatctnctacaccacaccctacgggacacagcacaatccacaccctcgccantcactcatactntntatccaccgcgtgcggggcagnnncgcgtnncagnncctnnaaatgnnagannnnananatatattntaatatntnntgtgatatgtaggaaggagagga

SEQ ID NO: 3646 - DNA, 1785 bp, Glycine max
  misc_feature (16)..(16): n is a, c, g, or t
  misc_feature (34)..(34): n is a, c, g, or t
  misc_feature (36)..(43): n is a, c, g, or t
  misc_feature (62)..(62): n is a, c, g, or t
  misc_feature (67)..(70): n is a, c, g, or t
  misc_feature (72)..(73): n is a, c, g, or t
  misc_feature (80)..(80): n is a, c, g, or t
  misc_feature (91)..(91): n is a, c, g, or t
  misc_feature (100)..(100): n is a, c, g, or t
  misc_feature (104)..(104): n is a, c, g, or t
  misc_feature (176)..(176): n is a, c, g, or t
  misc_feature (178)..(178): n is a, c, g, or t
  misc_feature (185)..(186): n is a, c, g, or t
  misc_feature (247)..(247): n is a, c, g, or t
  misc_feature (250)..(250): n is a, c, g, or t
  misc_feature (266)..(266): n is a, c, g, or t
  misc_feature (270)..(270): n is a, c, g, or t
  misc_feature (273)..(273): n is a, c, g, or t
  misc_feature (282)..(283): n is a, c, g, or t
  misc_feature (320)..(320): n is a, c, g, or t
  misc_feature (396)..(396): n is a, c, g, or t
  misc_feature (467)..(467): n is a, c, g, or t
  misc_feature (481)..(481): n is a, c, g, or t
  misc_feature (483)..(483): n is a, c, g, or t
  misc_feature (485)..(485): n is a, c, g, or t
  misc_feature (493)..(493): n is a, c, g, or t
  misc_feature (613)..(613): n is a, c, g, or t
  misc_feature (616)..(616): n is a, c, g, or t
  misc_feature (652)..(652): n is a, c, g, or t
  misc_feature (659)..(659): n is a, c, g, or t
  misc_feature (766)..(766): n is a, c, g, or t
  misc_feature (772)..(772): n is a, c, g, or t
  misc_feature (778)..(778): n is a, c, g, or t
  misc_feature (816)..(816): n is a, c, g, or t
  misc_feature (983)..(983): n is a, c, g, or t
  misc_feature (990)..(990): n is a, c, g, or t
  misc_feature (1013)..(1013): n is a, c, g, or t
  misc_feature (1015)..(1015): n is a, c, g, or t
  misc_feature (1157)..(1157): n is a, c, g, or t
  misc_feature (1259)..(1259): n is a, c, g, or t
  misc_feature (1305)..(1305): n is a, c, g, or t
  misc_feature (1320)..(1320): n is a, c, g, or t
  misc_feature (1337)..(1337): n is a, c, g, or t
  misc_feature (1403)..(1403): n is a, c, g, or t
  misc_feature (1430)..(1430): n is a, c, g, or t
  misc_feature (1432)..(1432): n is a, c, g, or t
  misc_feature (1518)..(1518): n is a, c, g, or t
  misc_feature (1562)..(1562): n is a, c, g, or t
  misc_feature (1569)..(1569): n is a, c, g, or t
  misc_feature (1571)..(1571): n is a, c, g, or t
  misc_feature (1670)..(1670): n is a, c, g, or t
  misc_feature (1730)..(1730): n is a, c, g, or t
  misc_feature (1744)..(1744): n is a, c, g, or t
  misc_feature (1785)..(1785): n is a, c, g, or t
  Probeset Number=SeqID_13425
gggtttgtcgcggagngagccgcccccccccccncnnnnnnnnaccctctgggtgtgtgagnacacnnnncnnacaacantgatgcgagantgagcggantatngtgtcgcttctggagcgcctctgatgatgcgctacatcgagagttgctgctagatgcgagcgctgtgcaggngngcgcaanncacacgagcagtacgcgtgacgcgcgtcgaacacctcgcgcatcataataagttaggagtntanatatgcgcggattcgnatgncgngtcggaggnntcgcctctactctgcaacccgtctacatacactacantctgctagtgcatgatcgcgcacgcaacgcggtatggattatacggatgggaatggtatatgacagatatgtgagntatagtatgataatactcacgcgaagtagcgttcgccagtcgtagagggagggagcatgtaatctgcgaantgaataggtgtggnangngcggagantaggtggagtgagtagtgagatcaggccataggtgtagtatgtataagctccgcgctcatgtctatcatacatgctatagcgcagacgaaactgactttctacaaagagatagagcaacnagngacaatgatcagacgcggcgagtcactcatgcacangcacgcncgttgttctagaatattcttagtatatctccaacctcgacgtcagtaaccaaccgatctaacccatcatgtattattaagaccagtcatctacacaatgaaagtcangatcgngagacnatgagagaggcggcagagaggtgacggcgagagaggcncgggtagtgactgtgagatgaagaagtgccacgtgatagaatgatatagaacagtggcgagacataatatatatcagacacctgtaatccgtctatacaactgctagacgcagccgcgcgcgatcaaggtaggaaacagcaatcgtacgaactgaacgaccatgacncagacgngtgtacgacacacgaaggcacgncngtggagatctggatgagcatatagtagcgcggtgacacgagaaagacgaggagagagaggatggtgtgtaagagagagatgaacgatggtgtgctgacgagacgacgagattatgatagaaatgcgagtcctagataggtgntatgtgtcgcgctgtgatatgacatgagtgcggctgccacgcgcgcgctaccagtcgtactgatccggctgacaggtcagtgtgagtgagtgccgatgtggngcgtgcgcgcgctgactgtgtgcgaagagacataggacgatggccnagactgcgtacagcnagcgcacgcgcagcacntgcgagatagatgagaccgcacgctgacgtcgagaggataacagactacgcgcgccgcgctgtggntagtgacgtgatgcgacggctggtagnanatgatatacacacgcggagactaagagaaaaagtatcgtggcgcgaagagaaatagaaagatgcggtgacgaccgcacacgaaganctggcgccgccgcgctgattacgacaatgcgctccgcgaccgcnccccacnancgatcggaaagacgctcaggtacccgtgactctatgcggatgatagatctgatgacgtcacgccagcgcgcagcgcgcgtgctgcgcgcacctcggcgnacagcgcgaacgtatagaagatcgtgtgacgacagacagctcggatgatatatgatgtancgacgctggcggancgacgagcgcacagaggtacacggcgacaggactctgcgan

SEQ ID NO: 3647 - DNA, 168 bp, Glycine max
  misc_feature (41)..(41): n is a, c, g, or t
  Peptide Sequence Number=SeqID_8214
  Probeset Number=SeqID_13426
atcaatagaaaaacaaaaacaacgtaagcttstatgtattnattaaacctatacgataccacgcacatagtattccaaaatmtgcatagaaaatgtgtgcataatggaatctgaaaatggagtwtgctatggaggacgagaaacatgtcattggggaaacaaccaagg

SEQ ID NO: 3648 - DNA, 430 bp, Glycine max
  Probeset Number=SeqID_13427
gcttgtcctggtctgcttggcttgtgctccaagcacctgtactcaagaagtacccagctcgtctctccgtcacttcctatacatgtttctttggactcatccaattcctttgtcatccgctctcatccgttggaaaagggatgcccggcttggatttcccatttggggggaaaatttccacaatttaaaatgttttttgggggccactgaaaaaccccttccctgaacagaatttggggatttccagagggcgccctgggttccttgccgggtataaccctggtcaaacctcttgggtgcccattaagggtttcccttcttttttgggaaaaaaattcctcttgtggagggaaactttagaaaaaaggttgtaaccctttggggggaattcccttttttttctgtgggggggaaaaaaccaaaaaaaaaa

SEQ ID NO: 3649 - DNA, 1449 bp, Glycine max
  misc_feature (1)..(1): n is a, c, g, or t
  misc_feature (6)..(6): n is a, c, g, or t
  misc_feature (43)..(43): n is a, c, g, or t
  misc_feature (55)..(55): n is a, c, g, or t
  misc_feature (83)..(83): n is a, c, g, or t
  misc_feature (95)..(95): n is a, c, g, or t
  misc_feature (134)..(134): n is a, c, g, or t
  misc_feature (186)..(186): n is a, c, g, or t
  misc_feature (190)..(190): n is a, c, g, or t
  misc_feature (253)..(253): n is a, c, g, or t
  misc_feature (309)..(309): n is a, c, g, or t
  misc_feature (358)..(358): n is a, c, g, or t
  misc_feature (373)..(373): n is a, c, g, or t
  misc_feature (478)..(478): n is a, c, g, or t
  misc_feature (532)..(532): n is a, c, g, or t
  misc_feature (543)..(543): n is a, c, g, or t
  misc_feature (545)..(545): n is a, c, g, or t
  misc_feature (583)..(583): n is a, c, g, or t
  misc_feature (722)..(722): n is a, c, g, or t
  misc_feature (746)..(746): n is a, c, g, or t
  misc_feature (764)..(764): n is a, c, g, or t
  misc_feature (1243)..(1243): n is a, c, g, or t
  misc_feature (1409)..(1409): n is a, c, g, or t
  misc_feature (1423)..(1423): n is a, c, g, or t
  misc_feature (1429)..(1429): n is a, c, g, or t
  Peptide Sequence Number=SeqID_8223
  Probeset Number=SeqID_13428
ntagtnatagagtcgtcagtgtcgcgtgtctcttgacgcatgntcgactagaganatagtagatattagctgtcatgatgtangagataggtgantctacgttgagagctcatatatacatatatactgcagcngacaagcttattgcgtcgtgtctactaatgctcggtgtgctagatatatganttangagattcagtccattgctcgttcactttatagttatttaactaaactactatcattcgtgtgngcgatgcggcatcgcgcatatcatgtatgtcagtgacgctgtctgatgactgagtnttcagattcaactagatcgcagcatcgattgtgtactgaagtatgaatngatgggtaagtgganggagacacgctaataaacagtatgagtgatatcgtgcagagcgatcgaggagaggcgagacgcactacgcttcgaacatgagtcactgatgaatgctgatatgcnccatatcagcgcaacgcacacacgtcacatatcacagactatactatattcgtnggtgcgctagntngcgtgccaggacgtgagagtgagacgacaaatatcctnctaattcatgcgttagccatcccacactaccacagactactctatactcttgtctactaccacaaccatcgtgatacatcatagtctagagaagaagtaatacatagtaatacgtctgctctctatcggatctcactantaggtatgagtagcgcgttctacnacggtatactacgtaacnccctcatcacacacttattggtttatatatataattgatctgtttccgaaatcaacgtagcgcagatagtcaatattaagtaatttaacggttgcgctaattatgaaatagatagtaagcgcgtgcacgagcacacatacacacatgatgacatacgcgcggcgcgagtcatcaaagaaaatagaacaccacacgaggtgaggatcgccttatcgcgtgccatgaggtgagagtgggaggtgatccatcattgattatttgatagagatcttttaatttatatcttattctgcgtttaacttcgagtataatatgtagcttatagcggtgaggggaagagagtgagcatatatatgacttgatcattgttacatgatatgtgtcgagtatgtgttgtaagtctagatattacgacggtacatggcgggaaggcctcctccgtgtgtctattctttactaacgatacaatcaatcacctntcccacttcggcatatctatctctcacgtaagaggggtccctcgctgcctcacactttgctccctgaagaggggccgcccctccttctcttaatgtatgcagggggggggggggacacacagaataaatccaaccgacaaccataacaaacggaaagtcagtggcnaaaggaataggagnaaaaanaaaatcgcacaccatcctcc

SEQ ID NO: 3650 - DNA, 1677 bp, Glycine max
  misc_feature (18)..(18): n is a, c, g, or t
  misc_feature (24)..(24): n is a, c, g, or t
  misc_feature (26)..(26): n is a, c, g, or t
  misc_feature (30)..(30): n is a, c, g, or t
  misc_feature (38)..(39): n is a, c, g, or t
  misc_feature (44)..(44): n is a, c, g, or t
  misc_feature (46)..(46): n is a, c, g, or t
  misc_feature (50)..(50): n is a, c, g, or t
  misc_feature (63)..(63): n is a, c, g, or t
  misc_feature (65)..(65): n is a, c, g, or t
  misc_feature (69)..(69): n is a, c, g, or t
  misc_feature (72)..(72): n is a, c, g, or t
  misc_feature (79)..(81): n is a, c, g, or t
  misc_feature (87)..(87): n is a, c, g, or t
  misc_feature (89)..(89): n is a, c, g, or t
  misc_feature (91)..(92): n is a, c, g, or t
  misc_feature (140)..(140): n is a, c, g, or t
  misc_feature (195)..(195): n is a, c, g, or t
  misc_feature (215)..(216): n is a, c, g, or t
  misc_feature (233)..(233): n is a, c, g, or t
  misc_feature (237)..(237): n is a, c, g, or t
  misc_feature (240)..(241): n is a, c, g, or t
  misc_feature (244)..(245): n is a, c, g, or t
  misc_feature (247)..(247): n is a, c, g, or t
  misc_feature (281)..(281): n is a, c, g, or t
  misc_feature (300)..(300): n is a, c, g, or t
  misc_feature (430)..(430): n is a, c, g, or t
  misc_feature (451)..(451): n is a, c, g, or t
  misc_feature (482)..(482): n is a, c, g, or t
  misc_feature (743)..(743): n is a, c, g, or t
  misc_feature (765)..(765): n is a, c, g, or t
  misc_feature (862)..(862): n is a, c, g, or t
  misc_feature (915)..(915): n is a, c, g, or t
  misc_feature (1000)..(1000): n is a, c, g, or t
  misc_feature (1283)..(1283): n is a, c, g, or t
  misc_feature (1299)..(1299): n is a, c, g, or t
  misc_feature (1320)..(1320): n is a, c, g, or t
  misc_feature (1336)..(1336): n is a, c, g, or t
  misc_feature (1391)..(1391): n is a, c, g, or t
  misc_feature (1400)..(1400): n is a, c, g, or t
  misc_feature (1405)..(1406): n is a, c, g, or t
  misc_feature (1415)..(1415): n is a, c, g, or t
  misc_feature (1431)..(1431): n is a, c, g, or t
  misc_feature (1468)..(1468): n is a, c, g, or t
  misc_feature (1475)..(1475): n is a, c, g, or t
  misc_feature (1483)..(1483): n is a, c, g, or t
  misc_feature (1526)..(1526): n is a, c, g, or t
  misc_feature (1552)..(1552): n is a, c, g, or t
  misc_feature (1569)..(1569): n is a, c, g, or t
  misc_feature (1637)..(1637): n is a, c, g, or t
  misc_feature (1641)..(1641): n is a, c, g, or t
  misc_feature (1677)..(1677): n is a, c, g, or t
  Probeset Number=SeqID_13429
cccccaccccccaccccnaccccncncaancccccccnncaaancnacanaacactacaaaananaaantanaaaaaannnaaaaananannagagaaagacactaaaatagtataaagaggctcgcgccgcgcgcgcgngcgacgcgcgttcgtctcagcgagcgacgcgcgcgacgtacactatccaactcantctatagacatgaaatatannaaaaaagaaagagagtngtcntgnnttnntngtacgcgtatactggtggctactcgctgtagtangtatgctagtagagtgctnagtgtctgtgtctgtcgatgtatccgcagctcgtttgtagttttgtatcgtgcacgtgtggcagcggctctcgcgccgcggactgatgttgatgattgtccgtgtgcgttgtatgctggtgtctctgggntgcgcttcgcgtgcggacgangagtagacatcacagttgtgtcgcgcgcggngtcgcgcgcgcgtgtggtgtcgggtgtcgtctgttctctctaattatgcactcatcgcacacacgcctctggccgcgccgtcgcctcactggcgcgctcgcttatctcctgcccctatctactctatcaccccttccgctcactcttcattataatctcaatcactctcgctccgtgtacatatacatgatcaatctctcacgtatatatatcatagtatacatactagaagcaacacacaatacacacgatacagacaanatatatcacgacgaggatgatnatattatgttatgttgtctctatgcctctgtatctatgtctcgccctgtatctctctgcgtgctccttctatatcacactgctaatactctcgactnacaccagaagacagcgtgccacgatctgcacatgagatcacgtgtcattatangtgtcacgagagctggcgcagacatgctcgtgagcgtacgatctgcgagcatgtctatgtagcatcacagctacaactactatanactcatgcgacaggtgagcggacgcgtaactgcatagatgtccatagatagatgaaactactggtggatgtatatacgagacgtcacacgtctagccatacacattaaatagatatgaaatccggtgagagtgatctagtcgtgcgatcgcgagtgagtatcactgagataaagtatagaatatatgcgaagatatatatagatatacacaatcactcaccgcctctatcagcatcgtcatatatcgtgtgttgcgagtgcgttgagtatctggctgagggcnggtctgctgatgtagnggtcgagtgtcgcagctagcncgcagacaactaactntcagtcgtccgatcatatcagacactatagcatactattactataacaactagcntgctacgcncgaannggatccatnctctgcatcactaccnatcgcagactctactctcgagatctctcattatatantgatagngaaggaantgagtatgagtcatagcttgacatagtgcgtatgttatgactntacagagagtatgctgtagcgcgtangatcggtgattagaaanatagtagatgcataagaaatgacatcactgagcatgactgtatgagttacgcaactcacatctctatncccngcaccccgacgtttaaatactatatatctcattatn

SEQ ID NO: 3651 - DNA, 544 bp, Glycine max
  Peptide Sequence Number=SeqID_8224
  Probeset Number=SeqID_13430
gggagcggcttcttccatggttctctcatccccaatcattgtgctggacaagggccgtcgaatctctgggctccaatcagcgcccaagatagtggcgaacgggttgacgcatagacggatactaccgatcatcctaagcgaggctctcactcagcgaagccgcattggtcactggcccagcaacgagcccaagtacttagaggcccattatcatggcgaacccccctcctacctaaccggtgaggttcccaggcatactactgctgggacactgctggtctttccgcagacccagaaaccattcgccaagaacggtgaactagaattagatccactccaggagggccatgctcggagcacttgtggctgcgtcatcccggaggtgctcgtccgcaaccgggtgaagtactgacaagctgtgtggttcgaggccggctcccagatattcacctagggagggctcgactacttgggcaagcgaaacgtgatccacgacccgagcatcctctccatctgggccacactacatatcctaatgggtgcc

SEQ ID NO: 3652 - DNA, 1408 bp, Glycine max
  misc_feature (894)..(894): n is a, c, g, or t
  misc_feature (1026)..(1026): n is a, c, g, or t
  misc_feature (1198)..(1198): n is a, c, g, or t
  misc_feature (1329)..(1329): n is a, c, g, or t
  Peptide Sequence Number=SeqID_8225
  Probeset Number=SeqID_13431
atgcccccccactccccccacaaatgccccggcgctttcccccccgtatcccccccgcccttgtcgggtgtttcgcaccgataggcgcgccgataccataactagatgcgatccccacggagctgaaatgaatctactattcccctcccacccacccgcgcgatgcattatcctataagcccgcaagatgatcacataggcccccccccctatattgtgccatttattgtgatattgcgccaccctctccacacaaccgcatatataaaaatacacaaaccctccccctcatatgatgataacacaccctacatataaaataagaaaaccccacctcataaaaacccccgcgggctcgcccgccccccctccgaaaaaccaccataaatcaataaccaagccagcctgaatagtatactccgatcaaccgtccagccccaacgtaaataaaatcccctgactacaataaggtctggccccaaaaattaacgtagctatgctctccccgcccagttatatagcaccatatagacaataatggccggcgccccccaaataaaataacactcgaggcgatatggaaatggcagagccgcttttaatacagaccacaatttgctaatataaacacacgcctcctccccctataacacaccacacgttgcgatcttaataaaatccacccacgctaataaacaacgttgtacaaccacgcagccagtatttatgaaccactacaacgccccacactctcttctacagtaccctattgttagacaggcaccagtatgtgacagaactcaacgtaggctcacggaggcaacaggcccacaataccgcacacggctgtaatattatgtcccatagcaatacactagctcaccaatgcgtggnccaacaccaactcggcgacctgtaatagcacatccaatcagactaagctagtggtgcatgcggtgatatgactgaaatatataataaaccgcgcaccctgcagaaaataaaacaagccgcaggcgagctcgntgcacacagttgtatataattatcagactctcattcgagccgcactcgcgtcataaatatagagaaaacacattaatgagtggttaacacacctcattcgactcgagcgtggttcgttacacacagatgaatatatatagaccgtcacggtggtaggcgcgaaaattatgcnaataaacacataacacatacgctcacgcgtcttgtgtacaacgcgccgtaattactacattgagcagaattatatacgcctcgcgcgccgcgaaacaatgtgtatacaatcactctctcgcagtgtcgagngagtcacggatgagggagataattcaacacctcatctcacacacatataacgaacaccattcggctacaatcagccgcg

SEQ ID NO: 3653 - DNA, 1508 bp, Glycine max
  misc_feature (334)..(334): n is a, c, g, or t
  misc_feature (487)..(487): n is a, c, g, or t
  misc_feature (1064)..(1064): n is a, c, g, or t
  misc_feature (1083)..(1083): n is a, c, g, or t
  misc_feature (1091)..(1091): n is a, c, g, or t
  misc_feature (1356)..(1356): n is a, c, g, or t
  misc_feature (1450)..(1450): n is a, c, g, or t
  misc_feature (1488)..(1488): n is a, c, g, or t
  Probeset Number=SeqID_13432
ggagtgcgggtcgtgggcgatacattcggtgtagacagatgacatccttatcctctatactcacacaggtgacgagcgcggttcgcgatattctatcccagtacattagtgctctacatatatttagaagtgggtgcgtacccggagcaataccgatgatccgttgtttttaatattgtaacggatatctacgatctcgttatctttttcgactactcgccgggcggcgcgaatctatcatcatattgaatcgaaggaatgttattaggccgcgtattcgtacagacggccgcggcgttcatgggagtgagtatgcggtaacattattatagtnggtgacgaatgttttaccgccagcagtcgatgtatcggttcgtatcaacatgctactgcgggatgtagaacggtgtgcggctcgttagatattcgtatagcatgtgagatcgacacatattgaggcttatttgatatgtgtgtggcacactcngtcgcaagtcatgttatctatgagtgtaagataccggccttttatgggacgacaggatcataagacggtgttctcacactgtgtctcattttcttatgatcgcgttgtggataaagtgcgatgcatcgcgtgatacaattatagattaacattataccggcgacgggcataaagtgtcggtggcaccacacagcatgaggtgagggtttcacccggttacgtgtgatataactgcgcgtggaaatattggtgcggggcgacacgatccggaactggtcgagttctatgacacagggaggtaagctggtgcggtattattattaatatattaattactattatgtacactgcgtcgctcgcagcgtctcgtacgtacgagctagttcgtcatacactatcggcagtaaatatacgctattgcatttgtcccgtagtcgctcagtgtcgccctgcctgttccattacaattcacgaggtagctgaccgatcacgaaaataatatcgccgctgcgtcgcgaagatatagttttctcatatatctatgattcgcggttatgctcggtggtcggccgcggtnggcgcgtcgtgcggtactnaatatgantgtgagtatactacacagtcccggcgcggaatgtgcgggcgtcgtctgtgattacataagcgtactagaccaatcagtctacgtttgtgatctaggttgctgctctgtccagcgctctatattccacccactcctctctgtcgtagtacgtcgtatacggctcgcagacgatgcgtttgtcgttcggtttgtcaccctagctcacgtcactctacggaagtatgtacgtacactgattagattgctcgagcatctgtctcaccgncgcgccgccacacacaagcggcgcgcgcgagcggcggaagggcgcacagaggaatgagtgagggtgctctctctatttctctactttgccacanctacctctaccaactcatacgccatgagtagtgctagntatgcgttgggacatatctc

SEQ ID NO: 3654 - DNA, 1526 bp, Glycine max
  misc_feature (36)..(36): n is a, c, g, or t
  misc_feature (61)..(61): n is a, c, g, or t
  misc_feature (92)..(92): n is a, c, g, or t
  misc_feature (164)..(164): n is a, c, g, or t
  misc_feature (211)..(211): n is a, c, g, or t
  misc_feature (225)..(225): n is a, c, g, or t
  misc_feature (660)..(660): n is a, c, g, or t
  misc_feature (1056)..(1056): n is a, c, g, or t
  Peptide Sequence Number=SeqID_8226
  Probeset Number=SeqID_13433
ccatgtacaactcatttgcgtaccatcttatcagtntgcgacgtgggctgatcgatacagntctgtgagcatcctactataacagctctgtntctcgcgctcggccgtgactgctctcgcactatgctatcgcgcgcacatctcagcagcacgtcactacgtgncaatatacacgctcatcacgtcgtatgagcgtggtgatgctgtacgngactctcgcgatanagacgcaccacaactgtcgtagtgagcatatcagactcactagacgcaccacatatacctagcgcagtagtcttccgctcgctcatatcagcgttagccagagtcgccgattgcgcttcatcatgctaccctatataacgcgcatatacgcgctgaaggctccttcaacgttaccgtgacacgcgatcaagtatgtcgtcgacatcgtatcgctgacatgctcattgacagagtccatcgcacggattgagagtggcctccatccgtcttgctcactcacctcacaccattgtgtacacaagcgtattcattactgtcaagtcactatccgcatctcatacatcctgcacagtcgtactcatttatccctgcgcgacctccatatctctacatctccttcattcatgtactgtcactctcccgagtgtgtctgcntagctacactcgccacaactccggaacgttgtgctgtcctatcacaagcatcaccggctcggctgtcggccactctacttgttatacttagtatgtgagcgtgtcagccacgtcccacgttatcacacattcagccctgcacgtcagttgtcgatctaccacatatcatatacattaaccaatactaacggtagactgtaccatcacagcaccacacacttcgcaatctccatgcgcacatgcgtgaaggagcaattacacgtgatgcattagatattatcttcataatcttcttacatgttccgtctgcacttttctcagaaatacattacatttccttgtgcgtcctatcaacatgcatcagcagcgcgccatccctcgtagaaggagtcgagncagcgccacagtaagtgtacgaactgcacccgtgcagtaccatcgcacaatggtagttgcgtgtgttcgaccccccgcaccgaccgccgccgctcccccctcgtctttccatgctatctctccgtctccttctacccacagagccttcagaccacctcctacacaaggataggggttacgggaatagtcctcattgaatgtcgcacgatcgagatgttcggtttagaattggtataaaaaataatattaagagatgtgtcaatgcaggaggggcgcacagtcgcggcgggtaacccctccataacagatagatactcgctatcccagcagtgtcagagagaatcattcctcatatatcatcaatgaattactacataattttccattatcgttcccaccgatacctgtacgccaacattctaccgtctgtcaactggtgtgatcttcaccatcactctctctcctctcct

SEQ ID NO: 3655 - DNA, 1492 bp, Glycine max
  misc_feature (1061)..(1061): n is a, c, g, or t
  misc_feature (1197)..(1197): n is a, c, g, or t
  misc_feature (1325)..(1325): n is a, c, g, or t
  Probeset Number=SeqID_13434
atggggtcgccgcctctcctcctcttacgcgcgcaccttcgtcagtgataggccccgaagaggcacgcccactccccacaatatcattagcctgtggtaagcttgttgtacagtattctctatagggccctatatatgcacaatccccattacaagataaaaaatcccgctccgcgacccggagcgaagggcgggtattattgttattatactcctacctaaaacacgtacgaagatcttcctctacctaaatatactattctctttatcatacgaacataatctgaaacaccaccacagccctatcactggatccaagtaaacaacatccatagaacgcaccctaatacatactatatatataaagatgacaaagcaccgaaaagatccttatatttaattcttatattcatcgcctaattcattgtgaccatattacagtagactatatctgtatgaccgtatatataagtccagatcgcgccgtgcaactgtcaccttaaattttcgcgagaataaggatagcgccggaaatatacgccagccacagcccctcggtatctcgtagatggtcgccgcacgagcctgtgatacagttatctccgtcgtccgctccgtcagagagacttattcattgcatcaatatagctcgctatacccccatcttctaaatccgaaccctttacgcgcgtaatcatactccgctactaaaaacaacccgataatgatcgcgtgtcgtcagccataatagtcgcgtacgcgtttctatcatacgtatatacaaatacaccgatagccataagtcggggtgagtcagctttcgtatgccacaacttattgctacgctgttcaacctaagtattcggtcgtgttgcgcacgcccgaataaaacaccaaaccactcacctcactcccactacatcgatatcgtcctagtcgtcgtatgggtaacgttacggccgcgcgagatatcgcccgcgcgtgccactagcacaccgataacttcgacaaaatatcgcgtcacggtacgataacccaaataagcgtatgcacaatataanggtgcactcaccacgagcgatgatgcgatactctagataattgtggcgttcgtgtacctaccactcgccactgggcaacagaagatacggagttgcgttcctatttacgtattcgtatatcacccccgaccatatncgatctcttctataacgcgtctagcgacgcagctatattgtcacccctccccctacggacgtcgctactgccacgcgatgtatatattcctagaccgcaccaccacaccacggatagaaataatacantacgctatatttgctctacactaatagcatggcaacacacagtcgacagacaataatatacttaacttgcgatcgagtgccgccgcattagtataacgcccaccgcaataattagtgtatattatacgccatgcacgattcgcgcttatgctcacatagaagaaata

SEQ ID NO: 3656 - DNA, 597 bp, Glycine max
  misc_feature (10)..(10): n is a, c, g, or t
  Peptide Sequence Number=SeqID_8227
  Probeset Number=SeqID_13435
cccacgcgtncggcgagcctagtgcagcagaaaaatgccggaagatcagttgaacagacacacgatcagatcacatggagctaaagtggcaaggacacatatgcatgactggttgattcttttgcttcttgctatcattgatgggatcttgaatgtgatagaaccatttcaccgctttgttggacaggggaggatgtccgacctgagataccccgttgaaagctaatactattcccttttgggctggtccgattgtagcaatattgttaccactggctgtttttctcgtttactatttcattcgtaaggatgtctatgacctccaccatgctataatgggccttctattttctgtactcattactgcggtgatgactgatgctatcaaggatgctgttggacggccaaggccagacttcttctggcgttgtttccctgatggaaaagggttaactgctcaataaacgccccattggtgcatgacatgtttaggtgtttgatccagtaacaagtaatgttctatgtactgaaaataaagatgttattaaagaaagacacaaaaatttccccagtaaacatacctgttaatcctttact

SEQ ID NO: 3657 - DNA, 667 bp, Glycine max
  misc_feature (1)..(9): n is a, c, g, or t
  misc_feature (637)..(637): n is a, c, g, or t
  misc_feature (640)..(640): n is a, c, g, or t
  Peptide Sequence Number=SeqID_8228
  Probeset Number=SeqID_13436
nnnnnnnnngaaaattagcgatcttcttcctcctctggtttcgtatctaatctgattgtggggaacgagatggggttcataatggagtttgcggagaatctggtgctgaggttgatggaggatccggaggtgagagacaggaaagcgagggagcacatatatgagatgcacgagaggtgcaagaagatcaaggagatgtgggctttgcctattcgtccttatggtttctggactttcgagcgtcacaacgctcagcttcgttgggatcctcagatcagtcaggttgctggtcgtagggatccttacgatgatctcctcaaggaccacccttcttcttcaaactgatcaaacagtgaacgaagatgtgttgtgatgctgtctggaaggatgcgtatgtctccctttgtttcttttttgttcttcaggtgcctggaagcttggtacaaactcaaataaatactcttcaagacttttttttgtcaaaagagagagtctcgttgtttcttagtaaagctgttttgattctctatttgcatatttgatatgaatatactttctgaaatgtgataaccttccaatgttcttaaaggtttgttgctcaaaaaaaaaaaaaaaaaagcttatcgaaccggcgaanccncccaggggggggggccccggtacccaa

SEQ ID NO: 3658 - DNA, 744 bp, Glycine max
  misc_feature (744)..(744): n is a, c, g, or t
  Peptide Sequence Number=SeqID_8229
  Probeset Number=SeqID_13437
acgagamcattacctagaaaatcctaatcgaaaacttattttgaagaaaccacatcggttatataaagtatttgctgcacttcctgagaaagaagtcgtcttggtattggatccgctcttctgttagcatgaacatgaattagattctattcatcttatttattcttaagagaactccccacccgaaccattctcaaccccgacctacacaagtggttttagaactcatatttagaaaaagttctgttaggttcttagtagcagtcggcgacctttttctatttcctcctcactcctgggcctttatctacatacgtctcttgaatttgattgaacaaattactgcccctgtagaattaattaggcggcttaggggagagcctaacatcctgcagagacaaatcaaaagagatcgcatcccaatgccaattgtgtgttaatacagaaatgaaaagaacaaaatgccctaacatatatatgcacatcactccagaggatttgcgaattaggctttcgaaagcgcccgagtctgctgccgtatcctgcttttttattattagacaaagaaagagagtgacgatgtcatatattaggaagattcctaataatacccaatgagcggaatcagaaggggccgggttaaccataagaggcgtaatactgaccccgtcccagccaattcgaagttccaagataaatttgctattctgatagatagtggcaaacattagattgttgtatccn

SEQ ID NO: 3659 - DNA, 776 bp, Glycine max
  misc_feature (1)..(1): n is a, c, g, or t
  misc_feature (16)..(16): n is a, c, g, or t
  misc_feature (39)..(39): n is a, c, g, or t
  misc_feature (69)..(70): n is a, c, g, or t
  misc_feature (90)..(90): n is a, c, g, or t
  misc_feature (113)..(113): n is a, c, g, or t
  misc_feature (182)..(182): n is a, c, g, or t
  misc_feature (191)..(191): n is a, c, g, or t
  misc_feature (200)..(200): n is a, c, g, or t
  misc_feature (254)..(255): n is a, c, g, or t
  Probeset Number=SeqID_13438
ngttgtctttgtcagnacctctaaatctgaacactgacntactctctcataatgtgtcgggtgggttgnntccatccctcccgcccagtntcccgtttcttccgtccttttgncacgcgaccctcgtctacctcacgacctggccacggtctgcgctcctgaaagtggttttgtgttgctcnctctcctcngcgggcggngccctcccgtcgtcacggaattgttcttcttctcccactcgtttttacccgggnngcccctacttggcctgcgcttctcgcccaattagaggcgctcccccagggcgggtttgtgtactttccaccccctctccctctatttctttccccattcagggtcctttttatttttgggttcaaaaacgcactgaattaccgggggggttcttcccaaaattttaggggggacgggccttatttccaaaacggggttggggggcccccaaataaattttttttgttttttcgaacccgcccccccccctttgggggggggaaaaccaactttccgttgcgagggatccccggggaggaaggggcgagggaattggaaccattacttgagttcgcgcgctaccttgggatcccgggctgaggactgaggttgggaccccacagagaccataagtcagagggagtgctttggggataagtgaagatgatggagcgtaacgcttcgaaaaaaccggtaagggaggcaaggacgatgatgccgtaagagaaaatgagaggaatagtgccaatcggaatgagact

SEQ ID NO: 3660 - DNA, 676 bp, Glycine max
  misc_feature (12)..(14): n is a, c, g, or t
  misc_feature (77)..(77): n is a, c, g, or t
  Peptide Sequence Number=SeqID_8230
  Probeset Number=SeqID_13439
ggctcgaggggnnnttttgttccaaacgacccttccctattcctcctcttctcctttaagctttccgcttaattttncataacccttacccatacttcatattacccgtatctcttcaccacctaaaaactacccattctttcaaggagagcaaagtagcattaagttttctcgttgtgcacatgacatccgtccatacgaattgatccattttctagtcattcgatggctgctgaaaaggaattcttagcaacttaacaaaaatatctacccgtaaatagaaccctacagtacaagagtcttgaaggtgtcagatcttcacacaattgactgtgagcaatcatgaaaccccacaggccatgctgtggtggtcattcatggcggtcctggagggggaacttctacaagcaatcaggaacattacttgatcctgactgttacctgaataggtctatgtgatcagcgaagtgcagggaaaagcacaccacatgcttgcttagagcaaaacaccacatgggacctcattgatgacattgaaaagctgagagaacacttggagattccagaatggcaggtatttggtggatcatggggaagcacacttgcccttgcgtacagccaatctcacccggacaaggatactggcatgatcctcacggggattatccttttagga

SEQ ID NO: 3661 - DNA, 416 bp, Glycine max
  misc_feature (95)..(95): n is a, c, g, or t
  Peptide Sequence Number=SeqID_8231
  Probeset Number=SeqID_13440
ctctttttgttcttcagtcttgagctcttttgcagatttctcgctattacgattctgtgaagatgttctcggcgcagaacaagatcaagaagganaagaatgctgctccaacggaatgcgaggagcaagttgctcaggctctgtttgatttggagaacaccaaccaggagttgaagagcgagttgaaagatctttacatcaaccaagctgttaacatggacatcgctggaaaccgcaaggctattgtgatatacgtcccattcagattgaggaaagccttccgcaagattcatccccgtctcgttagagagcttgagaagaagtttagtggaaaggatgttatctttgttgctacaagaaggatcatgcgtccaccaaagaagggtgctgctgtgcagaggccacgcaacagaact

SEQ ID NO: 3662 - DNA, 1305 bp, Glycine max
  Peptide Sequence Number=SeqID_8232
  Probeset Number=SeqID_13441
gaaaagttttatagaacttataaaagggtagtggaaaggccgaagtcttttaatatgcaggtcatatatattcttatgaatttatgcacctacctactagtcttcctctctatattatgtatatatagaagttcgttatgcagaggttccgatatgcatcctagctcctactaccataccatactcccactacagagatatgtagacatgaacctacacacatgtaattgtacggtattacttctttatgaaccctttatataggctaccctatgtgtgttcccctcctgtctcgatgttcatgttcttgtgctctcctgtgtgttctcctctcctcttcgaatatgaagttgtatatatagatatataaatatatccagtatattaatcatgtaaacacataaaccactttatataccttagctagttgtatatagctattgtaaaaagcagcctaggcttaattaaacatcatcaattaaatsttctagcttctatagtgtgcaagcttaaatctgtatgtattaactgtaaattgattaactcactactgattagcgcttattattaaatttggaagctagcttgagttggattgagcaaagctgattctgccataatggtagagatgccaatctcaagtgaccaagctacgatcaactctcaagccttccattaagtatcattcttattattatctgattatgtatcttctaagcttcttattgtatcatacactttgtatctatcatagcttgatactccttatctttgtataaatctgctaaattagccttgtcttagcgtctcttattaattatcgttaaatttgtttaactcttagcatccttattttaaatcttctatcttgtacgtgtcttaattactgtagttaaatctgcttatcttccttattggtacgcttaattattatcttgttaaaattttaagttctccaaaaattgtcattaattagtcgtggcttatcttcaaaaagttttcattttgtaaccccaaaaaaacctgtactcaagcttgagtctactttatcttaggtgacgtcagtgtggttcttcactttatagtaaaaccgatgttgatccgaaaaatcgtaagattcctattagcattgacattgagtcagtcttcgaatggctaaagtgagttccatactcaggtgtagttttatgtccttaagcaacactaggtgttgtttcctttagtaattaagtcatatctgcgaactgtgaacaaactaattttgaacttttgttgtgaataaaatagtttgattaatttatattt

SEQ ID NO: 3663 - DNA, 1716 bp, Glycine max
  misc_feature (1)..(1): n is a, c, g, or t
  misc_feature (28)..(28): n is a, c, g, or t
  misc_feature (35)..(35): n is a, c, g, or t
  misc_feature (115)..(115): n is a, c, g, or t
  misc_feature (421)..(421): n is a, c, g, or t
  misc_feature (434)..(434): n is a, c, g, or t
  misc_feature (568)..(568): n is a, c, g, or t
  misc_feature (629)..(629): n is a, c, g, or t
  misc_feature (631)..(631): n is a, c, g, or t
  misc_feature (638)..(638): n is a, c, g, or t
  misc_feature (735)..(735): n is a, c, g, or t
  misc_feature (737)..(737): n is a, c, g, or t
  misc_feature (744)..(744): n is a, c, g, or t
  misc_feature (758)..(758): n is a, c, g, or t
  misc_feature (812)..(812): n is a, c, g, or t
  misc_feature (985)..(985): n is a, c, g, or t
  misc_feature (1022)..(1023): n is a, c, g, or t
  misc_feature (1027)..(1027): n is a, c, g, or t
  misc_feature (1059)..(1059): n is a, c, g, or t
  misc_feature (1063)..(1063): n is a, c, g, or t
  misc_feature (1068)..(1068): n is a, c, g, or t
  misc_feature (1080)..(1080): n is a, c, g, or t
  misc_feature (1102)..(1102): n is a, c, g, or t
  misc_feature (1127)..(1127): n is a, c, g, or t
  misc_feature (1178)..(1178): n is a, c, g, or t
  misc_feature (1191)..(1191): n is a, c, g, or t
  misc_feature (1213)..(1213): n is a, c, g, or t
  misc_feature (1301)..(1301): n is a, c, g, or t
  misc_feature (1303)..(1303): n is a, c, g, or t
  misc_feature (1330)..(1331): n is a, c, g, or t
  misc_feature (1342)..(1342): n is a, c, g, or t
  misc_feature (1459)..(1459): n is a, c, g, or t
  misc_feature (1481)..(1481): n is a, c, g, or t
  misc_feature (1499)..(1499): n is a, c, g, or t
  misc_feature (1504)..(1504): n is a, c, g, or t
  misc_feature (1522)..(1522): n is a, c, g, or t
  misc_feature (1573)..(1573): n is a, c, g, or t
  misc_feature (1586)..(1586): n is a, c, g, or t
  misc_feature (1613)..(1613): n is a, c, g, or t
  misc_feature (1626)..(1626): n is a, c, g, or t
  misc_feature (1628)..(1629): n is a, c, g, or t
  misc_feature (1631)..(1632): n is a, c, g, or t
  misc_feature (1650)..(1650): n is a, c, g, or t
  misc_feature (1666)..(1666): n is a, c, g, or t
  misc_feature (1669)..(1669): n is a, c, g, or t
  misc_feature (1678)..(1681): n is a, c, g, or t
  misc_feature (1693)..(1694): n is a, c, g, or t
  misc_feature (1697)..(1697): n is a, c, g, or t
  Probeset Number=SeqID_13442
ngtgcgagtcagtagtcttgttgttctncatgcangtacccgtgcgtcgtgcagcatgcacagtgtcgtcttgactgaggagaagcatgacgtagtagtagttcatgatgactantcacaagtagacagctgctctgcacggatcggagtacaggacgtgacgttgagtcgaagtagtatgtgctaagagatagatagtcagtagtccgatcgagtgtagtgatatgtactctattgtcgcagaccgacacactcatcgcacaccgaatcaagatatctggcacgggtactccctctacaagacacatgtccgctatacagacagtactacataatatctatagctcgctagatatacttaacgcaagaatatgctatactatatacaccgtcatctgatatataatatcgatacagaatnaatcatgtagaantccgtctaggatagtacgaccgtcaacttcattatatactattacagtactctgcatacgcaatatctcatggcggacgtctgatgcaagctcacgacacggcgtgtagtgagtggtttgtggtagtcctatcnacctcactcgcacactgcatacatatagataccctcgacatcacacaccacacttgtgctngntgtgtcnccgccgctggtgtggggtcggcgctatcccacaacacaatactcaacataccaacacacactatatatactcatgagagcaagtcaacatgcggtgntntggtgtngtgtgggtgtggtnttctacaacactccacgactgtcgttagcgactcgcgtgctggtgtcgatcganagagatgtagaggagcaggcgcctgctacacatctctactggtagaatagagcgatagacagatacacacactatgatcaggagcgaggagttctcgtatgaattcttgtcgtgtgtgctcactcacacaccaggtctccgacagcacttccatatcgagcattaggtcgtgnaatgggaaggtgagtattatactgaggcgatatgagnnacgncgcacacactcactacaccaccacgacacacnatcncacancgcgctcacacnatctagcgactgtgcaagatantgagagacactctttcatctctacnatagattcgcaaggagattgcatatgctccgtactacctactcctcacatntctctcatactcntctcctctgtctgcgactctcnccagctgtaatgacacaatcatgtattggcacatgtgcacggatcgaacagcagaatagacgtcagaccagtgagagtagtcgtgacntnatgtaatctatagagtgtcttgtttgnntagtatgatgntgtatatgtgtcgagatacgatatcagtcgagagcgtggtgtacatactccgactatatgtagtggtcgtatataatgtagtactgtgatgaagtggagcaagataagatgatggangaatcacacacactacactaancgcgacgctctcatggtnattanattggtggaggagcgagngggcggcgagccgcctcgccagacgcatcagtcataccacctctagaggangggtggtgtctcntgttgctcgctcctactggagttagcncaccactcacctncnngnnctaacacaccccctcccnccactccggtgatggnacnagaggggannnnccagaaacaagnnagngccaacccacacacccctc

SEQ ID NO: 3664 - DNA, 522 bp, Glycine max
  misc_feature (520)..(520): n is a, c, g, or t
  Peptide Sequence Number=SeqID_8233
  Probeset Number=SeqID_13443
tcgagtcagctacgtaggcccccccccccccgatactccaagaaactcaagcctgaatggaagaaattgcacgagattttaaccaccgaaaactccaaggtcaaaactgctaaagttgaagcttatgatgaaaagaagcttgctgaagaatatggcattgaaggataccccaacatcaaattattcatcaagggccaacccgtcgactaccacggcctcagagtcgctgaaaatatccacgagtttgttgaaagacagttgaagtccccattgactgaagtcaatgatccccaagtgattgaaaacaagctcaaggcaatacgaatggattgtagttttgatcggtcaagaagccaatcaagctcttcttgacgttgctgctgaacaaggagacgtcttattccttcgcactactcaagattctatcaagggcaagtatggcaacccttctaacggtcaaatggtccttgttaacaatatcactcatcattacaccactttgaccgatttgggaagcaangc

SEQ ID NO: 3665 - DNA, 2974 bp, Glycine max
  misc_feature (1)..(48): n is a, c, g, or t
  misc_feature (2731)..(2731): n is a, c, g, or t
  misc_feature (2974)..(2974): n is a, c, g, or t
  Peptide Sequence Number=SeqID_8242
  Probeset Number=SeqID_13444
nnnnnnnnnnnnnnnnnnnnnnnnnnnnnnnnnnnnnnnnnnnnnnnnctttgttaggcaatacaacatttattacgcatactcaaagtagcttcgaagttcgtatttttattggcatatcatggagaataataatcagtcgttttggcaattcagtgaccagctgaggttacaggcatctaatttggcgaacctttctctaaacgattcgatttggagcaacagttacatctccaagaggcgtgatgaaaggattaattttgacatcaaagttgggggtgagatcaactctttcaagtcaaaggagccagcttgtgattacaatgaaaacatgaatggatctcttcttgccgtccgggctcagaaataatctcaagggctacaagacatattttaagggtgaagatcagtttcacacacccaaaagtgccaagaagaagaacaccaccaacaacaccaacaacaagaagcatggggacaacactaataataatgatggcacaaagactggtgctgagaagaaattcaaaacacttccaccatcagagtctctgcctaagaatgaaaccattggaggctacatctttgtttgcaacaatgataccatggcagagaatctccaaagacagctctttggtgtgtcccctctccttttttttttcttcttgttttgctctctttatcaaatcttatttttcctttaatctaattcgcggttctctatattttcaataacaataagttgaatcctttgaggaattgatatgtcaagaaattcttcctttctaattctaaattgattttgctgacagatgtttcttgtgctttgtaggtctgcctccacgatacagagattcagtaagaacaataactccagggctgcccatttttctgtacaaatactccactcaccaactccatggtatctttgagacatcaatcgtaaattttcttttttttattcattcttcttcttgttctttgttaggcaatacaacatttattacgcatactcaaagtagcttcgaagttccacccatcatcaatctttatttaccacttgcctcctcttttttcctcttcttcaattcatatcatatcaattttcttcttcaattcatatcatatcaattagatttgttttcagagtttgcaaagtgagataccatggacaacatacaacagcaatgacttttggaaattcagtgaccgtcttgaggctttaatctggtttggccaattctgtctctgacatgattattccatttggagcaaaagctacagctccaagaggcctgatcagaggaggaactttgatgtcaagggcagtgatttcaacaactcatcaaagccttttgatgatgatttcaatgatggctggaagatcaccaattccaatggaccccttttctctatgcctcacaacaacaacactcacactcttgaagttggaggcttcaacaagggaggaatctattccaacaccaacaccacttcctccttatatcctaaccttaacaacaacactcttggaggcttcaacaagggaatctattccaacaccacatcctcaccctatcttaaccttaacaacaacaacaacaacaacaaccacctcaacaacaaccttaacagcaataatctcaagggctacaagacattttttaagggtgaagatcagtttcacacacccaaaagtgccaagaaaaacagcagcaacaacaacaacaagaagcatggggacaacactaacaataatgaagccaccaagactgctgcagagaagaaattcaaaacactgccaccatcagagtctctgcctaagaatgaaaccattggaggctacatctttgtttgcaacaacgataccatggcaagagaatctccaaaggacagctctttggtctgcctcccacggtacagagattcagttagaacaattaactccagggttgccccctttttcttgtacaactactccactcaccaactccatggtatctttgaggctgcaagttttggaggatctaatattgatccaacggcttgggaggataagaagtgccctggtgaatctcgtttccctgctcaggttcaagtgattactaggaaagtttgtgagccactagaggaagattccttcagaccaattcttcaccactacgacggccctaagttccgtcttgagctgagtgtgcctgaggcactgtctcttctggatatttttgcaaaccagaacagtttcgatgacattttcaaagtcattccagcatagaaggggtagaaattatacaagaagagaagttacgagcacaatggataatgaatgaatactgtggactcataatattagagtgtcagaagataattaagacaatgaaaatatggtgggggacgattatattgaattccagcccttatatatttatttgttataattactataatgttattagtatagaggctgttatgcctggttgcccattttttcttgttatgggtgtatatgaacatcacataaaaacaatacaataagaaggaactaactttgctcaaggttttatctgcaaaagtgttaaaaaggaactcaaaatatagtggagaagtgtgaaaccatggtggtccatttcagtgttattcatacattatatacgtgtgctttaaacattaatatgctttaaagtttttataacccaaaaaaaaaaaaaaaaaaaaaaaaaaaaaaaaaaangaaaagtgtgcgtatattttcttttttttagtctgttgctgcatcactttaatttgatgaaaatgcttttgtttctggacatcaagctatggattaggccatctgttttacctttagcaactatggtctaactaaaggcaataataatgactaaatggttggtggggtttgttcaggctgcaagttttggaggatccaatattgatccaacggcttggacgacaagaagtgccctggtgaatn

SEQ ID NO: 3666 - DNA, 1458 bp, Glycine max
  misc_feature (147)..(147): n is a, c, g, or t
  misc_feature (330)..(330): n is a, c, g, or t
  misc_feature (432)..(432): n is a, c, g, or t
  misc_feature (621)..(621): n is a, c, g, or t
  misc_feature (634)..(634): n is a, c, g, or t
  misc_feature (819)..(819): n is a, c, g, or t
  misc_feature (898)..(898): n is a, c, g, or t
  misc_feature (997)..(997): n is a, c, g, or t
  misc_feature (1033)..(1033): n is a, c, g, or t
  misc_feature (1340)..(1340): n is a, c, g, or t
  misc_feature (1370)..(1371): n is a, c, g, or t
  misc_feature (1373)..(1373): n is a, c, g, or t
  misc_feature (1375)..(1376): n is a, c, g, or t
  misc_feature (1390)..(1391): n is a, c, g, or t
  misc_feature (1394)..(1394): n is a, c, g, or t
  misc_feature (1401)..(1401): n is a, c, g, or t
  misc_feature (1433)..(1435): n is a, c, g, or t
  misc_feature (1437)..(1438): n is a, c, g, or t
  misc_feature (1440)..(1442): n is a, c, g, or t
  Peptide Sequence Number=SeqID_8243
  Probeset Number=SeqID_13445
cttcgtcgtgtgtgtatggtgtgcctggctcttagtatatgtgttccacgagtcatcgcttcacgagcgaggtcgtacgcacatagtacatacggatcgagtgcacacgagatatgaggaatggtgtatgatgagtggtgataggangcactcagcgggatggtgcgcgagaatatgttgagcgtcattgcgtggacatgagagcctacgtcgcgctgcgtcgtagtgcgcgccgtggcgcgatgccggcggacggaggcacgatatagtgtgcagtatagagtatgaccgaggcgtggctgctgcgcgtggtttgtaccgccgactganagcagcgcgatgtaaatgtccaagcacgctattgcgcagtgggtgaggcgtggccgggggcgtcaacaatgcccgccgtcttcatggctagcattgacatanacatgatgtcgcttgatatctcttaaggtgatcctgttctgagttctgttacttaatccttcttcgtgcgccgtcgggctattatacttcctctaataacgcgctggcgtgggcgaggggtgtgcagcgataacatgaccctgtctatctagtcgattgctttcacatcacacagcctggtgctatagntatactcatacanttctagcatgtggattataatgagtaacaatcttcgtggagtaggttggtgttctgtcttgttcttgtccgtgtctcgtgctttgtacacgttgtcttggcgttgcagctgtggcctctatgccgcggccgtacaacatcacgtgtgttgtgtatcatgttcatagtatatatttatacgtacgnctgttattatatctcgtgacaacacacgcgacagcgtggggtggttgggcccgacacacccaggaggctacacctgtantggcgagtaggcaatctcccaccatcacataatactactgtcatctcaccttttctctatatagcatactcatttatatcttcctctcttgagcactcntatagcagatcgctcagttcggctgtgcatgtcatngcggtgctagtgtctgattaccacttgcttgtctctgtctcttttctgtgcgctggcgatatccgctactcttcgttcctcttgactctatcactcgactcacgttctcatgtcatctcctctctctcacactctcacccgcgcccgtgacatctcctcacgctggcgctcccgagagtagagaagacacacgggtcggcgcgtccctatccgcacacacgcgcggaaggaagagaaatatagaagagaagagaggctgttatctcggataatcccatactggtgccttatgaggagagggtgtgcncgctcctactcctcacattctgccgccccnncncnngcgccggcaggagnngtnagagaanaggcggccgggagagaccgcggcagagagggnnncnncnnncccacctcccaccaca

SEQ ID NO: 3667 - DNA, 582 bp, Glycine max
  Probeset Number=SeqID_13446
aaattttataccaaaaacaacaaaataacccataaacaatttcacaatggacacaatagtctttcgccctattcaagccaagcttcgtaacaataaggatatcatcaaaaagatggatccctactgtaagtttacgcttggagatcaaagcgctagttcctatgtcgctgaagctatgggatgttatccttactggaacgatgaaatttcactagagagaaaacatgatgagcatgctgcgaaaattgtgttgaaagataaggacatgttgtatgatgatactattggagaagcaaatattgaccttgacaatgttattttaaatgggaagatgaatcaatggtacaatattgagcagggtggagaggtaactggtgaagttttggtacagattgagcgtaaatctaaatagatgagatatatattgttatgtttttaacttgtttataaattatactttttggagacaatgtctttgttgctctttattgtgttgttcagagtcgctttgmcaacatgtttttcatatccttaaataacgaaaacttttatcaactgattccttgatcatttgagatatct

SEQ ID NO: 3668 - DNA, 1003 bp, Glycine max
  misc_feature (601)..(1003): n is a, c, g, or t
  Peptide Sequence Number=SeqID_8244
  Probeset Number=SeqID_13447
ttacggctgcgagaagacgacagaaggggacacctcagaagaacagaacagaaccaccagtgcttttcaaagacggatttgatctctagtctgtctaccaagtggaatgaaccagacaccccccctcagacttgatgctgtggagagtggagttcaaccacaagtccaaaacctttaatggtttcagcaatggcgttcttaaataaaattggaaatctggtcaagaattctgctgtcaagcacatcaatcaagatttttcagtgtctaccccatcacttttccaagcaattagatccatgtcatctgcaaagctttttgtcggaggtatttcttacagcactgatgatatgagtttgcgagagtcttttgctcgctatggagaagtaatagatgtcaaggtcattatggatcgtgaaactggcaggtcaagaggttttggcttcataacttttgcaacaagtgaggatgcatcttctgccattcagggcatggatggtcaggatccatggtcgcaggatattatctgttttccgtgctaacttttaaaattgacattcatgacactttcacatggtaagcatggtgttatatcctcatatnnnnnnnnnnnnnnnnnnnnnnnnnnnnnnnnnnnnnnnnnnnnnnnnnnnnnnnnnnnnnnnnnnnnnnnnnnnnnnnnnnnnnnnnnnnnnnnnnnnnnnnnnnnnnnnnnnnnnnnnnnnnnnnnnnnnnnnnnnnnnnnnnnnnnnnnnnnnnnnnnnnnnnnnnnnnnnnnnnnnnnnnnnnnnnnnnnnnnnnnnnnnnnnnnnnnnnnnnnnnnnnnnnnnnnnnnnnnnnnnnnnnnnnnnnnnnnnnnnnnnnnnnnnnnnnnnnnnnnnnnnnnnnnnnnnnnnnnnnnnnnnnnnnnnnnnnnnnnnnnnnnnnnnnnnnnnnnnnnnnnnnnnnnnnnnnnnnnnnnnnnnnnnnnnnnnnnnnnnnnnnnnnnnnnnnnnnnnnnnnnnn

SEQ ID NO: 3669 - DNA, 666 bp, Glycine max
  misc_feature (135)..(135): n is a, c, g, or t
  misc_feature (271)..(272): n is a, c, g, or t
  Peptide Sequence Number=SeqID_8245
  Probeset Number=SeqID_13448
gttttcgttacgatcctgataccataaggcaggaacagggaagaaaaggaccagggtgttaaatattggctccgtcgaaatagaaaaacatgaaaaacttttgacatgttgagtgagaaagattgaaaaggtgcncgagaacaggttctttgtggacgatgtgccaatcacggtgttcaagaacagcaaggacttgggagtgaaattccccttcgaccagccaatgaagatctacaacagtctatggaacgctgatgactggccccaaggnngtggtttgtagacaacggattgttcctaagccccattcataccaggctacaaggggttccacgtcgacgtctgcaagctctcgaccgaccccctggactccgaaacccaacccctgagcagtgccctcctaccaaacccccagccccaaacgctcccctctgacgcaaccacctcttcctctccccacattcttccctcctcccccttctctcccgaccctacatctctcccctccaaccccaccccatacacgcctcccataccgcctcctctcaactctttccacctcaccttctcaccaccttatcgttttataccttatccatctcccacctctactccctcctcacatctctccctctcacctccccttcgtttctttacctttctccc

SEQ ID NO: 3670 - DNA, 1489 bp, Glycine max
  misc_feature (43)..(43): n is a, c, g, or t
  misc_feature (50)..(50): n is a, c, g, or t
  misc_feature (54)..(54): n is a, c, g, or t
  misc_feature (131)..(131): n is a, c, g, or t
  misc_feature (229)..(229): n is a, c, g, or t
  misc_feature (348)..(348): n is a, c, g, or t
  misc_feature (388)..(388): n is a, c, g, or t
  misc_feature (460)..(460): n is a, c, g, or t
  misc_feature (546)..(546): n is a, c, g, or t
  misc_feature (922)..(922): n is a, c, g, or t
  misc_feature (947)..(947): n is a, c, g, or t
  misc_feature (1032)..(1032): n is a, c, g, or t
  misc_feature (1073)..(1073): n is a, c, g, or t
  misc_feature (1134)..(1134): n is a, c, g, or t
  misc_feature (1199)..(1199): n is a, c, g, or t
  misc_feature (1347)..(1347): n is a, c, g, or t
  misc_feature (1359)..(1359): n is a, c, g, or t
  misc_feature (1401)..(1401): n is a, c, g, or t
  misc_feature (1405)..(1405): n is a, c, g, or t
  misc_feature (1409)..(1409): n is a, c, g, or t
  misc_feature (1412)..(1412): n is a, c, g, or t
  misc_feature (1438)..(1438): n is a, c, g, or t
  misc_feature (1440)..(1441): n is a, c, g, or t
  misc_feature (1443)..(1443): n is a, c, g, or t
  misc_feature (1449)..(1451): n is a, c, g, or t
  misc_feature (1453)..(1453): n is a, c, g, or t
  misc_feature (1456)..(1472): n is a, c, g, or t
  misc_feature (1475)..(1476): n is a, c, g, or t
  misc_feature (1483)..(1483): n is a, c, g, or t
  misc_feature (1489)..(1489): n is a, c, g, or t
  Peptide Sequence Number=SeqID_8246
  Probeset Number=SeqID_13449
cctaattagtgagtgcatatgatctatgttacacgatcatcanacgtacntgtnttagttcattgctatcaatatgcagtggtgtgtgggtaggcgtggacagcacgcacacgtggattcgtaatacactncctcaagcagacatatcaccacaatctatccacacgaatctctaccgccgcgctgcgtaggcgagagcgcgcgaagcaggtcaggcgtagcaggggangagaggagggagcgagcagtgacagcgcgctggaggagttggaggagagagggagagagaagagagaagagctaatgtaatagatcatgaggtcggcgcgctgctagcagcgtgagggngagcagtggataagagaggagcgctaggattaagtatganagataaacttatgacgatatagtagagatgatgagtagagagaaagtgaaggagatagacatgtgttgctcnttgtgttgtgttcgaggaacgcgagagagagtgttgctggtgggtgaagaggattaggaagatatataacagaatactctgatcgnggggtgcgagtgtgtgtgccgtctcgtgtcatggcagttgtgtgcggtcataatgttgcgtagccgtgatgtgtcatcactacatactactagcaccattacaatatatcagatgaacacacatagagaggtgcggggacggggtgtgagagtgtaggcacgcgtagtagtagagatggtgaggagggtcaagaacaacgcagtctatacgacaccacacatactccagctacgctatatcgatcgcgcgaggctcgcagtgagacgagagaggagatagagtggaaagaagagtgacgagaagcacgagctgacgagactgaacgtaaagcagcatcagaaaagagtgagacgtaaaattcttcagtgctttctnatacgcacgtgtcgctgtcaattcnctgtccatatagaaaattataacgatataaagaacgacataagacatttatatatgctctatttatattattatataatcacgancaacaatatcaacacacggatagtggggcgaagagagcggnggatgagcgaggaaagagagaaaggagtacgagaggacgggacgcgagagatcgtcaacgngagagagatatagagagacgagggtggtaggtgtgtatctggagtatattgagcttaatgtgaanggtatgaaataattaactgatatgacgaattgacgtacaattggtggtttagtagaagggttgatattacaacgaaagtcagtccacgccgtctcctctccgctcgcacccgcgccgccgcgcgcctcggccaccactcacggtcgcntccaaccgccgncgcccccaccacgcgtgtcgcgttatacctccgacccttcgnccancccntantcttgcgcgctctcaccatctctccntnntncccccnnngnttnnnnnnnnnnnnnnnnnccnntcccccnaaaccn

SEQ ID NO: 3671 - DNA, 1424 bp, Glycine max
  misc_feature (18)..(20): n is a, c, g, or t
  misc_feature (27)..(41): n is a, c, g, or t
  misc_feature (43)..(43): n is a, c, g, or t
  misc_feature (48)..(49): n is a, c, g, or t
  misc_feature (52)..(53): n is a, c, g, or t
  misc_feature (55)..(64): n is a, c, g, or t
  misc_feature (66)..(71): n is a, c, g, or t
  misc_feature (75)..(75): n is a, c, g, or t
  misc_feature (77)..(80): n is a, c, g, or t
  misc_feature (82)..(82): n is a, c, g, or t
  misc_feature (86)..(87): n is a, c, g, or t
  misc_feature (89)..(91): n is a, c, g, or t
  misc_feature (93)..(94): n is a, c, g, or t
  misc_feature (172)..(172): n is a, c, g, or t
  misc_feature (227)..(227): n is a, c, g, or t
  misc_feature (232)..(232): n is a, c, g, or t
  misc_feature (281)..(282): n is a, c, g, or t
  misc_feature (292)..(292): n is a, c, g, or t
  misc_feature (333)..(333): n is a, c, g, or t
  misc_feature (568)..(568): n is a, c, g, or t
  misc_feature (614)..(614): n is a, c, g, or t
  misc_feature (620)..(620): n is a, c, g, or t
  misc_feature (1146)..(1146): n is a, c, g, or t
  misc_feature (1190)..(1190): n is a, c, g, or t
  misc_feature (1387)..(1387): n is a, c, g, or t
  Probeset Number=SeqID_13450
gggggcgggccccccccnnnccccccnnnnnnnnnnnnnnncngtggnnggnncnnnnnnnnnncnnnnnncggnannnnanactnngnnnanngcgccgtccatagatagtgtatgtgaggaagcgcacccctccatactgctagagaacttcttggttctaggctatgcngcccccccctctctatctaagatacatattatgtgctctccatactgtgaatcgncatgntgtgggtatgacttgtttataatcacgtatcaggatacaaaatgagggnngtagataaangatacacagatcacacaaacacccagcatcaccacgagaancccgcacccgagtgtcgtcacaccaaccggagagtatactaaaacaagtggagatatataaatattggtcgtgaccattctttcgtccgttaaatatttattatgttactgagacgcgccgtgtgacggaggccgcctgaacagccgggcgcgcttccacgcagacatacgggggcgacactacctccacacgccctcgtacaatccctaatgcggagtacaaatgtgcgcctgntcgtgaaatgtctgtagatatggggtgggtctagaggatatgatgngtgggnacaacgccgaggctcaacgaagcgtaaggcctacgagtgccatcggtgatatatataaggggcgcaccgggcggcaaaccagaacacgggtcaagagggggagtaagtattactaagatacacagtgtttactttatattatatactaggggagtcatctccggcgcggtgtctccttttatctcgctgtgtggaccttatgctgttactggtagtaggtggttgtggcccgctggggataagcatggtatgtgggacacccgcggtggcatatgcgaggatggtgtgggatatgagggcgttcggcgcgccgcaccacggacaccccgcaggcttaatgggtgccgaagcgacaccgccgagtctgcgcgcgcatcttcggcctgcgcgaaccggcgaaaactaggtacaaaggcgcacgtcgtcatacactcgcacgtcgtgtacaacgcacataaacacggaaaggacaatcaggtgaaaagcgtacgaacatcgcaatactactccgttcaatatggtgaantcgtggtcggctctggcgctgacaaggacgacaggctgtatggntatcaattattgacacacgtgtgtgggcgggacgcatggatgcaggtggcgggcctggtgatatatacttgtaacaacactctgttaccgtgatacgtggcggcgagtcgcgggaattattaatagagtgtgaggcgggtcgagccggaataaaaacacagaagatggagtgacacacgagaaatgcagagacgcanacggtcgggcacgcgtgcggagagagatacagaaaca

SEQ ID NO: 3672 - DNA, 645 bp, Glycine max
  Peptide Sequence Number=SeqID_8247
  Probeset Number=SeqID_13451
aatcatggcaaccttgttttttaatcattgcccctttcaaactgcaagcaaaaatccatcccttgttgcccccatagtgaagtgtccttcttctttaaggtctgtgaagagcgtttccagatctttcggcttgaagtcggcctcttcctttaaagtccctgccatggcttttttcaaggttaagctgattggcccagatggaacaaagaacgagtttgaagcccctgccgatactttcattttaaatccaccaaaaagggctggagttgaacttccttactcatgccgaggtggagcatgctccccctgtgctgggaaaattgtttttggttttgtgggccagtccgatggctcattcctcgatggcaacccactgaaggaaggctttgtttttacctgggtttcctatccaactgcagactgtgttatttaaactcccaaggaaggggattttttttgagcaatgctggccttgaagttgggaactgggaatttaaggtagactttgcaactagttttcttgggctgctttaaaaacaaatttttttttttgattattagtgatttggggtattgaatttttgtttgtgcagcaagccctgttttttaattaataaaacgataagccccttcggttggcttttt

SEQ ID NO: 3673 - DNA, 616 bp, Glycine max
  Peptide Sequence Number=SeqID_8248
  Probeset Number=SeqID_13452
ggaactgataaaaccaataccatctgtgaaaaagttacctatcaccttaattctgccttctgatctgcctactgatgccattggtgatgaaaagcgacttacacaaactctgttgaatgccgtgggtagtgctggcaaattgactaaggagggctatggtactataagagtatcggttgctaaaccaaaatctatacaggatcggcgacctccacagttgaatacagcatctattgatgaccattcctacatactagtccaattaaaggactctggatgtggcatttccccacaagaaatctcgcatctctttaccaaatttgtccaaactctgaatgaaccatctctacctagcagaggtacatgtcttgggcttgccattcttgaaatattactagacctcatcgaacgccacatatctatctagactgatggtcctaacaaatgaatcacacgtacatatatgatcaaacttcagattttgaactatccatatccatacgatcatcaagctacagacagaagccaaccatacagagaacatgttctgctatctagatgtataccgctgatcatatatcaagacgacactatctgtgttactagacacacgcga

SEQ ID NO: 3674 - DNA, 2026 bp, Glycine max
  misc_feature (22)..(35): n is a, c, g, or t
  misc_feature (43)..(43): n is a, c, g, or t
  misc_feature (45)..(45): n is a, c, g, or t
  misc_feature (48)..(49): n is a, c, g, or t
  misc_feature (67)..(67): n is a, c, g, or t
  misc_feature (70)..(71): n is a, c, g, or t
  misc_feature (77)..(79): n is a, c, g, or t
  misc_feature (82)..(82): n is a, c, g, or t
  misc_feature (98)..(99): n is a, c, g, or t
  misc_feature (120)..(120): n is a, c, g, or t
  misc_feature (123)..(123): n is a, c, g, or t
  misc_feature (127)..(127): n is a, c, g, or t
  misc_feature (281)..(281): n is a, c, g, or t
  misc_feature (298)..(298): n is a, c, g, or t
  misc_feature (311)..(311): n is a, c, g, or t
  misc_feature (321)..(321): n is a, c, g, or t
  misc_feature (332)..(332): n is a, c, g, or t
  misc_feature (358)..(358): n is a, c, g, or t
  misc_feature (380)..(380): n is a, c, g, or t
  misc_feature (409)..(409): n is a, c, g, or t
  misc_feature (432)..(432): n is a, c, g, or t
  misc_feature (459)..(459): n is a, c, g, or t
  misc_feature (470)..(470): n is a, c, g, or t
  misc_feature (479)..(479): n is a, c, g, or t
  misc_feature (495)..(495): n is a, c, g, or t
  misc_feature (497)..(497): n is a, c, g, or t
  misc_feature (505)..(505): n is a, c, g, or t
  misc_feature (547)..(547): n is a, c, g, or t
  misc_feature (599)..(599): n is a, c, g, or t
  misc_feature (630)..(630): n is a, c, g, or t
  misc_feature (662)..(662): n is a, c, g, or t
  misc_feature (685)..(685): n is a, c, g, or t
  misc_feature (747)..(747): n is a, c, g, or t
  misc_feature (760)..(760): n is a, c, g, or t
  misc_feature (765)..(765): n is a, c, g, or t
  misc_feature (768)..(768): n is a, c, g, or t
  misc_feature (772)..(772): n is a, c, g, or t
  misc_feature (857)..(857): n is a, c, g, or t
  misc_feature (869)..(869): n is a, c, g, or t
  misc_feature (871)..(871): n is a, c, g, or t
  misc_feature (899)..(899): n is a, c, g, or t
  misc_feature (964)..(964): n is a, c, g, or t
  misc_feature (974)..(974): n is a, c, g, or t
  misc_feature (1028)..(1028): n is a, c, g, or t
  misc_feature (1087)..(1087): n is a, c, g, or t
  misc_feature (1166)..(1166): n is a, c, g, or t
  misc_feature (1286)..(1286): n is a, c, g, or t
  misc_feature (1341)..(1341): n is a, c, g, or t
  misc_feature (1393)..(1393): n is a, c, g, or t
  misc_feature (1494)..(1494): n is a, c, g, or t
  misc_feature (1545)..(1545): n is a, c, g, or t
  misc_feature (1646)..(1646): n is a, c, g, or t
  misc_feature (1683)..(1683): n is a, c, g, or t
  misc_feature (1732)..(1732): n is a, c, g, or t
  misc_feature (1789)..(1789): n is a, c, g, or t
  misc_feature (1845)..(1845): n is a, c, g, or t
  misc_feature (1887)..(1887): n is a, c, g, or t
  misc_feature (2011)..(2011): n is a, c, g, or t
  misc_feature (2016)..(2016): n is a, c, g, or t
  misc_feature (2026)..(2026): n is a, c, g, or t
  Peptide Sequence Number=SeqID_8249
  Probeset Number=SeqID_13453
gggggggggggggggggggggnnnnnnnnnnnnnngggggggnanaannggtacgatgagttctacnaannataacnnnatngggtgattgcgcgcannaacttcacaaggagtgttctnctnctcntctttaactatctgtcgcgtttacactgtattctcttcttctctcctccatcacatctcctctctcgtcgtttttatgtgtgtgtctatatctactatatacctgcttctctacatatatattattctatatgtgctatctatccgtgcgattntatatgccttgtatcanacgtactctgggntagatggcgngccgatcaaantacgaccgcataacgcactgtgagangaagcgatgcgcgaccaaccancctaacgcggcgctgcactcggcatgagngtcgcgctggttgtcgagtatcnatcacgcgccacgtcaaatacacaacncaacgcggtgngtgggtagncgagcgttggttgcgngnctctcctngctcctgtcactcgctatggtgctgtgcgcgcggctatgctncgacacaatccacaatctcgtatgcgtgcactcgtcgcgctgtatactcacnatgtcacatacatcactgtcaggtctcagcntgatcgtgttgagtgcgagaagacatagagancacacgcaagagagacagtatangatagagatggggagactactatgacgcaactgtggatggagactgtgtggatgagcgagantagcttgcgagcnacacnacncacngtggtcgcgatgcgtaccatcccaacactgatcgcgcgtgtggctgcgtcatacatactccgccgctgcaactatgcgcgtcacnaggtctgaaatntnatatatatagaatgtagtgtgctggtanatgtcgaatatcatagatagttaggtgtgtaatgatgattgtagtctgtttgctgttctgatatnactatacagngttgacgcgacatatataaaactatcacgcactctgtcgttgtttcggctgtgnaccacatcggcatactacacgactgcactatctcactgcaatcatcggattctccacancactctcacctcgcgtctctaccgagctctcgtccatgtacacttgcgcgtctctcgctgaccacctaaactcctccgnctgtgcgcgcgtgctactcacagctacgcgccgactactcctcaacacgcatctcacactcgctgcacatcgcgtacacagttgcgttagcacgatgctgctcgcacgcatgtgtctacntacgtcggttctcgctctattctatatctatcacgtcgcgtcgcgtcttagccgngctcttatcattatctgtatacgatatgcgttattatcgctgtcggctatantacgtcgtaatgctatctggctgctattcctctcgtcgttctctcgatgtgatgactctctacgctgtggtccatgtatctactgcgcacatacgcatacngcgagcgatgcacgtcgtcggtcgagcgctagctctcatactacgacgccnacgaggcgcgctacgtgtatggtgggtagaatttgttatatctcatcctctgctgttctgctagcacgtgacgactggtctacacgcgtcatacgctacanctgcatataacgtctgtgtgttggtcgctgctgatantcaatgaatcactcaccatcataatctgtgtgttcggatgtcatatatnacatacttgcgtcgcaggtgttgtatgggtctgactgcaatctacgtctctctgttngtcgtcctcgattacgttgctactctgtactcttattgatggtgtatatgtatggngtcatggtgatggtacgcgtgatactagtgctgatgccacanctgtccgtctcacatctctaccatcaactcattaataccacacacgatcgtacacacatggcgcttcatcttactacagcgctcgtcgacgtgtgcgactatcatctctatcatctgctgtacntctcngccgtctctn

SEQ ID NO: 3675 - DNA, 1333 bp, Glycine max
  misc_feature (13)..(13): n is a, c, g, or t
  misc_feature (37)..(37): n is a, c, g, or t
  misc_feature (88)..(88): n is a, c, g, or t
  misc_feature (157)..(157): n is a, c, g, or t
  misc_feature (787)..(787): n is a, c, g, or t
  misc_feature (1115)..(1115): n is a, c, g, or t
  misc_feature (1247)..(1247): n is a, c, g, or t
  misc_feature (1250)..(1256): n is a, c, g, or t
  misc_feature (1305)..(1307): n is a, c, g, or t
  misc_feature (1309)..(1310): n is a, c, g, or t
  Probeset Number=SeqID_13454
ttagatagactgnctgagatagtagcaagctgctcanagtattctagtagagagtattctctctgtcacacgtgtagagtgaagattnctcacacattgattagtagatatctacagagagatagaggtcactacgacagctactgtgattacacanttagtcgaggagattactaagtcgtgacgaggtgatactgagcagatataggtcagtatagcattctaatctgacgacgacgttaagagaggagaggagcgtagtagtctggagactgcgcgtatgacagccatacaattaattaaggctcaaggatatagaggttcgtgggagaataagttgtgtatcttgagagttagtacagtggagtccagatgggatgtgggagtagggcgacagggagacagcaagttagtgacatatgaaggaaacctgaccgcctctcgcggtatgatgcgctgtattatactattagtgagatgtttgtagaaaagatgatatatgaagagaaagtgtgatgtatcatagaagtataagagatgaccactgcctacactgtgtgggtgagggggaaccaactttacatctcaactatacagtagctcttaggatatacggaagagttatgcttcatattacgaattatgtaaggtgtgtctccgtttggattttgttttgtatttatttattcatttataatttcgcagatcttctatttattagctctatctctaagggaatgagattcggagaggacgcatagatgagtactattcgacaaaccgtgcnttgttcttttcctccttccgctattcttggattgtgtatagggatatgaggtaatatatacgaagatttctatatcgtcctgatgaatactctgtatgtctcttgtgatgtactagcactaatatcccagtatgtagaggagagtgctgtagaccgcgccgtagaggcagataagacatgtgagctatctgatagtggattcttgactcgagtgatgagaagagttagagtgacgcctctacacactgcttcaatatctcgactctaggcatgtatgactatgtttatatgatacgttattattgtataagcttatatacaatatatnaagataattataatataaggatggttcttcctgtctactctcccgaggcggaggtatcatccatcttgttctagtatggacgaggcgcggcgctccacgccgaggggaagatagctcggcaccctgcggtgngcnnnnnnngtttataatcataataatgcgttatgatagtgtatgtagggtgaggtannngnntaaaggcaacggccccccacacc

SEQ ID NO: 3676 - DNA, 1353 bp, Glycine max
  misc_feature (64)..(64): n is a, c, g, or t
  misc_feature (497)..(497): n is a, c, g, or t
  misc_feature (947)..(947): n is a, c, g, or t
  misc_feature (1026)..(1026): n is a, c, g, or t
  misc_feature (1056)..(1056): n is a, c, g, or t
  Peptide Sequence Number=SeqID_8250
  Probeset Number=SeqID_13455
tattattttttgcccccccccgcccccttggttttgtgttgggttttgggggtggccccccccncacctagcaacaaagctccacctctctcgaggggtgttattttgtgaggttcctccttttatttttggatatagggaatggtagttgggaccccgcgccaccccccccccataaaagagacgcaaagaaaggtgatgggtagtggtagaaacacaaccaaaactaccttcgcgtccatcacatcccaccgctactttagagaatgggtgcactcatttctgttttttcttctttatggtggtggttggttgatagtgttatttttggatacaagaaccttgggggttagtgctggctacgagctgggtgccccgtgttggtgtgtgtggtttgctctcctcgttgatggtgtatacctgttgtgtagattgtggaggttggtggtatataatcaaataaatatgaaagaaagaaattagttagtttaaagagngattcttacatgtggcctaccggctttcttttttggtgtgggttttcctctctatcttgggtgtggacgttggattttggtgatattactttgtaatgactaggtgagagtatagctgagggaacatgcgcacaactctgtttcatatttgtgcctctgtcctgtgtttcgtgtcggtctgttctcgctcatctgctactcccaccaatacgtgagttattcctcttagtgtgtgagtgtgtattaatattagggtgtgaattatttgttttcacacgtgtgcctcgattataggtgggacggtcctctcggggcgtcttcattatgttctgccgcggcgcctgttgtggtgagtgtggggatcgcaacacccccacccaggcttctcgtgaaatgtccctaccactcagcggctgatggtattattgtttatgtgtttagatgcaccanctcgtctctcctcttccagacccacaccgggtgggggggtggtgggttgtgggttgtatagcggtgagtctgtgtgttntgccgcgccatggatgagggtgtgaaggtncaagacgagttcatcatcgatattatctcttgtcttgtgcatgtcatgttctttgcttattttatgctatgttgagttgagtgtatgtgcttgtcgtggtttggtccgttttgtggcccacccacatcattatgcgccggtgttatgtgggtgggtgtattcttcttgtgcgtgttgtgtggttgttattctcatcctcattatcaattctgtatcctcacattacttttgttatgctcatgtcggcggtgtgctgtggcctttcccttcactgatccaggcaggtgcgtggcgcgg

SEQ ID NO: 3677 - DNA, 668 bp, Glycine max
  misc_feature (1)..(1): n is a, c, g, or t
  misc_feature (620)..(621): n is a, c, g, or t
  Probeset Number=SeqID_13456
nggggaaaatgtcaggaaaaggagcgaaagggctgataatggggaaatccagcggcaacgacaaggacaaagacaagaagaaacccactactcgctcttctcgtgctggtcttcagtttccagtcgggagagtccacagactgttgaaaggaaggtcaaccgctcacggacgcgttggcgcaaccgcagcggtttacacagccgctattttggagtatctaaccgcggaagtcctcgagctcgctggcaacgccagcaaggatctgaaagtgaagcgtatcacgccgaggcatctgcagctcgctattcgcggtgatgaagagcttgatactctcatcaaaggaactattgctggtggtggtgtcattcctcacatccacaagtctctcatcaacaaatctggccaagagtagcttttgtctctgtctctcgaacctttttgcttaaatataatcgtttgtgtgttaagacattagtagagagaaaactcttgggagattgtttgttttgttaaagactcacgtgtgacttgtttgttggctcttgtttctgaaataatgttttggtgtttgttcatataagagacagttgcataagttgtctatttttccttctcaccnngggggcccccctcgttggtggcccctcccccggcccgccgaccctcc

SEQ ID NO: 3678 - DNA, 1589 bp, Glycine max
  Peptide Sequence Number=SeqID_8251
  Probeset Number=SeqID_13457
ataatactgtagtaattgctattgattgcattacataaaattaatttctgaggtcatgtctttacttcctcctcagtcgtacgcatatccaggtcgattaaaccatcaccaaatctatgaagttgacggctacgaagttccaaattataatggcaaccctttgctaaatagtccttatttgacccctcattcttatccgcatagcccttatgttccaaaacaccttcacccgaaacaagcaaggcatcagagcgggtctcgactatcagctggcggccctccttcgtattcatctccttttaaaagcgcttcaaaacatattttgccaccaggtccggtttatgatcatcaagctccagtatattatggtggtccccatccaggacaccattatcatcgatcatttgacgctcaaagcccctatgacatgggaccaatgccccccagaggttattatcctgtttacacagagtttgatgacgatccatactatggttcaggacgagcccaatctggtggcctgaatgctgaaaaggcaattgaagagattggaaagattcgagacttgagaagggcatttgaagatttgaaggcccctcgggatttattggatagacttcaagggctcaagtccaaagggaacctgggactgatagcaaaatatgatagaaaaaaacccagaaagaatagaaaatatgacgactcatttgaatcatcttttgcagcaacagagcagacaggctcagaagatagtttcgaaacagaccggacagagcaaaaaatcgcctacgtccaaaactaccctgttgttccagtcaactataatggtggctacgcattagcaatagtatctcagccaacttcaccccttgttttgtcagagaatcaattaattgcagttgagccaaatcaaatccagcaagtaaattacccaattccagttcaaacgacggctcgcaagacttatcgagcaccagaaaagtatattccggaacaaaagacttaccaaagaggaaaaggcagtcaggaaagaagtatgatgagtattgaagaagatcttgataaaaagagtgtgagaagtgatgacttgaataaaagtaaagatatgctaatatttggaaatgatgcaatgcttaatgatatcctcggctctcggagaagattgagaagaataacaacacctaaaaagttgacacatgctcaacatgttatgcaactggtggaggcttctggtaattcaactcataaaattccgcctcgaactcaagctcgtaaagagacccttgaagagattctaataagaaatagagtcgatgaagctgacatgaaagtcttgaaacgaactctaaaagatgttctctatcaaccagcaaaccttagagaatctcaagatatcttggaatcttcatttacaaacaataataataatgcaagtgtcacaaaagtcactcaaaaatagttttctcagaactacttttttgtatattttctcagtgaattagatgtttttatttttatatgatagtgagttctataattatttaattttgtcatttttttatgactgatctttaaacaaccaataaatg

SEQ ID NO: 3679 - DNA, 370 bp, Glycine max
  Probeset Number=SeqID_13458
agatatctgttgctctatccccagcatctgatgtagagtactgactgtggagtacaggaatatatacttcactgtgtgggatgtcaatggccaggacaggatccgtccactgtagcggcattattcccaaaacacttagggcttcattacttgggctgatagtatcatatcacatcatgtggtggaggcaccggatgatatgctcacaatgctgggtgtggatgaacttagagaggctgtcttgcttggttctcccatgcatcttgagctttcgagtgctaagactgccgcataaatatctgatatgcttgtactaccttcgcaccgacaacgccactggtatatcgcgaccacttgcgcgtcttctagc

SEQ ID NO: 3680 - DNA, 487 bp, Glycine max
  Peptide Sequence Number=SeqID_8252
  Probeset Number=SeqID_13459
ataaacctcgccgcatccttacgccgcaccctctctctgtttaatccgtcttacatctgcgacgaacaaaaatccctgatttcgcgttgtttgcatcaccttgagaaggctcagcgatgaggaagctcaagaaccatgagaagaaggttctgaagaaagtaaatttcctggaatggaaaagagaaggcggccatcgcgaaaccctgatcacgggtcgttaccacatgggtggtcgtgacgactacaaaaaatattcaggattgtgtaggatggtgcagaagctgacgaacgtgttgaaacagatggatgcgactgatccttttaggattcagatgactgatatgctcctcgagaagctatacaacatgggagttataccgacaaggaaaagcttggctttaactgatcggttatcagtttcctccttctgcaggcgtaggttatcgactgtgttggttcacctgaagtacgctgagcacttgacaga

SEQ ID NO: 3681 - DNA, 1773 bp, Glycine max
  misc_feature (21)..(22): n is a, c, g, or t
  misc_feature (26)..(26): n is a, c, g, or t
  misc_feature (31)..(31): n is a, c, g, or t
  misc_feature (33)..(33): n is a, c, g, or t
  misc_feature (35)..(36): n is a, c, g, or t
  misc_feature (38)..(38): n is a, c, g, or t
  misc_feature (41)..(41): n is a, c, g, or t
  misc_feature (55)..(58): n is a, c, g, or t
  misc_feature (60)..(61): n is a, c, g, or t
  misc_feature (64)..(65): n is a, c, g, or t
  misc_feature (67)..(67): n is a, c, g, or t
  misc_feature (70)..(70): n is a, c, g, or t
  misc_feature (74)..(74): n is a, c, g, or t
  misc_feature (77)..(77): n is a, c, g, or t
  misc_feature (94)..(95): n is a, c, g, or t
  misc_feature (98)..(101): n is a, c, g, or t
  misc_feature (103)..(103): n is a, c, g, or t
  misc_feature (131)..(131): n is a, c, g, or t
  misc_feature (133)..(133): n is a, c, g, or t
  misc_feature (144)..(144): n is a, c, g, or t
  misc_feature (149)..(149): n is a, c, g, or t
  misc_feature (157)..(157): n is a, c, g, or t
  misc_feature (198)..(198): n is a, c, g, or t
  misc_feature (225)..(225): n is a, c, g, or t
  misc_feature (255)..(255): n is a, c, g, or t
  misc_feature (259)..(259): n is a, c, g, or t
  misc_feature (265)..(265): n is a, c, g, or t
  misc_feature (275)..(275): n is a, c, g, or t
  misc_feature (315)..(315): n is a, c, g, or t
  misc_feature (326)..(326): n is a, c, g, or t
  misc_feature (357)..(357): n is a, c, g, or t
  misc_feature (376)..(376): n is a, c, g, or t
  misc_feature (391)..(391): n is a, c, g, or t
  misc_feature (409)..(409): n is a, c, g, or t
  misc_feature (411)..(411): n is a, c, g, or t
  misc_feature (431)..(431): n is a, c, g, or t
  misc_feature (440)..(440): n is a, c, g, or t
  misc_feature (446)..(446): n is a, c, g, or t
  misc_feature (455)..(455): n is a, c, g, or t
  misc_feature (458)..(458): n is a, c, g, or t
  misc_feature (466)..(466): n is a, c, g, or t
  misc_feature (490)..(490): n is a, c, g, or t
  misc_feature (508)..(508): n is a, c, g, or t
  misc_feature (523)..(523): n is a, c, g, or t
  misc_feature (527)..(527): n is a, c, g, or t
  misc_feature (557)..(557): n is a, c, g, or t
  misc_feature (588)..(588): n is a, c, g, or t
  misc_feature (590)..(590): n is a, c, g, or t
  misc_feature (593)..(593): n is a, c, g, or t
  misc_feature (595)..(596): n is a, c, g, or t
  misc_feature (608)..(608): n is a, c, g, or t
  misc_feature (623)..(623): n is a, c, g, or t
  misc_feature (635)..(635): n is a, c, g, or t
  misc_feature (696)..(696): n is a, c, g, or t
  misc_feature (755)..(755): n is a, c, g, or t
  misc_feature (849)..(849): n is a, c, g, or t
  misc_feature (851)..(851): n is a, c, g, or t
  misc_feature (902)..(902): n is a, c, g, or t
  misc_feature (950)..(950): n is a, c, g, or t
  misc_feature (963)..(963): n is a, c, g, or t
  misc_feature (1021)..(1021): n is a, c, g, or t
  misc_feature (1025)..(1025): n is a, c, g, or t
  misc_feature (1059)..(1059): n is a, c, g, or t
  misc_feature (1081)..(1081): n is a, c, g, or t
  misc_feature (1088)..(1088): n is a, c, g, or t
  misc_feature (1152)..(1152): n is a, c, g, or t
  misc_feature (1164)..(1164): n is a, c, g, or t
  misc_feature (1169)..(1169): n is a, c, g, or t
  misc_feature (1173)..(1173): n is a, c, g, or t
  misc_feature (1190)..(1190): n is a, c, g, or t
  misc_feature (1199)..(1199): n is a, c, g, or t
  misc_feature (1215)..(1215): n is a, c, g, or t
  misc_feature (1217)..(1218): n is a, c, g, or t
  misc_feature (1226)..(1226): n is a, c, g, or t
  misc_feature (1228)..(1229): n is a, c, g, or t
  misc_feature (1233)..(1233): n is a, c, g, or t
  misc_feature (1243)..(1246): n is a, c, g, or t
  misc_feature (1251)..(1252): n is a, c, g, or t
  misc_feature (1260)..(1260): n is a, c, g, or t
  misc_feature (1268)..(1269): n is a, c, g, or t
  misc_feature (1272)..(1272): n is a, c, g, or t
  misc_feature (1278)..(1278): n is a, c, g, or t
  misc_feature (1281)..(1281): n is a, c, g, or t
  misc_feature (1283)..(1283): n is a, c, g, or t
  misc_feature (1285)..(1285): n is a, c, g, or t
  misc_feature (1288)..(1288): n is a, c, g, or t
  misc_feature (1294)..(1294): n is a, c, g, or t
  misc_feature (1296)..(1297): n is a, c, g, or t
  misc_feature (1302)..(1302): n is a, c, g, or t
  misc_feature (1309)..(1309): n is a, c, g, or t
  misc_feature (1313)..(1314): n is a, c, g, or t
  misc_feature (1317)..(1318): n is a, c, g, or t
  misc_feature (1322)..(1322): n is a, c, g, or t
  misc_feature (1348)..(1348): n is a, c, g, or t
  misc_feature (1352)..(1352): n is a, c, g, or t
  misc_feature (1354)..(1354): n is a, c, g, or t
  misc_feature (1364)..(1364): n is a, c, g, or t
  misc_feature (1369)..(1369): n is a, c, g, or t
  misc_feature (1372)..(1372): n is a, c, g, or t
  misc_feature (1383)..(1384): n is a, c, g, or t
  misc_feature (1387)..(1396): n is a, c, g, or t
  misc_feature (1401)..(1401): n is a, c, g, or t
  misc_feature (1405)..(1405): n is a, c, g, or t
  misc_feature (1412)..(1412): n is a, c, g, or t
  misc_feature (1421)..(1421): n is a, c, g, or t
  misc_feature (1427)..(1428): n is a, c, g, or t
  misc_feature (1430)..(1431): n is a, c, g, or t
  misc_feature (1434)..(1438): n is a, c, g, or t
  misc_feature (1440)..(1440): n is a, c, g, or t
  misc_feature (1442)..(1442): n is a, c, g, or t
  misc_feature (1444)..(1447): n is a, c, g, or t
  misc_feature (1449)..(1453): n is a, c, g, or t
  misc_feature (1455)..(1455): n is a, c, g, or t
  misc_feature (1457)..(1457): n is a, c, g, or t
  misc_feature (1465)..(1466): n is a, c, g, or t
  misc_feature (1468)..(1468): n is a, c, g, or t
  misc_feature (1470)..(1472): n is a, c, g, or t
  misc_feature (1474)..(1474): n is a, c, g, or t
  misc_feature (1477)..(1480): n is a, c, g, or t
  misc_feature (1482)..(1482): n is a, c, g, or t
  misc_feature (1485)..(1487): n is a, c, g, or t
  misc_feature (1490)..(1494): n is a, c, g, or t
  misc_feature (1499)..(1499): n is a, c, g, or t
  misc_feature (1501)..(1501): n is a, c, g, or t
  misc_feature (1503)..(1503): n is a, c, g, or t
  misc_feature (1505)..(1508): n is a, c, g, or t
  misc_feature (1511)..(1511): n is a, c, g, or t
  misc_feature (1513)..(1517): n is a, c, g, or t
  misc_feature (1519)..(1520): n is a, c, g, or t
  misc_feature (1524)..(1525): n is a, c, g, or t
  misc_feature (1527)..(1529): n is a, c, g, or t
  misc_feature (1535)..(1535): n is a, c, g, or t
  misc_feature (1537)..(1538): n is a, c, g, or t
  misc_feature (1540)..(1540): n is a, c, g, or t
  misc_feature (1562)..(1562): n is a, c, g, or t
  misc_feature (1623)..(1623): n is a, c, g, or t
  misc_feature (1626)..(1626): n is a, c, g, or t
  misc_feature (1629)..(1629): n is a, c, g, or t
  misc_feature (1637)..(1637): n is a, c, g, or t
  misc_feature (1681)..(1681): n is a, c, g, or t
  misc_feature (1685)..(1685): n is a, c, g, or t
  misc_feature (1687)..(1687): n is a, c, g, or t
  misc_feature (1693)..(1693): n is a, c, g, or t
  misc_feature (1697)..(1697): n is a, c, g, or t
  misc_feature (1765)..(1765): n is a, c, g, or t
  Peptide Sequence Number=SeqID_8253
  Probeset Number=SeqID_13460
aaaggggagataagtaaaaannaaanaaganantnnanacnccactccccaaacnnnncnnccnncncanacancancctcaaaccggagaacnnccnnnnanaaaaataaggaggagagcagtcctcacncngcggacgaganagagncagagacnaccccataccatacacagaactcacccacgaacaattcacncacgcagagaggacgtaggagagaggnagatgctactatcattctatgctgtatctntttntctctnctctctgagncaggcctacgcgtcgatcgacgcaccagagaacacgcgcntgtctctcacnctaaaaacaatcaacgcgagtgacgtttctntactgggtgcgagtgcatncagcgactcatgaanaccagaagacatacatcncnatctcataaactcactaatncgcacgtanagaatnatgctaganagnagggtcgncacacaactatcacacctgtcgcnagtagtctatcattaagnacgtactaccgagantgcnacgacgatgcgagtacgcacgacgcgtctnatgcaagcgagcggcgtcgtcgtctacacgncnccntnncgcgcgctcgancgaggtgatacgcanctcattagaggngcgcacgtatcgggcgaaacgcgtctgatcgtgacgatgcgcgtgcggtagccgcgcggancgcgcatcctgtcctcggagcgacagcagcgcacgtcatgcgactggatcgcgtaatgngagcaccgcgcgtgcgcatgcgacagctcgcatcttcgccatcgagcgcgtgctagcgtacgcgtagcgcctccctgtctcgcgggcaccgcgngnaaccgatgctcgcgacactagtcgtggcgtcggcgtgtgcgcgcattgtantcctgacacggcgctgcgcatctcacgatgccgtctcgggcgtgcgtnctgcgtgcgcgtnctcgccggtgcgtgctgcggataccgacgttcgcgcgcgagcgggctgtcagcgcgcncggnacgtgacgagcagcgcgacagacgatatcatgancgtctaacagagcgcggagctntgcagantgtatgcgtggcgtctgagatgtagcgtgagcttagttgtgtgagtgtgtctgatgagtgtagnggcatgtgagtngacgntacnattgtgatggaattganataaaatanataagatatagatatnannaaaaaganannaaanccccacccannnnccccnntggctgcnccacacannaanatgganaanananacncattgnannaccantgtttcnaccnncannatanagaggagagaagtatagatgtaggantgtnantataatatanaaaanccnggaaaagtcannagnnnnnnnnnnccgangtgntgagggncccggggcncggggnnannaannnnnananannnnannnnnananaaaaatannanannnanaannnnanaannnaannnnnaaaanananannnnaanannnnnannaaanngnnnaaaaanannanaaataatgaaaataggaataanactagtgtgtgtgtgggtgtgtggatagttgtagagtgcataacgcgatgagtgtgatatnaanatnatgtatcntactatacgcatagagtatcatctctgcttagcgatcctgtgangtgntntgacancaanggtgctcatctttgctaagctgctagcgagacgcgagtcatagtatagttgtgcagccttaagtggtntgtagttg

SEQ ID NO: 3682 - DNA, 1966 bp, Glycine max
  misc_feature (3)..(3): n is a, c, g, or t
  misc_feature (30)..(30): n is a, c, g, or t
  misc_feature (40)..(40): n is a, c, g, or t
  misc_feature (53)..(53): n is a, c, g, or t
  misc_feature (79)..(79): n is a, c, g, or t
  misc_feature (124)..(124): n is a, c, g, or t
  misc_feature (139)..(139): n is a, c, g, or t
  misc_feature (150)..(150): n is a, c, g, or t
  misc_feature (178)..(178): n is a, c, g, or t
  misc_feature (186)..(186): n is a, c, g, or t
  misc_feature (199)..(199): n is a, c, g, or t
  misc_feature (239)..(239): n is a, c, g, or t
  misc_feature (241)..(241): n is a, c, g, or t
  misc_feature (259)..(259): n is a, c, g, or t
  misc_feature (287)..(287): n is a, c, g, or t
  misc_feature (298)..(298): n is a, c, g, or t
  misc_feature (341)..(341): n is a, c, g, or t
  misc_feature (348)..(348): n is a, c, g, or t
  misc_feature (376)..(376): n is a, c, g, or t
  misc_feature (443)..(443): n is a, c, g, or t
  misc_feature (497)..(497): n is a, c, g, or t
  misc_feature (548)..(548): n is a, c, g, or t
  misc_feature (665)..(665): n is a, c, g, or t
  misc_feature (668)..(668): n is a, c, g, or t
  misc_feature (707)..(707): n is a, c, g, or t
  misc_feature (717)..(717): n is a, c, g, or t
  misc_feature (744)..(744): n is a, c, g, or t
  misc_feature (756)..(757): n is a, c, g, or t
  misc_feature (759)..(759): n is a, c, g, or t
  misc_feature (763)..(763): n is a, c, g, or t
  misc_feature (799)..(799): n is a, c, g, or t
  misc_feature (820)..(820): n is a, c, g, or t
  misc_feature (822)..(822): n is a, c, g, or t
  misc_feature (883)..(883): n is a, c, g, or t
  misc_feature (889)..(889): n is a, c, g, or t
  misc_feature (896)..(896): n is a, c, g, or t
  misc_feature (898)..(898): n is a, c, g, or t
  misc_feature (984)..(984): n is a, c, g, or t
  misc_feature (1056)..(1056): n is a, c, g, or t
  misc_feature (1066)..(1066): n is a, c, g, or t
  misc_feature (1136)..(1136): n is a, c, g, or t
  misc_feature (1176)..(1176): n is a, c, g, or t
  misc_feature (1195)..(1195): n is a, c, g, or t
  misc_feature (1364)..(1364): n is a, c, g, or t
  misc_feature (1452)..(1452): n is a, c, g, or t
  misc_feature (1480)..(1480): n is a, c, g, or t
  misc_feature (1489)..(1489): n is a, c, g, or t
  misc_feature (1550)..(1550): n is a, c, g, or t
  misc_feature (1558)..(1559): n is a, c, g, or t
  misc_feature (1561)..(1561): n is a, c, g, or t
  misc_feature (1570)..(1570): n is a, c, g, or t
  misc_feature (1688)..(1688): n is a, c, g, or t
  misc_feature (1727)..(1727): n is a, c, g, or t
  misc_feature (1749)..(1749): n is a, c, g, or t
  misc_feature (1752)..(1752): n is a, c, g, or t
  misc_feature (1754)..(1754): n is a, c, g, or t
  misc_feature (1786)..(1786): n is a, c, g, or t
  misc_feature (1794)..(1794): n is a, c, g, or t
  misc_feature (1800)..(1800): n is a, c, g, or t
  misc_feature (1807)..(1807): n is a, c, g, or t
  misc_feature (1819)..(1819): n is a, c, g, or t
  misc_feature (1824)..(1824): n is a, c, g, or t
  misc_feature (1841)..(1842): n is a, c, g, or t
  misc_feature (1879)..(1880): n is a, c, g, or t
  misc_feature (1887)..(1887): n is a, c, g, or t
  misc_feature (1893)..(1893): n is a, c, g, or t
  misc_feature (1926)..(1928): n is a, c, g, or t
  misc_feature (1930)..(1930): n is a, c, g, or t
  misc_feature (1949)..(1956): n is a, c, g, or t
  misc_feature (1964)..(1966): n is a, c, g, or t
  Probeset Number=SeqID_13461
cgncgagaggcagctgagcagtctgcgtgncagtgtcagnagtagcatgtgcntgtgatagatgatgttgatgtcgtantattatatgatcgacgttgagtacgtggcgacgtcgcgacgaaangtggtaacgatgctnacacacagacngtttagagtaagtgatatcaatcacatnctaatatntcacttctgtcgnaagcgtccatcgttcatgactcctcgtgtcactcgacagnantcgtcgcagtagatagcnctgcgtcgttgacgtagttcatatgctnttcgtagccgnactcgggcgatcgcgatcgacacgcacatgatgatcgcacagngaaccancatgcagtggtcgttgatgtgaatgtgnggtcacgataatgtatgtagtatgatagttacataggatcgacggataagacgaacgataatgatgnaagccatgatcatcgatcatatgtgatacgatcgcgcgtacgctgttatacatngtatcgtaatttttcacattattatgcgtgtcgctgactccgacgtgagcngagtgttcaacatcagcacgcactgcacagtagtgaggctccgcgccacgcagcacgatatgcatggtcgtggacgaccgtgctcgtgcacatgcacgatccgctctgctcactcancanctctgcatcgcgctcactgcgcgatggtagtagtgatangatccatgtncagtcgcatacacacacgctatcactnggtttctggctnntnacantttatttatatagtgattgacactatccgcgtcgtngatagagcgtgagaagatgcntnaaagattactacagctctccatttactacatccatacaatacctcatatatacatatatcntgtcanacagatnantgtagttcgcgctatcgtgtgtaggatgtctgagtgcgaatgaagcgtacagaactagtgtctcgatagatagttgagtggacgcnggtgaggagactgacgctagttattatgtctagcatgatgtggagtgtgtatcttgatgtagtctgagagcntatcttgctnacatagtcgtgcgtgtactcgcttcctctattctacgctcactaacacacgtcgatcgtcgcatgcttcntattcattcatgtcgcgtgaaggagatcgtcgatctgcgnccccgctgagccagctcanacggcgcggagcagtacacgcgcgctacacgcgtgctacgcacatgtctagttcactcgtcctgttattatatctaatcttaaacacgaggaagcaaatagacgaaacaacgcctccacacacaactacaacgcgtagacggtgcggtagcacgcacggcacactacanactagagcagcaatatatcgtgcgagctgcggtggtggtgacagacatcatgtttgtctgcgtagtctctgcggcgatacgagcatcngtcggcgattcttctgatgtctgtctcntgacatcanagacatatacgagcaaatcacaggcgcggatagagctacgcgagagtgtaaatgagattanaaaaaaannancacactatnccccacaccctgtcaccaaacacgggagagggagaggatgtgtcgttctctttcttttctctcctctttcctactatcatctcctacttgcactgtcctgcgcgccccgctgttctcntcactcacctgactcacatctaaacgacactcagcagancgctacccgacgttgcctgcgncgncnttgcatatagttatgagtgtcgtagagtggangagaaggncgtagngcgggancggggcgagcgncaccngggttgtgggggtggtnnggtgagagaccgtcacctcctgtgtcgcaactctctnnactcatnatattntcctttctgcgcgactggctacgcgtctacccnnncnaaccaccacccaacacccnnnnnnnnaaaacccnnn

SEQ ID NO: 3683 - DNA, 563 bp, Glycine max
  misc_feature (3)..(3): n is a, c, g, or t
  misc_feature (150)..(150): n is a, c, g, or t
  misc_feature (161)..(161): n is a, c, g, or t
  misc_feature (169)..(169): n is a, c, g, or t
  misc_feature (195)..(195): n is a, c, g, or t
  misc_feature (346)..(346): n is a, c, g, or t
  misc_feature (360)..(360): n is a, c, g, or t
  misc_feature (371)..(371): n is a, c, g, or t
  misc_feature (385)..(385): n is a, c, g, or t
  misc_feature (396)..(396): n is a, c, g, or t
  misc_feature (411)..(411): n is a, c, g, or t
  misc_feature (444)..(444): n is a, c, g, or t
  misc_feature (450)..(450): n is a, c, g, or t
  misc_feature (459)..(459): n is a, c, g, or t
  misc_feature (473)..(474): n is a, c, g, or t
  misc_feature (484)..(484): n is a, c, g, or t
  misc_feature (494)..(494): n is a, c, g, or t
  misc_feature (508)..(509): n is a, c, g, or t
  misc_feature (529)..(529): n is a, c, g, or t
  misc_feature (532)..(532): n is a, c, g, or t
  misc_feature (538)..(538): n is a, c, g, or t
  misc_feature (547)..(548): n is a, c, g, or t
  misc_feature (551)..(551): n is a, c, g, or t
  misc_feature (557)..(557): n is a, c, g, or t
  misc_feature (560)..(563): n is a, c, g, or t
  Peptide Sequence Number=SeqID_8254
  Probeset Number=SeqID_13462
gancagtgaccattttttcattcaacttgttgccaccacgaacaaaacaacaattccaactcaaaatggttttcaaagtagtttgcctcgttttggccgtagccgccattgccaacgcttccgtgttctcaaaatgcgatcaagacccanaagcagtttcngtaggtcntcgaaaattgcaacgataattactgngaagtgaaacgcagtactccagccaaaatggaattcacctttaaaacaaccaaagaagcaactgatttgagtggcgcaatcagtgcacaaatcgccggaaaatggattccatggccattggcgctgcttcaaaggggtgcaacaatttgantaaaggcgaatgcncagttgctgtntcagtgaggccacntaccgtgttancattaaaaatcccantcgttgaccaatcggaccagaactggtgccaantcgtgncactgaccnagacaaattggtgnnggtgcccgcntttcctgttntgtcgcgataaatnntttataaaaccaatttaatnccngaatanaattaaatnnganaaaaanaannnn

SEQ ID NO: 3684 - DNA, 1698 bp, Glycine max
  misc_feature (1)..(1): n is a, c, g, or t
  misc_feature (94)..(94): n is a, c, g, or t
  misc_feature (125)..(125): n is a, c, g, or t
  misc_feature (127)..(127): n is a, c, g, or t
  misc_feature (354)..(354): n is a, c, g, or t
  misc_feature (384)..(384): n is a, c, g, or t
  misc_feature (433)..(433): n is a, c, g, or t
  misc_feature (451)..(451): n is a, c, g, or t
  misc_feature (484)..(484): n is a, c, g, or t
  misc_feature (553)..(553): n is a, c, g, or t
  misc_feature (569)..(569): n is a, c, g, or t
  misc_feature (576)..(576): n is a, c, g, or t
  misc_feature (639)..(639): n is a, c, g, or t
  misc_feature (755)..(755): n is a, c, g, or t
  misc_feature (889)..(889): n is a, c, g, or t
  misc_feature (992)..(992): n is a, c, g, or t
  misc_feature (1039)..(1039): n is a, c, g, or t
  misc_feature (1070)..(1070): n is a, c, g, or t
  misc_feature (1112)..(1112): n is a, c, g, or t
  misc_feature (1167)..(1167): n is a, c, g, or t
  misc_feature (1178)..(1178): n is a, c, g, or t
  misc_feature (1205)..(1205): n is a, c, g, or t
  misc_feature (1275)..(1275): n is a, c, g, or t
  misc_feature (1297)..(1297): n is a, c, g, or t
  misc_feature (1381)..(1381): n is a, c, g, or t
  misc_feature (1427)..(1427): n is a, c, g, or t
  misc_feature (1448)..(1448): n is a, c, g, or t
  misc_feature (1537)..(1537): n is a, c, g, or t
  misc_feature (1547)..(1547): n is a, c, g, or t
  misc_feature (1579)..(1579): n is a, c, g, or t
  misc_feature (1601)..(1601): n is a, c, g, or t
  misc_feature (1630)..(1631): n is a, c, g, or t
  misc_feature (1650)..(1650): n is a, c, g, or t
  misc_feature (1679)..(1679): n is a, c, g, or t
  misc_feature (1681)..(1681): n is a, c, g, or t
  misc_feature (1683)..(1684): n is a, c, g, or t
  misc_feature (1686)..(1686): n is a, c, g, or t
  misc_feature (1690)..(1690): n is a, c, g, or t
  Probeset Number=SeqID_13463
ngattcagtagagcgcctagtgcgctacgattgacacatacagtcacgcagagctgtgcggtcgctacgagagaagtgatgctaagtctgacantaaatgaactaacctagagagtgaatggatngnagacgccggagatagagtagagatcatccgacgcataatagtcgagagcgagtgtacacgtgagatcacatacgtgaatagtcctgctacgcgagacactattgacgctatacatctggactcacagagtacgagtgatgatacatcatgatgtcgctagacgagcagagtacatatcagtaatcaatacgaatacatcgcagctagtcgctatgtatataccaagngacatgctcaccgcacgatgcgttagtcgngacagagggagagcgcaacagataagacgagtgagataagtgcaatacngcatagatagtaagcagnacagtgccactcatagactcagtgcgtatagcngatgaatcatgacgatggagcataggtcacgtgcgctagatacgcggcacacagtagtgtacatagcanccgagcgtatctgcgnacagctnggtcgcgtccgtctacacagttcacgctcacgctgcgcatgcgtacagctcgtgcgacgcacncacaacaagacacgatcagactacgtgatcaatacataatcatgacgtccatacgcgagtatatactgtaggtaagctgtcagatgtagagtgcaacagcgagtacatgcgcgcangaggtagcgctacattatagtagagtacgtagtgcgacagatgcgcgcgcagatgctatactagcgagatatactaggatgatatgacagtatacacagatagacgtcgtcgtattcgatgtcagagacgaatncaacgcagcgaccatgttactcagctagcgggcggcgtagacgccatctctctgcatacgcgttcgtgctcacatcagcgactgacgagactgagacatacgnatgtgcatcggtagcatgcgtatataagcataagactaatctcatcnacatatcatacactcgatctagtcatatgcnatcatacttagagtacagaacagcagaagtagtgagtagcgnatcacgtcgaggcgatgttgcgagatagacacatagcacagcgtatacataggcnagtcgatagcngacgatcaagcgcgccgatgcagctgngtgagcgcgtacatatcagcatagagatgacaagacgcgacacgtacattcatcgagtcgttgtacatcnaatcatatagcgatcgtcgagnggtctacggcgatagatgcgtacgtggtcgcagaggcacataacgcgccgacacactacgacggagacgaacgagagatgagancgtgatggacagaaacacgcaccacggacgtactctgtagacatgncgttagatatattacgagtancatctaatatatataaccacgagacgacaacaagactcggatgtaagcatatattcaagctaccacacaccaactatcacatacactcnagagtagctncatcatactgagaactcatgctcacgcgctgntgtcgcgagtagcgttgctacngttgacgcgtgacgtagtgtctgtgtgtnnggtactgtgtgtggagagnagaggtactacgcgcggcgccgccgcgcngnannancgcnccaaacag

SEQ ID NO: 3685 - DNA, 406 bp, Glycine max
  Peptide Sequence Number=SeqID_8255
  Probeset Number=SeqID_13464
gtagtagtagcagcagcagcaatttcctgagctagagcctgatgaactgcgcttcccgtgtctcactcaacctgcgcccatgggattggcttaacttctggggacgtactccatccactacggcaactccccccctgcactgcagtttatctcggtaagtacgcgcttcgtatctaattactgcagtttatcaggtgtctctctaaacaagaggtctcaggttttgtctccttgtgttttctggttgtctaggcgggtatgacgtggaggagaaggccgcgagggcatatgacctggcggcgctcaagtactgggggacgtccacgcacgtgaatttcccggtggaggactacagggaagagctggaggagatgaagaacatgaccagacaggagtacgtcgctca

SEQ ID NO: 3686 - DNA, 407 bp, Glycine max
  misc_feature (215)..(219): n is a, c, g, or t
  Peptide Sequence Number=SeqID_8256
  Probeset Number=SeqID_13465
attcgtgaacgattgccaactcattaacagggaatccataaaccaaggctttctccacaagccgaagcacaaggcgcaggacctccgcattccaaaggccgtcaaccaagctctccggtccggcgcggaggtgctgacggtcaagaagttttacgcctctgaacgagaggaagctggagtaggggacgaagccggcggcgctgaagcgcgtgtcnnnnnaggtgcgccacgcgattcagaaggcgcgtctggagaagaagatgagccaggctgagctggcgaaacagatcaacgagcgaacgcaggtggtgcaggagtacgagaacggcaaagccctacccaaccaggccgtgctcgccaaaatggagagggtcctgggagtcaagctcaggggcaaaattggaaag

SEQ ID NO: 3687 - DNA, 1375 bp, Glycine max
  misc_feature (1)..(1): n is a, c, g, or t
  misc_feature (20)..(20): n is a, c, g, or t
  misc_feature (52)..(52): n is a, c, g, or t
  misc_feature (197)..(197): n is a, c, g, or t
  misc_feature (649)..(649): n is a, c, g, or t
  misc_feature (789)..(789): n is a, c, g, or t
  misc_feature (1175)..(1175): n is a, c, g, or t
  misc_feature (1354)..(1354): n is a, c, g, or t
  Peptide Sequence Number=SeqID_8257
  Probeset Number=SeqID_13466
ntattattacatatgcgcgnctcatcgaccagtgcatacactaatactgtgngtgcacatcacaggtatgtccactccgacggatcaagcgtacttacggtgtgcagcacgtcatccatattattctgtgtcggtcgttcatacaatgtgtgtatctcctatatacctattttaatatctagtatgtcgtgtgtganaggatgactgattgtgcagcgattagctatatgcacatcgtcgcctatcgcaaccggcctctcatattagctacgcagtgtgctcgtattcatcacgtcgcgtcttatctcgatgatcgtgttgtaggtgagttaaagagctcgtgtactcagagctgcgcgacacatcactccgcgtaatccgcgcgccacacgcggaaaacgcagcgcgcgcgtgtgctgccgtcgcaacacaccgtgctgcgtagcctcctcagcgcgcacacaatacacatcagcacagcggagcgtgtggcgtgatgcacgctcctcataccgctccgcccgtcgcgatcaatatataccagtggcgtcgcgtaacgagagagtgtctttgacaacatattgtacactcgctaccacctcggtgcatcatctcagtgcgcatctctataactctcctccctcgtatncctacggccgggagcggggtgagcatcgctggacgagctccctcaaccctcgtcttagcgcaggacacgcctcggattacgtcgtcctgacgttgcgtcattccactcctcatccttccatctatctccaccccgccttntctgtgagcccgtcggcgagaggtttatgtagattgtcggatgatataatatatgtggatgcgtgtgatggtgctgcttctccccgccttacccgccggtctcactgcgcgcggcgcgacataaaaatctgtcacatgcaaacacaaggagtggcggcgactcgtgtgggaaaactacagattgtgtagataatattatgtaattaatacactatcaggctctattaatatattcttttcttcaagagttcgtgaggcttggcaaaacacctaccgctacatggcgtaaatgattcttttcaacaatagttaactaatgataatgaatagggaacgagggggaggcctgacagcctggatgtctctgctagacaacccaaacggangagtagaggtgagatactctgttttttgttcttttcttagtaggaggcggccctctcctcccccctcttcttatacgttgtgttttagaggtgagatgccccccctaacctaactacaccagactgcttcctgccgcggccgcgcggcgtgcggggctccacgcctcgaccgcgccggnaccggccagccaacacaccac

SEQ ID NO: 3688 - DNA, 537 bp, Glycine max
  Probeset Number=SeqID_13467
gcggggtatcaaaaaaacaggaggattgaatatgaagagtaaaaaaagtttatttaagaatgtcatcttgattgctgcaacaacattaattatttctgggtttagtgaagttgcatcagcagctgaacaaaaagtaccaaagaaacaagtagtcgaagcaaaaactgatttatcagcacaaattcaatcatttaagactgctaatcaggttggacaagttcatgctttaggtaatattaattcttcagaatatgctgcaagggttactctcaatttaagccaggttagaaaaatgacatctgctcagcgtaatatttatgataagggctttaataaaaaagattacagtaagctaaaagatgcactaggaacaagtgcaactgtacttgggttggtatttgtaactagtacacctgcaggagtagttgctggagtgtctggtttgctaactactttagctcctagtgctcgtggcactctcaaaaatcttgtatacaatggatattggcaaatgggctatttagaagactttttaac

SEQ ID NO: 3689 - DNA, 436 bp, Glycine max
  Peptide Sequence Number=SeqID_8258
  Probeset Number=SeqID_13468
cgagtctatcttttcctccgattacaactccggcgttcgttctcaattcctgttttcgcttcaacgactcaccgaatcggcgcaaatcttgctcgcggagttctagtccacgatccagaaaggcacttcaaagccggcggtgaacggcggcggcgtgcactcgctcacgattcagacgatgaattacgctgcagtcctcggcgattatctgaacatgctctcagatatatttccacgcaacgtgcttccaccacacaaatcgtcgtgtgtaccagagtgttatttatacagcccacaatctgattactctacgtctacaccggcactaacagcacattttacataactaattctcgggctcctttacgagctctacagcgacacaagacatgtacaaaacgtttcgctctcttatgtatttctcagcgacaatctc

SEQ ID NO: 3690 - DNA, 198 bp, Glycine max
  Peptide Sequence Number=SeqID_8259
  Probeset Number=SeqID_13469
cttttgcatgaaatcccggtcttgcagttggaggagcatgtatttacagagtcaaataagttgatgaaatccattcaagtggttttgaattgtcttaatgaacttcgtattcgtcatgttatggaaagattttcatttacaactgatacaaggaagcaattacaatgaaatcaatcaaatattctagcacaatttcag

SEQ ID NO: 3691 - DNA, 1991 bp, Glycine max
  misc_feature (38)..(38): n is a, c, g, or t
  misc_feature (83)..(83): n is a, c, g, or t
  misc_feature (217)..(217): n is a, c, g, or t
  misc_feature (272)..(272): n is a, c, g, or t
  misc_feature (274)..(274): n is a, c, g, or t
  misc_feature (312)..(312): n is a, c, g, or t
  misc_feature (336)..(336): n is a, c, g, or t
  misc_feature (465)..(465): n is a, c, g, or t
  misc_feature (635)..(635): n is a, c, g, or t
  misc_feature (638)..(638): n is a, c, g, or t
  misc_feature (661)..(661): n is a, c, g, or t
  misc_feature (665)..(665): n is a, c, g, or t
  misc_feature (752)..(752): n is a, c, g, or t
  misc_feature (762)..(762): n is a, c, g, or t
  misc_feature (790)..(790): n is a, c, g, or t
  misc_feature (795)..(795): n is a, c, g, or t
  misc_feature (799)..(799): n is a, c, g, or t
  misc_feature (819)..(819): n is a, c, g, or t
  misc_feature (988)..(988): n is a, c, g, or t
  misc_feature (1020)..(1020): n is a, c, g, or t
  misc_feature (1026)..(1026): n is a, c, g, or t
  misc_feature (1041)..(1041): n is a, c, g, or t
  misc_feature (1057)..(1057): n is a, c, g, or t
  misc_feature (1133)..(1133): n is a, c, g, or t
  misc_feature (1141)..(1141): n is a, c, g, or t
  misc_feature (1256)..(1256): n is a, c, g, or t
  misc_feature (1376)..(1376): n is a, c, g, or t
  misc_feature (1386)..(1386): n is a, c, g, or t
  misc_feature (1436)..(1436): n is a, c, g, or t
  misc_feature (1537)..(1537): n is a, c, g, or t
  misc_feature (1562)..(1562): n is a, c, g, or t
  misc_feature (1574)..(1574): n is a, c, g, or t
  misc_feature (1613)..(1613): n is a, c, g, or t
  misc_feature (1650)..(1650): n is a, c, g, or t
  misc_feature (1679)..(1679): n is a, c, g, or t
  misc_feature (1691)..(1691): n is a, c, g, or t
  misc_feature (1711)..(1711): n is a, c, g, or t
  misc_feature (1761)..(1761): n is a, c, g, or t
  misc_feature (1814)..(1814): n is a, c, g, or t
  misc_feature (1816)..(1816): n is a, c, g, or t
  misc_feature (1855)..(1855): n is a, c, g, or t
  misc_feature (1857)..(1857): n is a, c, g, or t
  misc_feature (1871)..(1871): n is a, c, g, or t
  misc_feature (1889)..(1889): n is a, c, g, or t
  misc_feature (1922)..(1922): n is a, c, g, or t
  misc_feature (1934)..(1934): n is a, c, g, or t
  misc_feature (1936)..(1936): n is a, c, g, or t
  misc_feature (1976)..(1976): n is a, c, g, or t
  Peptide Sequence Number=SeqID_8260
  Probeset Number=SeqID_13470
agagtacatacattatacatacaagacaccagacactnatataaggcagcatatattgtagcatcatcactatgtatacatcnatacaccacctaagagtactaggatcgagagtgagtgcgtatatgtgacagcagcagagcgcactgcagagtgtgagggtatgctgtgtgtgatgtgtactggagagctgtattatgtcactcattgtacaacnctagctatataacatatgaagagacctatcacactatagtatgattatctagcgngnagctacgccgctgctggcccgtgtcttagtagtggtgnaggctgcgcgtcgctcgtctctcntatactcgctcacatcgctgaagtctgtggcagagtgcgtagcgagtgaggtatggggcgatagagatgaagctgcgcggtcgtgagctcagtgacgtgaacgcgcggtgcaggtgcacctcgacgcgnctctctctctctgcgcgctctcgcgtgagatctcactatcattcttacacgggttgagcgcgataagccgcagaacgtgacaaggatcgtcacattatgcgtgtagttgtgtgtgtggtagacgcgcactcatctaccgtctgcgatacaatgcaaccgagactatcacnatnatcatccactattctaatatgtnactntctactgatcaatccgcacactcctagctctatacaatgtatttatatagcgacgattcttcagatagtatatcagagcagtgacancatactaganacactacggttgtcatacgattcatcantactnagantcatgcgcacggtctcacgncagctacgctctccacacacataacgtgagatcatacggctagcgcaatcgatgtgtaccatgcatgatcagagcatctatatatcacatacacgtacgatacgatggcgtcacatacgtctggatacatcatcacgatgcgcaatcgtatgactacttagtctgcatnatgagaccgcgctgcgcagctgtatcgcctcncactgngcttgtcgactatgncgacgtcgctagtctntcaccgcgcgcgctgatagagactgatagttgtgatgcgccatggcgcagctctgagctcgatgagatgatattgntggtgtanacgacgcgctgtgcggcggcagcatatcacacgaccatcgatgtgctcatatcgacgtgactacgcatggtctggataatcttagtagacacgctcacggactgcagcgtagctntatattacttgcgacgcacacggtgacacacgtgttgtgtactgcattcacggcgcacgtctagctgacatcatggtgcatgcgtgatgatggtacgaggaatcacgaacacgattatcntgactgttancacgcacagacagtgcgatcatggatgtatcgatcacgcgtacggcacgngtcgacacgtcgatatcgtcgacagtgcgaggtctcgtcgcgcggactacgcacgagtatgtgtgaatgcgcacacgacactatgtgacgtctaagacgcntctgtgtccgtcgtagctgcgctgncccatgacggantactgcgcgctctactatcacaacaccgatgacgtcatngatcttagcggctatctaagagctatgcgcgatccgngcatgtattagcatggtatatgtatctgncaacgcgtccgntatacgactcgcgctacagncgatacttcagtgttctcgcacagcggcgcactcatacgtcgtctgatanatagagcgtgtcatgctcgtctcgtcagtgcacgctggatctctgttgacggntngcatactgtctgctgctgaacggtacagtgagacgactngnagcatcagcgtcgnacgggatgtagagacgantcgtcgactatgtatctgcgagtcgcacgcgcnacgacgtctgcnanacctattgcttactctcgagtgtgtacgcgtcactgacgntcgtagtgatgatcg

SEQ ID NO: 3692 - DNA, 680 bp, Glycine max
  misc_feature (43)..(43): n is a, c, g, or t
  misc_feature (557)..(557): n is a, c, g, or t
  misc_feature (588)..(588): n is a, c, g, or t
  misc_feature (625)..(625): n is a, c, g, or t
  misc_feature (672)..(672): n is a, c, g, or t
  misc_feature (680)..(680): n is a, c, g, or t
  Probeset Number=SeqID_13471
tcagctacgtaggccccccccccagcaccaatatggctggatntgagactgaaactactattaatactaccaatgactcccaacaaactaataaagatgaacttattgtgaattctatacagaagacgatagagatattagaagagattgagagagaaatcgatcagagtgaaaataaaggagcctccaatgaagaagttgccaatcttattgagtctttgatgaagaattctcccaccaattctgctaacaagactgatttattaagtcctactgatgaagacttgaaacctatcaattggaatgatgagagttcaatagagaatagagatgtcagcgatttagatagctctaagttggatacatcaaagatcgatggtgatgagatgcaattacaattccaatcgttaagtgaggatgataaagttgctgatttacaagctttggtcatgaatcaaagaaagactattactaatcttactaaattgaatgctgaacttactcaaattaaccagaagcatcaagcagcacaagataagaatatccagatttacaangactaaattggatgaattgcaaaagttgaancttggataaagtgaagggaatatgagagtaaattggngagtatcaagtcattggtgggagagaaaagtacgagaaaatcgatgngaataagn

SEQ ID NO: 3693 - DNA, 800 bp, Glycine max
  misc_feature (800)..(800): n is a, c, g, or t
  Peptide Sequence Number=SeqID_8261
  Probeset Number=SeqID_13472
taacatggttatccgctgataattctgcctgtttctatctaacctttatcgtgtgagttctctcgtaacactttctgcctgtgctcctattgaatttcatcgtgtgaatgtccaggtttttcctgataggtatctgatgccatcctgtaaaacaaatttccgttcatggaaattatgttacctaaaatctcagatacgatgctcatcactcagaatactgactatgaacttgacccaatcactgaacgatgctatgaaaaacaactgaaaggactgtgatgccaaatgaacagacagatgaccttcccatcctttgccaacatctagtcatcaatttgatatacatgaatgagaatatcacattgacatctctaatgatggcagatgccgtatatgatgctttgcaatgagatcatcatcatcatcaaactcaacacccagtatgccgaatcttgatgatagtgtatttcacatctgccaagacctctgtgagatgaactcatcctctcctgactgctgccccggctgctatgacgaagctaccaccactatatgcgactgtgaatgatctatgcgcacaccgatctcgaattactggccaagctatatgatctacgacacatgcaagctctcctctatgatatcaggcactctcgactaactgatcatgttgacgctcatctgccccatatatctcaactgcgaacttatgcgaggcttgatcgactcatgcacatgagatgatgctggtcgtcaatacctcgagctcagcgacgtggggtgtatcaaaatcaacactn

SEQ ID NO: 3694 - DNA, 1095 bp, Glycine max
  misc_feature (739)..(739): n is a, c, g, or t
  misc_feature (769)..(769): n is a, c, g, or t
  misc_feature (778)..(778): n is a, c, g, or t
  misc_feature (784)..(784): n is a, c, g, or t
  misc_feature (797)..(797): n is a, c, g, or t
  misc_feature (800)..(800): n is a, c, g, or t
  misc_feature (823)..(823): n is a, c, g, or t
  misc_feature (837)..(838): n is a, c, g, or t
  misc_feature (847)..(847): n is a, c, g, or t
  misc_feature (854)..(854): n is a, c, g, or t
  misc_feature (861)..(861): n is a, c, g, or t
  misc_feature (864)..(864): n is a, c, g, or t
  misc_feature (887)..(887): n is a, c, g, or t
  misc_feature (891)..(891): n is a, c, g, or t
  misc_feature (906)..(906): n is a, c, g, or t
  misc_feature (915)..(917): n is a, c, g, or t
  misc_feature (924)..(924): n is a, c, g, or t
  misc_feature (929)..(929): n is a, c, g, or t
  misc_feature (940)..(1095): n is a, c, g, or t
  Probeset Number=SeqID_13473
gacgtaaaagctttttagagatgtccactaatcttgaaaataatgcattcaaagacattcaaataaactttctaaatcctgaggctcttaaaaccttgaagctacccatctataataatcaaaacttaaataaagtttatgtagagtttcaagggaacgaaatccaaaagttttactggaagcatatgaggaaggacttggaaaatgctcataatatgcaagacctaaatcaaaagcttttgaaaactcttcaaaacctacaaagtactcatgtatttcgaaatatgggagtatctttagagcgtggaagtgaaaaggattctctaaaagttatatttaagcctgactacgttaaaggattcgtactagaccttacacataaaccctgggaagatttttcaaactattatggaattcatggatcgattagaatagctaatttaacaggaatgttggatagtttatccttcaactatataaatggagtctatggacacttcaaaactagcttttatattgcctataaacttcccattttttataaaggttattctttgggattcgctactggaagagataaagttaactttaacaatggcttaactgaatttggtgtgtggcagcgtataaaattacaaaaagaaagttatacatttcaactgagtcatactttgagggagaaatttatttggctcaaaagtctcttcccaatacccaattgatgattttaatccaagtnaaaattcttttttttacccacctaaagaangggataaancctggnggtggccaaaaanaanggttgaatatctcatttttaaangggaattaccttcnntaaaccccncaggaangtctttnaangggagttatgaacccaaatttcngggnccctaccttcttaangctgaaaannnaaacctntattntcccttgaaannnnnnnnnnnnnnnnnnnnnnnnnnnnnnnnnnnnnnnnnnnnnnnnnnnnnnnnnnnnnnnnnnnnnnnnnnnnnnnnnnnnnnnnnnnnnnnnnnnnnnnnnnnnnnnnnnnnnnnnnnnnnnnnnnnnnnnnnnnnnnnnnnnnnnnnnnnn

SEQ ID NO: 3695 - DNA, 1746 bp, Glycine max
  misc_feature (12)..(12): n is a, c, g, or t
  misc_feature (31)..(31): n is a, c, g, or t
  misc_feature (42)..(42): n is a, c, g, or t
  misc_feature (56)..(56): n is a, c, g, or t
  misc_feature (67)..(67): n is a, c, g, or t
  misc_feature (72)..(72): n is a, c, g, or t
  misc_feature (86)..(86): n is a, c, g, or t
  misc_feature (88)..(88): n is a, c, g, or t
  misc_feature (92)..(92): n is a, c, g, or t
  misc_feature (107)..(107): n is a, c, g, or t
  misc_feature (125)..(125): n is a, c, g, or t
  misc_feature (130)..(130): n is a, c, g, or t
  misc_feature (132)..(132): n is a, c, g, or t
  misc_feature (149)..(149): n is a, c, g, or t
  misc_feature (155)..(155): n is a, c, g, or t
  misc_feature (157)..(157): n is a, c, g, or t
  misc_feature (205)..(205): n is a, c, g, or t
  misc_feature (223)..(223): n is a, c, g, or t
  misc_feature (244)..(244): n is a, c, g, or t
  misc_feature (355)..(355): n is a, c, g, or t
  misc_feature (438)..(438): n is a, c, g, or t
  misc_feature (442)..(442): n is a, c, g, or t
  misc_feature (580)..(580): n is a, c, g, or t
  misc_feature (591)..(591): n is a, c, g, or t
  misc_feature (682)..(682): n is a, c, g, or t
  misc_feature (759)..(759): n is a, c, g, or t
  misc_feature (836)..(836): n is a, c, g, or t
  misc_feature (858)..(858): n is a, c, g, or t
  misc_feature (873)..(873): n is a, c, g, or t
  misc_feature (878)..(878): n is a, c, g, or t
  misc_feature (1117)..(1117): n is a, c, g, or t
  misc_feature (1297)..(1297): n is a, c, g, or t
  misc_feature (1344)..(1344): n is a, c, g, or t
  misc_feature (1346)..(1347): n is a, c, g, or t
  misc_feature (1350)..(1350): n is a, c, g, or t
  misc_feature (1358)..(1358): n is a, c, g, or t
  misc_feature (1361)..(1361): n is a, c, g, or t
  misc_feature (1376)..(1376): n is a, c, g, or t
  misc_feature (1407)..(1407): n is a, c, g, or t
  misc_feature (1426)..(1426): n is a, c, g, or t
  misc_feature (1588)..(1588): n is a, c, g, or t
  misc_feature (1617)..(1617): n is a, c, g, or t
  misc_feature (1629)..(1630): n is a, c, g, or t
  misc_feature (1636)..(1636): n is a, c, g, or t
  misc_feature (1723)..(1723): n is a, c, g, or t
  Peptide Sequence Number=SeqID_8262
  Probeset Number=SeqID_13474
tagctcatatcngatgcatctcgatgtgggnatgataactgngtcgtgtaagcgantgagagtgatngcgtntgcggcgtgagtangnacgncttcacgaagtagantacaccctgcgtacagtncactngnagcgttgcgctcgtacngacgangnagtgtgtaggcgtgacgcggacgacgcagcacagacacgagtcgtcanctatagatatactcacancagtcggccgtcagctcgacngtatacgaactgaatgctgtagtagagctgcagcgcacgccgtatgccgtcatcgcgtcatcacgcgcgccagatgaaaacatgacaaagtatgacagcgacgatggacgngagatagttagccgccgtcgacgtagcgagcgagtagtgtgttccataactgatcgtacgcctacgcgagcgtatacgctgtntgtnctcgcgaggaagcactacgcacatgatactgccagcgcgtaggcgtcagatcggtgcgtgcggtgatgtataatatgacagacggagtgattagcatgtatattgttgaaggacgacgcatacacgcaacgcatgatnggagtaggagncagtaagagtcgctgctggtcatgttgaggtgatcgatcagtcacgacacgtgaacgagaccgacgagcagagaggagagacgagaatcgngtgtgtgagtggggtgtgatcacgatactgacaaggtgatatagagacgcatcgactatagatatgagagaggatanggtggtgtagctcagcatcatatgatcagtctctgcatctccctaatagtccggtatgagatgatatagttagatgngatttttttaaacggggtgtcncacgcacgctgtctnttccntcatcacactatccctcctccaccttcactgcgcactcactccgcaccgcgtcgtcgcatacatatagtagtgaagtagtagaatatgtgtataacgatagtatggagatacagcagtatcgatatacgacgacatatgtcaatcttgagtgagacacaggcgcgcctctctgccagtcgccagctctgacggtgacgcggtacggcaatgcgcgcgccgcgaagcgcgaccgcagagngacgacacacagcggagtcagcgacacggcgcaggcgcagcacgtagagatagcgcggacagagtgcactagagtgagcgattctgttcggcccactgctcagggagtgcagtcgttcggcgcacgcgacgaatcgtcacatactatatgatagtcagtgtgcgtaatatatatgtgaangaggagagagtgatgcgagatgcactgctgacacagccaaaaacgananngcncacacctnttncctctgcgggttacngtccttccgcgcgcctccgcgccttgacatngggtgcgcgcgggccgcgngccgacgtcgcaggacaccgccgagagcggccgaacgcacgacacgcaccgagaggtagagaagtgagcacgcaaccaccatcagtcagcgtgtcgctccgtctgggcggcgcgtcggtagagtgagtagtatcactcctacactcgtatctgtgatatacnactgacgacccgctcctctctctctctcntagacggctgtnntttacncctcttcctagtggagaatggagagagcgatgagcacgtctcctacgcgccgcgtgccgcgcgttagcactcactgcgccactcacncaccacaagacaaacgccactac

SEQ ID NO: 3696 - DNA, 1780 bp, Glycine max
  misc_feature (1)..(1): n is a, c, g, or t
  misc_feature (28)..(28): n is a, c, g, or t
  misc_feature (30)..(30): n is a, c, g, or t
  misc_feature (41)..(41): n is a, c, g, or t
  misc_feature (48)..(48): n is a, c, g, or t
  misc_feature (61)..(61): n is a, c, g, or t
  misc_feature (79)..(79): n is a, c, g, or t
  misc_feature (86)..(86): n is a, c, g, or t
  misc_feature (104)..(104): n is a, c, g, or t
  misc_feature (151)..(151): n is a, c, g, or t
  misc_feature (180)..(180): n is a, c, g, or t
  misc_feature (228)..(228): n is a, c, g, or t
  misc_feature (236)..(236): n is a, c, g, or t
  misc_feature (241)..(241): n is a, c, g, or t
  misc_feature (244)..(244): n is a, c, g, or t
  misc_feature (270)..(270): n is a, c, g, or t
  misc_feature (278)..(278): n is a, c, g, or t
  misc_feature (283)..(283): n is a, c, g, or t
  misc_feature (307)..(308): n is a, c, g, or t
  misc_feature (340)..(340): n is a, c, g, or t
  misc_feature (344)..(344): n is a, c, g, or t
  misc_feature (365)..(365): n is a, c, g, or t
  misc_feature (407)..(407): n is a, c, g, or t
  misc_feature (415)..(415): n is a, c, g, or t
  misc_feature (442)..(442): n is a, c, g, or t
  misc_feature (457)..(457): n is a, c, g, or t
  misc_feature (481)..(481): n is a, c, g, or t
  misc_feature (517)..(517): n is a, c, g, or t
  misc_feature (567)..(567): n is a, c, g, or t
  misc_feature (574)..(574): n is a, c, g, or t
  misc_feature (594)..(594): n is a, c, g, or t
  misc_feature (599)..(599): n is a, c, g, or t
  misc_feature (602)..(602): n is a, c, g, or t
  misc_feature (606)..(606): n is a, c, g, or t
  misc_feature (648)..(648): n is a, c, g, or t
  misc_feature (661)..(661): n is a, c, g, or t
  misc_feature (670)..(670): n is a, c, g, or t
  misc_feature (673)..(673): n is a, c, g, or t
  misc_feature (693)..(693): n is a, c, g, or t
  misc_feature (816)..(816): n is a, c, g, or t
  misc_feature (821)..(821): n is a, c, g, or t
  misc_feature (828)..(828): n is a, c, g, or t
  misc_feature (866)..(866): n is a, c, g, or t
  misc_feature (872)..(872): n is a, c, g, or t
  misc_feature (891)..(891): n is a, c, g, or t
  misc_feature (926)..(926): n is a, c, g, or t
  misc_feature (980)..(980): n is a, c, g, or t
  misc_feature (1009)..(1009): n is a, c, g, or t
  misc_feature (1011)..(1012): n is a, c, g, or t
  misc_feature (1042)..(1042): n is a, c, g, or t
  misc_feature (1051)..(1051): n is a, c, g, or t
  misc_feature (1076)..(1076): n is a, c, g, or t
  misc_feature (1085)..(1085): n is a, c, g, or t
  misc_feature (1098)..(1098): n is a, c, g, or t
  misc_feature (1100)..(1100): n is a, c, g, or t
  misc_feature (1104)..(1104): n is a, c, g, or t
  misc_feature (1112)..(1112): n is a, c, g, or t
  misc_feature (1129)..(1129): n is a, c, g, or t
  misc_feature (1156)..(1156): n is a, c, g, or t
  misc_feature (1381)..(1381): n is a, c, g, or t
  misc_feature (1399)..(1399): n is a, c, g, or t
  misc_feature (1450)..(1451): n is a, c, g, or t
  misc_feature (1462)..(1462): n is a, c, g, or t
  misc_feature (1470)..(1470): n is a, c, g, or t
  misc_feature (1525)..(1525): n is a, c, g, or t
  misc_feature (1587)..(1587): n is a, c, g, or t
  misc_feature (1616)..(1617): n is a, c, g, or t
  misc_feature (1619)..(1619): n is a, c, g, or t
  misc_feature (1623)..(1623): n is a, c, g, or t
  misc_feature (1627)..(1627): n is a, c, g, or t
  misc_feature (1629)..(1629): n is a, c, g, or t
  misc_feature (1631)..(1631): n is a, c, g, or t
  misc_feature (1650)..(1651): n is a, c, g, or t
  misc_feature (1696)..(1696): n is a, c, g, or t
  misc_feature (1727)..(1729): n is a, c, g, or t
  misc_feature (1731)..(1731): n is a, c, g, or t
  misc_feature (1738)..(1738): n is a, c, g, or t
  misc_feature (1747)..(1747): n is a, c, g, or t
  misc_feature (1761)..(1763): n is a, c, g, or t
  misc_feature (1775)..(1776): n is a, c, g, or t
  Probeset Number=SeqID_13475
natagtgtagagtcatgagtaagtgatnanggtgatgagtnccatcantcatgtgaaggcngtgccgtactcgatgtcnagcgatnagatatcatatgaatgtncgtggctgcgcgatcgtactcagtgcgtactacagtcgtcacatgcngggcatgcgtgagcaccatcagccatccngcgtctgcgtccacgatggcatatatcatgctactcatgctcacgacntacactantacanctncatgagcacaagcagatcgtctgcancgacagcncgtcngacgtcgtcacgacgcgcgacgannctgctagacgcagtagcgctcatagtgatgcncgcntacatcggaccgtagcgacanttcacacatctgccgttgacatacgcgtgtcgccagtgtcgntgtgattnatggatacgcggtgtacacagacgacnagcatatctagcatnagacgatcgatgagtcgtctcacngacgtcgacgtaacatctactctcgacgcgcatcgntcgcaagacgtcacgtgatctccgaagtagtgtgtagcgtcacactgtangtcatgntatcagatgaggagtgtgtnagtcntcnactnctctctatctataactactactagacgcatgcacctcagcantccctgcgtgtantatacacanctntgctaaagtatcagatcacntcagtagcatagagacatatattatcgtggtcagacgatactatatcacagtcaatcggtgtctatgtatctgaggtcggctgttgcgtggtgtgcagtgacgagatctgggatgctctgtgncgcgnattactnactgatgacgctcggccgcgttgtactgtcgcctgcgngatgangtgtgagtgtatagcagcntatagcagcgagatacagcagacgacacatgcgantcgagtttgacagacagtgactgctgctagcgcgcatgagcagcgtcgagcagngtcagcgacagtcatgagcaggacacacngnnggacgtcgaggcagcacgaagtcggtgcangcgcagcgngcagcagcgatgtgcgtgtcgtagngagagcaangcaggagcacgcncngagngcgatgcnagcggtgtgtagctcgnctagcgcgacgtcgcagatcagactgnacgccgacgtgacgtgacgtcgatctcatcactccgcgcatcgctcccatccacttatccactctacatcaatgcacactacatcatttcacatcagacgactcactctactcaactcctgactcacagatcgcatagcgtcgggccgtcaggacgcaggcaggacgcacagtgtcataagtactgggcagagtgtgcggtgagtgctgtcatcgtgcgcgcgcntgcacacagcgcacatangcgtgacgttaggcgcagctgtacatcacagcgtgacgagcacgtgcgcgnngagaagcaggngcagcgangacaagagtggaagcggcgctagcggtagagatactcgaggcgatcgtcatcagnagcgcagcggcgcgcgcaggacgcacgtactgcatgtcggaacaaccacgcggcaggctatngattgccttgtataaccctatatgtttgnntnggcntgtntntntgcgccacatgaatagatnnctcgatgcactcactactctccatacataccacactcgtcgccgngcctacactgtgtctggtgtatgtatcgtcnnncntatattntgtgtctgngggcgcactctgtnnngtttaatttggnnaaaa

SEQ ID NO: 3697 - DNA, 275 bp, Glycine max
  Peptide Sequence Number=SeqID_7911
  Probeset Number=SeqID_13476
ggggcagcctctgctctgttcctcctcgacatcaaaggccgcgtcctcatctggcgcgactaccgcggcgacgtctccgctcttgatgccgaacgcttatttaccaaacttatttaaaaacaggccgatccgcaagctcaagatccggttgcgcacgacaacggctagtcctacatgtgtattcagcacagcaacgtttaccttatgatagccaccagacataactgcaatgccgccagtctcctcttttttctgcaccgcattgtttatgtgtt

SEQ ID NO: 3698 - DNA, 408 bp, Glycine max
  Peptide Sequence Number=SeqID_7912
  Probeset Number=SeqID_13477
aaacctactctgcttcgtcaatcaaacacacagcacaaccaaaaccaagaagacccccgctttctccgcgtccgcttctcccacgccaacccatcaccagccatccgtcgatgcaaccggcgcagcctccgtgtggcagccggagaggagggagaggagccccgtcgcgggcggcgacactcccacgctgcaaccaccatcggctgctcgtgctcgtcgtcatcgtgtacctgctgggcggcagcgacgttcttcttctagccgccgcggcgcctgtccgccgtctgggagcagaggcatccgtggcgtacgacgtcggctcacggccggtaccggaagtggttgctgcggcgggctcgccctcgtcgacgccttcagccgtgaggttcgccgacgacaagcggccgg

SEQ ID NO: 3699 - DNA, 662 bp, Glycine max
  misc_feature (460)..(460): n is a, c, g, or t
  misc_feature (662)..(662): n is a, c, g, or t
  Probeset Number=SeqID_13478
catgaaaaatagcaaggttctcgatttgttatcagacacaaacatcaacaaaatccaaattctcgtgtcacggtggcgctggatgtaagaatgggaaatcgacgcttcactcaggtcgcaaccagcgacgacgaggacgaagcgccgccggcgccggcgcctcctcccaagcagcaatcgtccgtcagtgcctccgaagaaaactgttcgaagcagcagcagcagcagcagcagcagcagcagcgcaagaggaagaggatgaagctccaagaagaagaggaagaggagaaagaggaagagaagaagaagaagagaaaaatcaaagacaagcaggaagagagatccaacgaagaagaggaaccgccgcaggaagacgccaagcccattggcgaaccggttaggctatccggaaagggaaggggccgcaaaaagcattatgaatccttcgagtacgacgganaccaatacacgctggtactaccttttctcgttagtaggaattatttcaggctattcgatttgaacgcgtgagtttcgatttcattttgtcctctgctagggtttacgtcatgtgcataattgtgttatggaaaataatcagtggacacccctacattaaatgacaattgaccccgcgaagagagtagagagagaagataaan

SEQ ID NO: 3700 - DNA, 1699 bp, Glycine max
  misc_feature (30)..(30): n is a, c, g, or t
  misc_feature (72)..(72): n is a, c, g, or t
  misc_feature (87)..(87): n is a, c, g, or t
  misc_feature (151)..(151): n is a, c, g, or t
  misc_feature (190)..(190): n is a, c, g, or t
  misc_feature (236)..(236): n is a, c, g, or t
  misc_feature (482)..(482): n is a, c, g, or t
  misc_feature (934)..(934): n is a, c, g, or t
  misc_feature (936)..(936): n is a, c, g, or t
  misc_feature (1065)..(1065): n is a, c, g, or t
  misc_feature (1125)..(1125): n is a, c, g, or t
  misc_feature (1137)..(1137): n is a, c, g, or t
  misc_feature (1147)..(1147): n is a, c, g, or t
  misc_feature (1150)..(1150): n is a, c, g, or t
  misc_feature (1200)..(1200): n is a, c, g, or t
  misc_feature (1210)..(1210): n is a, c, g, or t
  misc_feature (1291)..(1291): n is a, c, g, or t
  misc_feature (1359)..(1359): n is a, c, g, or t
  misc_feature (1455)..(1455): n is a, c, g, or t
  misc_feature (1526)..(1526): n is a, c, g, or t
  misc_feature (1596)..(1596): n is a, c, g, or t
  misc_feature (1631)..(1631): n is a, c, g, or t
  misc_feature (1637)..(1637): n is a, c, g, or t
  misc_feature (1645)..(1645): n is a, c, g, or t
  misc_feature (1654)..(1654): n is a, c, g, or t
  misc_feature (1681)..(1681): n is a, c, g, or t
  misc_feature (1689)..(1689): n is a, c, g, or t
  Peptide Sequence Number=SeqID_7913
  Probeset Number=SeqID_13479
atgtggagagtagcgtgtagtgtgtgcggngtccgtaatgagtcgatgatgatatgctgacatgatgcgttnaaacacatatcttcncactcctgttatacgagcatgagaatatactccatctcacgaatagtagacgggcgcgcgccgngtctcatcaagattatgtgatgcggagtgtcgctcctgnggcgcgcgcgcgcgcggagcgaggagatctctgtatgtattgtatntcctcgttctctcacggatctctcttgactgtctcatgactcttctgcagtagctaaaagaagtagcagcctgtgccggcagtcttctctctacagttctgtgtcttgatctgcatgatctatcgtgtcgccagccagccagtcaatccgctgattacatgcaacgcgcattgtctatgtgtgccgtgtactccatgcactccgtcagcgcagagcgcaaatcatataatcgacggcgaaagtctnttagctacacgtgcggcgagtggtgtcgtgcaagcaggacggctgcgatagcacatcgatgtgtctatatacctgctcagtcaagcgatcctacgcaataagtcacttccttgtagcgatcctagcggtgccacgaagtaagctctgcgggaatatcaatcatcgacgctcgaatgtgcgcggtagtgttacgtcatcattaggctacgtctctcattgcactgcgcacgcggtgatgtggtactccaacacgttgttgcgcatcaggcctgttgatcatagatacttccacacgcatctgccgcgacggtgtgtgatgctcagggaaggagtgagtaccacaccctcgactctcgactctctcgactcagtagtgcatcttgccgcgtgacacgagattataggcgagttatcgccgcatgtcatatggtacggtctgagacgctcttatnantctgcgctagtgtcgcgcacatatccgacatatgtacgctcggcatatgtctaactctatacacaccttattgcgtctacccgacacacgtgatagcacggagctgacacgtcagacagggctcgcgangtcatactagctatcgtgcgtacactccgctacagtatatgacgtgatgctctcgtctgnccgcacctctangtgctgcgtnatnctcctcatagggatatacgatacatagtatgcatactacactttgcacangcagcagcangtagtattgagagtgcatagcgagtcatgtgcgcagtgagcacatctcgctcgcagtgtacagacacgatctcatgtgcgnttgagacgcttctagctcgtgcctaacgtaggatagtacctctctcgtgatgaacgtaacttagtagngcacaagaacctctagtccagtgtacatgacctagtgttgattgcagtgatatatgtatcatctcggtgtctgcgctcgcgcatagatgtgtgcantgttcgacactcgcttacgagcaggctatgtatcggtcacatatgtagtacgcatgcgtaatgaccagtantgctactaagcactgacgactactcataccaccagtgttcatgacatatcatcggatgcatacttacgantctgcagacatatgctcatgatatcacgatccatntgtgangagaacancgtatgatncacaccgtgacacgtgatgatatctgnacatcacnactcgaatca

SEQ ID NO: 3701 - DNA, 659 bp, Glycine max
  misc_feature (659)..(659): n is a, c, g, or t
  Probeset Number=SeqID_13480
tcaaattctcttctgggtttcctaaattctcaacctttttctccaaattcggcttcttaaaatcatggttcgctgtagcaacaacctcgttggcatactcaacttcatcgtcttcctcctctctatccccatcttagctggaggaatctggcttagccaaaacgaaagtggaatccctaacctctacagcctccactcttggattggtattggtgtcatttctctttatggcttccaggtaaaccttagaagtgggttgcttccgtggcacgcaatcctaggcctatttgtttatatactcgcggttgggaacgcagctttagggtttctggagaagctgactttcctggagagtggtgctaagctcgacaagtacgggccagaagcgtttcttgtgaacttcacagccattgtcaccattctctttggtgccttggtggtactcactgcttctgctaagtctccctcctccattgacgatgctgataactacagctattctgctatatgaaaacgctttatacatttcttcagttcctcgcatatctttgctgctacttgtgctgtcaaaagattatataattatatgatgtatttgtagtgaaaacactttgtgtttgtgattccgctgattatgagtttgattacttctggtgtgn

SEQ ID NO: 3702 - DNA, 464 bp, Glycine max
  Peptide Sequence Number=SeqID_7914
  Probeset Number=SeqID_13481
tcagggtgcacggttttcacattcatggcatcttacaacaactatccaagcggctatgctcttaagcgcttgcatcagataagccatcctgcaaatgtaaagggagaagagtgggttcacatagacacttttagtgctatgaatggaatatctcgcttttgtgaaagtgcttttccgtggagatactcaaaagaggaagaaatggtggtggaggagttacaaaaccgaaacttcacctaccttgtgaacgagcacccgtctgtggatggatacaagtgcttgttttctgaagaaggcttcgacagagtcgaactgcggcaaggtttccctcccattgttctggtaaaaagagccaaagtatacgtgcaccaggatatgaaggcggatgaccagttgcataagaaatggccaggatgttagattcattgttttggtcgatgtagcacagctttgttatcctgaga

SEQ ID NO: 3703 - DNA, 1853 bp, Glycine max
  misc_feature (11)..(11): n is a, c, g, or t
  misc_feature (14)..(14): n is a, c, g, or t
  misc_feature (25)..(25): n is a, c, g, or t
  misc_feature (27)..(27): n is a, c, g, or t
  misc_feature (35)..(35): n is a, c, g, or t
  misc_feature (62)..(62): n is a, c, g, or t
  misc_feature (78)..(78): n is a, c, g, or t
  misc_feature (98)..(98): n is a, c, g, or t
  misc_feature (105)..(105): n is a, c, g, or t
  misc_feature (131)..(131): n is a, c, g, or t
  misc_feature (236)..(236): n is a, c, g, or t
  misc_feature (239)..(239): n is a, c, g, or t
  misc_feature (241)..(241): n is a, c, g, or t
  misc_feature (253)..(253): n is a, c, g, or t
  misc_feature (301)..(301): n is a, c, g, or t
  misc_feature (348)..(348): n is a, c, g, or t
  misc_feature (364)..(364): n is a, c, g, or t
  misc_feature (366)..(366): n is a, c, g, or t
  misc_feature (386)..(386): n is a, c, g, or t
  misc_feature (414)..(414): n is a, c, g, or t
  misc_feature (598)..(598): n is a, c, g, or t
  misc_feature (615)..(615): n is a, c, g, or t
  misc_feature (793)..(793): n is a, c, g, or t
  misc_feature (798)..(798): n is a, c, g, or t
  misc_feature (824)..(824): n is a, c, g, or t
  misc_feature (1053)..(1053): n is a, c, g, or t
  misc_feature (1074)..(1074): n is a, c, g, or t
  misc_feature (1120)..(1120): n is a, c, g, or t
  misc_feature (1140)..(1140): n is a, c, g, or t
  misc_feature (1187)..(1187): n is a, c, g, or t
  misc_feature (1272)..(1272): n is a, c, g, or t
  misc_feature (1409)..(1409): n is a, c, g, or t
  misc_feature (1527)..(1527): n is a, c, g, or t
  misc_feature (1532)..(1532): n is a, c, g, or t
  misc_feature (1546)..(1546): n is a, c, g, or t
  misc_feature (1566)..(1566): n is a, c, g, or t
  misc_feature (1592)..(1592): n is a, c, g, or t
  misc_feature (1605)..(1605): n is a, c, g, or t
  misc_feature (1654)..(1654): n is a, c, g, or t
  misc_feature (1663)..(1663): n is a, c, g, or t
  misc_feature (1724)..(1724): n is a, c, g, or t
  misc_feature (1729)..(1729): n is a, c, g, or t
  misc_feature (1776)..(1776): n is a, c, g, or t
  misc_feature (1810)..(1810): n is a, c, g, or t
  misc_feature (1840)..(1840): n is a, c, g, or t
  misc_feature (1853)..(1853): n is a, c, g, or t
  Peptide Sequence Number=SeqID_7915
  Probeset Number=SeqID_13482
gtttttacttnttnctttctcgtgntngctgcacngggcaggtggactgactgtgatactgngaggacatggatactnaatacatgtatagcatatcntatgatnatatataagaggagtgaataaggagnataaaacacaccacagcacatccagagacgtaagtgatatcacccaacagatagagatatagacgagctgagcatatgctcagctgtctctgtcgggtgagtcgntgntncggtgtagtggntgtatcgcgcatacgcgcgaagcagcatcgacaagcaatatagataanatatctcatatcgttcagtcatatcttatctctatattacacattcnacataacacgtctgcncnacagcaacgaatcttgacancgaaccgtagtagtcacgctcaatgagntacatctccacagtcagtgcggatatgccgctgccttgctcctgaacggcatcctatgttagcggttcgtcggattgtctttctataatcagcgagtattacgctcgctctgagcctacacggcggcgctagagacacgtacatatagtagtcatcgaacgtcatgcgtacaccagcactaatngagatagaaatatcacntagatcatgaagagacgtcatatatatggacacctcatcacacatgcttatgtatatagatagcaagatatcgcgcacgctttctcaaagcgccatcagctcatggtcgcctgacagctatgcaccgacatatcatcatgaacatgaacacagcgaactgcaacaagagcgtaggtcnacaangcgcgtagatggatgctacagataangcgatcgatctgagacactagctatcagcgtcgacatctagagtgcgccaggctctggtagtatacgaatgatataagtgtatgtgaggatgcaaggtcactacagtacgactaatctcatgtactagcagtatcagcctcgtatgtctcgcagcaccgatttcttgtgatgctgttcacatagtcgactgctcacttacagatcattcgtactcacgctgtgagacgncactctgatcacgacagtatntactcgtcaagcgtagcgtgaatcgatctaggattgcacgcctctnagcagcgacgatatactatncacttgtatcgacacgcacactacttcacgtcgcgttatatacgtgngctacgcatatagctctgatcgtcgatagcgattctgtgatcagtcgacggtgcactcgcgatgtcctgtcgcgttcacgtagantgtataatccatactatatgcgtatctctagcgcgttccgtatgatgtaagatcactctagctctctatagcacgacacctcgaagcatatcatatgtttgtgtgagaatcactatatatccgcagagatgatatantggatctcacgttttatcagctactgtagttacacagtcatcgctctcagacatgtacatgtatggctctatcgtctacctgagaaatataacgtgacagatcgatatgagagagcantatcngacgactcgagcgncaaagcgactacgtaacagntcgatcatcgtgcaatcatagctgantcgtcgatactcntgatctctcacgacacaatctacgcacgagagtcagacgccctgtacantctaggaantatacgtaactcgtgatactgtatactgcgactgtcgtcgatcctacagatgtcgcgacgntggtnctagtcctctgtgtacacttgtgagccgatgtatagcgagccatcgnacgctacacgacgcatgccagacagatatctaancgatacgagtgtgtgctaaggtttggtagnagacgcggcgtgn

SEQ ID NO: 3704 - DNA, 333 bp, Glycine max
  Probeset Number=SeqID_13483
tggggtcccaggcggtggcgtccggtgtagacatagtggatgcaccggggtgcaggaatgtcccacgaggccgttgcttagatcgcagtacgttgaaaagcaccagcacaaaaaaaaacgcatggcagctcggagcctcgggtctctatagctgtaagcgtaacaaccgcacgcttactcgggtgtaaaaagactgcaccttttcacatgcacacccgcgtgccaagatccctctccttcccgagatgcgcaatgcgcgccgagaaaacaggctgcgccggaggcatatgcgccccgagggccgccgtgaacgaagacggggtggcgggcttc

SEQ ID NO: 3705 - DNA, 628 bp, Glycine max
  misc_feature (601)..(628): n is a, c, g, or t
  Peptide Sequence Number=SeqID_7916
  Probeset Number=SeqID_13484
gagcttgataggaagactggcagcaacttacttcagtggcctgttgctgagatcgagagtttgagattgagaagtgatgaatttaaaaatttgaaggctaaaccagggtcagtggtgtcagtagatattgaaacagccacgcagttggacattgttgccgagtttgagatagacaaggaaacccttgacaaaattcctcaatccaacgaggaatacacgtgcagcaccagtggtggatctaaacaacgtggtgccttaggaccttttggtcttttggttttggcagatgaggggctttctgagtatactcctcagtatttttatgtcattaaagggagcaatggaaatcttaagactttcttttgtgctgatcagtcaaggtctgcttacgcaaattgaggttcgccgctaatacgtggggcccttctccatctctcaaggcgaaaagtttcccttccggagcgtgtagccatatatgggtgaaactttcagatggatgaaggatggtgtatactgtgggaatgtgctccttcgcgatctatgagcacatagtagtgacgttaactcacattcgcactcccgtgagcacttctgatacgcnnnnnnnnnnnnnnnnnnnnnnnnnnnn

SEQ ID NO: 3706 - DNA, 358 bp, Glycine max
  Peptide Sequence Number=SeqID_7917
  Probeset Number=SeqID_13485
ggtgaagtactcctgagaacccgacaatcccaccaagtcctgtaaggcccgaggcgctgaccttagagtgcatttcaagaacactagggagactggctttgccatcaggaagttgcccctggttaaagctaccatatacctgaaggatgtgctggcccacaaacaagccataccattccgacgcttttgtggtggtgttgggaggacagcccaggctaacagcatactctccaatggtgaatgacgctggcccgtgaaatcacttaacttcatcctagatttgctgaagaacgctgagagtaaggctgacgtaaaaggattggatgtcgatgctctatacatataccatgtccattta

SEQ ID NO: 3707 - DNA, 1370 bp, Glycine max
  misc_feature (19)..(19): n is a, c, g, or t
  misc_feature (91)..(91): n is a, c, g, or t
  misc_feature (124)..(124): n is a, c, g, or t
  misc_feature (201)..(201): n is a, c, g, or t
  misc_feature (245)..(245): n is a, c, g, or t
  misc_feature (464)..(464): n is a, c, g, or t
  misc_feature (650)..(650): n is a, c, g, or t
  misc_feature (652)..(653): n is a, c, g, or t
  misc_feature (657)..(657): n is a, c, g, or t
  misc_feature (659)..(659): n is a, c, g, or t
  misc_feature (662)..(662): n is a, c, g, or t
  misc_feature (697)..(697): n is a, c, g, or t
  misc_feature (983)..(983): n is a, c, g, or t
  misc_feature (1160)..(1160): n is a, c, g, or t
  misc_feature (1255)..(1257): n is a, c, g, or t
  misc_feature (1260)..(1260): n is a, c, g, or t
  misc_feature (1270)..(1270): n is a, c, g, or t
  misc_feature (1280)..(1281): n is a, c, g, or t
  misc_feature (1295)..(1295): n is a, c, g, or t
  misc_feature (1303)..(1304): n is a, c, g, or t
  misc_feature (1307)..(1307): n is a, c, g, or t
  misc_feature (1309)..(1309): n is a, c, g, or t
  misc_feature (1318)..(1318): n is a, c, g, or t
  misc_feature (1335)..(1335): n is a, c, g, or t
  misc_feature (1338)..(1338): n is a, c, g, or t
  misc_feature (1340)..(1343): n is a, c, g, or t
  misc_feature (1352)..(1355): n is a, c, g, or t
  Peptide Sequence Number=SeqID_7918
  Probeset Number=SeqID_13486
cgcgcgagagtcgacagangggagtatgagacacgacgcatgcgatcatatgcagaatagactagagcagagagatgacatgacacgagtncacagagcaaagtgctccgcgacatgcgccacnctcgcatcgtggacagtgggaaagagcagatagagacagaatcacaaggagtcgtgcacgggcgcgctaggcagtcncgccagtgccgcgcgcaacggcacacatgatactatacactgtncactagcatcatcacaccatctcctttacaagtatgagatccacaataaacgccacaggcgatgacagtagaacatgtagtgtgggcgaaatgagattagagataagaccaacacagctacaaagacgaagctcgactcatagggtcagtggcggcttcacattcagatatcatactcggtcaagtgagagtgcactgcacgagatctgtttagtattnggctggggcttggctcggcgtcggctggcgtgcggcgcgcgcattatcgagcacctcacaagaacaatacgatacacagctagtaacttagcattgactgttaagatcaaacataagaagggtggtggggtgtccctgacgttatatatcatcatgcgtagtggatgttgtgtgtttgtggttatnanntttntnttnttctggggtgctcactatacctatcgtataaatcnacactaactgtagttatcgtcgttataatgtccgttctctatgtggtgtgtgctattaatcttctggttatgagtagtatggattagcgattttatctttccaacctactatcctcgtcaagatacaactgtactccaagtagtcagcactccacgacaaaatttctccatagcgaatatgggagagaatgaggagggtatcatattacactataaagcacactcacagctggtcctccttcctagcccaacgcgatctgtgttttgatgttgtgctgagggtcangttgcgtgtacgactctgaatgcttagagagagtagtagaaagtgcacatacaccacagtagataaacgggtatagtagtgtgtggtccttatttctatttttacaatcagaactacgtctttggctgcctgcgttcactctcgtatcattactcttctcttgtctaatatattatngttcacacaagcgaccggggtgatgtccatatggtgtggtgagtggccggggggggaggaccacacccatagacttactcttccctctagagggnnnttnccgccaggtngcccattacnngcggcagtcttatntttgtttnnttntntaatatatntcccccgcgccccacgnganannnncaaacaaannnnccactacaaaaaccc

SEQ ID NO: 3708 - DNA, 1536 bp, Glycine max
  misc_feature (53)..(53): n is a, c, g, or t
  misc_feature (57)..(57): n is a, c, g, or t
  misc_feature (109)..(109): n is a, c, g, or t
  misc_feature (254)..(254): n is a, c, g, or t
  misc_feature (276)..(276): n is a, c, g, or t
  misc_feature (357)..(357): n is a, c, g, or t
  misc_feature (465)..(465): n is a, c, g, or t
  misc_feature (1464)..(1464): n is a, c, g, or t
  Probeset Number=SeqID_13487
cataatgcatagaagtaatagcgtgtcatgtcgcatcacgtgtatctatatgntatntgtaacggagtcacacatgcgaagtgcgaataggatatagtgatcaacctanccgatagatagaagcaggcaggatgaacgacggatggtgagagcgttagtcgtgatgtgcacatgagcgtgtgtgagacgtcttcgtgcctacacctaacctatcttaagctgataggtcgtgcgatgaataggcaaatcgacgngagagcgcagacacagatcatncatctcgcgtcatgcgaagacgagcggacagcaagtgccgatagtaataaggtgaatcaacgtcgaggcatgtcagtaagncggcagtagtcagcagggacgcagtgctatcagaaatctaactatgtactgctcggtgcatcacgaggcggcatgagcacatagaagagggcggacagcagcggcagngtaaatgtgatgtgaaatgataatagagtagaagcggaagatgcaacatgtgcaccgcacacacacatctggacacaagattaggtggcgtctaggacggcgcacgcacgtaatgatcgtcggggatgcacatagatcacatagcgacgaacaccatgagtcagtacttagcgctgcagcagctagatatatgtgcaggtatagtacagagatacataggtgatataactacgtatacgcgaccgtgccatcactctgagtcgcgctcatacagagtaaagacaaagtgcgacgcgacagtatgcgcggtcgtgacttcaaggcggcaataagacacgtaatgaacagagcgagatagcgactatttgtctgagcgggtcgactatatctcttatacgcacgctgtgctgcacagataagaagctagattacaaagtatactcaatatcgctattaagcatcaatcatatatgcttgtccgcatatatgaatatcaaatgatgatgcggagaaacgtgcgagaaggcatatgagagcgcggaacatgcaatatagcatctgacgaaagtatatcacgacaatagaacacactaatactagtatagttatgagtattcagctagctgcaagaagatggtataaagggcggcgcgcggagacagtagtcacacgacgcggagagcagatatcgcaatatcgatagtataagagtgacgtagactgtcgacgggtaatcacgatgtgtatacttcaatagaacgcggacctgcggagatgagacaaggtagtagagtaggcatccacaaacccgaaacccgcaatcactcatgaacgtcgaaggcgctgctgtcggttgataggatggctggatcaacgtaacgccctttcacctcaagagtgtgagcggaggaacatactcgagcgcgttgatgaaaatctgagacgcgctcacgagtgagcaccgcgcgcacactcagccgcacaaattacctatcacanacaatgtaggtatgagatgtttatgttgacgcgctctagaagaatacatcgaagggaagaggagtgagttac

SEQ ID NO: 3709 - DNA, 440 bp, Glycine max
  Peptide Sequence Number=SeqID_7919
  Probeset Number=SeqID_13488
ggaaccccctcccccccaattttattggggcggtcattcctgagattttttttgtggggggggcagagttctccagaatttttaatggcctgaactttgaagacaaacttcttccaggtggtccctttgcccccttgggggttgcaaatgatccagcccaagctgcctttttaaaggtgaaggaaattaagaatggccgccctgctatgtttgccccgcttggtttttacttcccagcatatgtccccggagaaggtcctgtttagaacctagcaaaacatttcagtggcccttttggcaacaacttggtccctgtcatttccgggttttcttaaaaagctcccactctttaaatccttcattttcatggttttttcccattttaatgggccatacctatccctgagatattttttaggccttttgctttgttccttggg

SEQ ID NO: 3710 - DNA, 443 bp, Glycine max
  Peptide Sequence Number=SeqID_7920
  Probeset Number=SeqID_13489
gacctcaatcgattcttgaaaatggtttccgcgcgtgaggagttcgtgtacatggccaagctcgccgagcaagccgagcgctacgaggagatggtggagttcatggagaaagtctccgcctccgtcgacggcgacgagctcaccgtcgaggagcgtaacctcctctccgtcgcttacaagaacgtgatcggcgctcgccgcgcctcgtggcgcatcatatcctcgatcgagcagaaggaggagagccgcggcaacgacgaccacgtcgcggcgatccgcgattacagggggaagatcgagacggagctgaccggaatctgcgaggggatactgaagctgctcgattcgaggctggtccccgccgcagcttcaggtgactcgaaggtgtttatctgaagatgaagggggattaccataggtacttggctgagtttaagaccggt

SEQ ID NO: 3711 - DNA, 2187 bp, Glycine max
  misc_feature (1)..(1): n is a, c, g, or t
  misc_feature (15)..(15): n is a, c, g, or t
  misc_feature (24)..(24): n is a, c, g, or t
  misc_feature (33)..(33): n is a, c, g, or t
  misc_feature (46)..(46): n is a, c, g, or t
  misc_feature (70)..(70): n is a, c, g, or t
  misc_feature (74)..(74): n is a, c, g, or t
  misc_feature (86)..(86): n is a, c, g, or t
  misc_feature (95)..(95): n is a, c, g, or t
  misc_feature (162)..(162): n is a, c, g, or t
  misc_feature (164)..(164): n is a, c, g, or t
  misc_feature (214)..(214): n is a, c, g, or t
  misc_feature (231)..(232): n is a, c, g, or t
  misc_feature (239)..(239): n is a, c, g, or t
  misc_feature (270)..(271): n is a, c, g, or t
  misc_feature (293)..(293): n is a, c, g, or t
  misc_feature (311)..(311): n is a, c, g, or t
  misc_feature (327)..(327): n is a, c, g, or t
  misc_feature (329)..(329): n is a, c, g, or t
  misc_feature (339)..(339): n is a, c, g, or t
  misc_feature (343)..(343): n is a, c, g, or t
  misc_feature (369)..(369): n is a, c, g, or t
  misc_feature (406)..(406): n is a, c, g, or t
  misc_feature (413)..(413): n is a, c, g, or t
  misc_feature (447)..(447): n is a, c, g, or t
  misc_feature (456)..(456): n is a, c, g, or t
  misc_feature (550)..(550): n is a, c, g, or t
  misc_feature (559)..(559): n is a, c, g, or t
  misc_feature (562)..(562): n is a, c, g, or t
  misc_feature (570)..(570): n is a, c, g, or t
  misc_feature (573)..(573): n is a, c, g, or t
  misc_feature (577)..(577): n is a, c, g, or t
  misc_feature (582)..(583): n is a, c, g, or t
  misc_feature (587)..(587): n is a, c, g, or t
  misc_feature (651)..(651): n is a, c, g, or t
  misc_feature (664)..(664): n is a, c, g, or t
  misc_feature (692)..(692): n is a, c, g, or t
  misc_feature (716)..(716): n is a, c, g, or t
  misc_feature (723)..(723): n is a, c, g, or t
  misc_feature (732)..(732): n is a, c, g, or t
  misc_feature (771)..(771): n is a, c, g, or t
  misc_feature (803)..(803): n is a, c, g, or t
  misc_feature (818)..(818): n is a, c, g, or t
  misc_feature (880)..(880): n is a, c, g, or t
  misc_feature (956)..(956): n is a, c, g, or t
  misc_feature (977)..(977): n is a, c, g, or t
  misc_feature (1032)..(1032): n is a, c, g, or t
  misc_feature (1039)..(1039): n is a, c, g, or t
  misc_feature (1131)..(1131): n is a, c, g, or t
  misc_feature (1224)..(1224): n is a, c, g, or t
  misc_feature (1252)..(1252): n is a, c, g, or t
  misc_feature (1292)..(1292): n is a, c, g, or t
  misc_feature (1296)..(1296): n is a, c, g, or t
  misc_feature (1306)..(1306): n is a, c, g, or t
  misc_feature (1313)..(1313): n is a, c, g, or t
  misc_feature (1346)..(1346): n is a, c, g, or t
  misc_feature (1359)..(1359): n is a, c, g, or t
  misc_feature (1369)..(1369): n is a, c, g, or t
  misc_feature (1380)..(1380): n is a, c, g, or t
  misc_feature (1387)..(1387): n is a, c, g, or t
  misc_feature (1395)..(1395): n is a, c, g, or t
  misc_feature (1444)..(1444): n is a, c, g, or t
  misc_feature (1473)..(1473): n is a, c, g, or t
  misc_feature (1485)..(1485): n is a, c, g, or t
  misc_feature (1498)..(1498): n is a, c, g, or t
  misc_feature (1508)..(1508): n is a, c, g, or t
  misc_feature (1513)..(1513): n is a, c, g, or t
  misc_feature (1532)..(1533): n is a, c, g, or t
  misc_feature (1540)..(1541): n is a, c, g, or t
  misc_feature (1555)..(1556): n is a, c, g, or t
  misc_feature (1558)..(1558): n is a, c, g, or t
  misc_feature (1564)..(1564): n is a, c, g, or t
  misc_feature (1575)..(1575): n is a, c, g, or t
  misc_feature (1594)..(1594): n is a, c, g, or t
  misc_feature (1629)..(1629): n is a, c, g, or t
  misc_feature (1643)..(1643): n is a, c, g, or t
  misc_feature (1658)..(1659): n is a, c, g, or t
  misc_feature (1673)..(1673): n is a, c, g, or t
  misc_feature (1681)..(1681): n is a, c, g, or t
  misc_feature (1689)..(1689): n is a, c, g, or t
  misc_feature (1717)..(1717): n is a, c, g, or t
  misc_feature (1733)..(1733): n is a, c, g, or t
  misc_feature (1745)..(1745): n is a, c, g, or t
  misc_feature (1756)..(1756): n is a, c, g, or t
  misc_feature (1872)..(1872): n is a, c, g, or t
  misc_feature (1877)..(1877): n is a, c, g, or t
  misc_feature (1904)..(1904): n is a, c, g, or t
  misc_feature (1906)..(1906): n is a, c, g, or t
  misc_feature (1927)..(1927): n is a, c, g, or t
  misc_feature (1933)..(1933): n is a, c, g, or t
  misc_feature (1938)..(1938): n is a, c, g, or t
  misc_feature (1943)..(1943): n is a, c, g, or t
  misc_feature (1969)..(1969): n is a, c, g, or t
  misc_feature (1971)..(1971): n is a, c, g, or t
  misc_feature (1984)..(1984): n is a, c, g, or t
  misc_feature (1987)..(1987): n is a, c, g, or t
  misc_feature (2027)..(2027): n is a, c, g, or t
  misc_feature (2030)..(2031): n is a, c, g, or t
  misc_feature (2034)..(2034): n is a, c, g, or t
  misc_feature (2037)..(2037): n is a, c, g, or t
  misc_feature (2065)..(2065): n is a, c, g, or t
  misc_feature (2076)..(2076): n is a, c, g, or t
  misc_feature (2107)..(2107): n is a, c, g, or t
  misc_feature (2130)..(2130): n is a, c, g, or t
  misc_feature (2143)..(2143): n is a, c, g, or t
  misc_feature (2147)..(2147): n is a, c, g, or t
  misc_feature (2157)..(2158): n is a, c, g, or t
  misc_feature (2161)..(2161): n is a, c, g, or t
  misc_feature (2164)..(2164): n is a, c, g, or t
  misc_feature (2167)..(2167): n is a, c, g, or t
  misc_feature (2187)..(2187): n is a, c, g, or t
  Peptide Sequence Number=SeqID_7921
  Probeset Number=SeqID_13490
ntgttgtattttttnttgtttgtntgtcttgcncgctctgggtttntactaccgtcttcttctctcttancacnggaacacacaanaccacaccntcgtacaccatagctgactgtacacattactaagcgcacagccgcttgctcatttgctacctcgctnantacacgcactcgactctattcgctcctactctcctactcgccttctttanataatatattattatanngatctgnggtcttactcatattcttgtatgcacgcganncaaatatagtatttctcatatngacgctcacttcacaacnaacgacctcacacacnanacactatgcncgcnaccgcattcccacatcatctacctcngcgcactcatatacaattaccaacacacaacatattnactacanctctatgtcattaatattatgtctacttatgtgncgtagcaancagctcagtggacactcacatgcagtccgcactctagagctctctcggcgcactctgttcagtgctgttactgaatataatctgagacataaanataagtagnganagatccgnaanaaanacaannactnaacgcctcacatgctatattcgtgatactctatgcatatcatatactcataccgtgatgatatnactatatatatanatatgagtgtgtaatactgagaatattnacatggttcacgcgccacgaagtncgtgtgngaaataacnatgcaccacactcgctatcgccttcacatcatcaacaancgtcacacgtctatatatctactaataaccantatcaatcttacctntactctcatctctcagactctatcattgtcactcgcacatcacactcatcgacagcatcacncacaccgcgcgagcgcaccgctgacaatatagacgctaactgcaggcataaacaacaagaagtatatacgacgaanacatggttcctactcgctgcntccacacactactggcatacaatgtgtctagtgtatatactatatgataatcgantgctgtnagcgcaaagcgctgcatacaatactgctctagcgagcgcgtcgctgtaactcacacaactcagtatgtcggactgcatgcgaccagactctnatctgctactgagtcctgcgtagatcaccctacacgtatcactatccatggacatcaactatacgacatcacacactgtgacatatagctcgncctacaccatgaccagcgctgggtgtgncgacaacgtcagcatacactgatgaatatatgtgtcgcanacgnattatatgtngtcatcntatcttgttcgtcgctagcacactactatatantatatatatattnactcactacnctactagtatncaatacnatcgtcgnactacgagatactacttacatcagtacatagctactccactatcatacnacaaaccatcgcagctgcacacactacancacgtctaatanctacaatcatgcnggacgtcgtngtgcngtcggccgtattactacannatcgtgnnagcgactactctanncnctcatnctactaaaacnccgactactacgccaggcntcccgctgcgtcctactcagctgctactcaactancatcaacgtgatcngtggtctgctcacgnngcgtcgtctgtcancgacgtgntgacagangtacatcagtgatcgacggacaagcatnacatcacatcatcgcntactacatcacncgtcacgatantgtgccgcgactaccactagctgccgcgtagactacgatgcgagtgacaggcactgctgaacaaccttaaccctcatccacgacaccgacagcgcccaactacacttactttcttncgatnctctgtcgtcacatccgatacacactncncgacgtgacgtagtgcgttancataanacgtncttanacgactccgtacgctgctctgcgctngncttcatcgtcgcncanatcctgctgactgctgccgaccactcccttcatctacgancgnnctnatnctactttccagtttcgtctgctcgtcgnctcttttcatnagtcacgttagtatgtgcatttctagactgngttgctgcgatttgatgatatcntatcgtagatcgngctngtgatctaannatnatntcntgtaatatctcgtactttan

SEQ ID NO: 3712 - DNA, 1408 bp, Glycine max
  misc_feature (9)..(9): n is a, c, g, or t
  misc_feature (11)..(11): n is a, c, g, or t
  misc_feature (13)..(19): n is a, c, g, or t
  misc_feature (21)..(27): n is a, c, g, or t
  misc_feature (41)..(41): n is a, c, g, or t
  misc_feature (150)..(150): n is a, c, g, or t
  misc_feature (152)..(152): n is a, c, g, or t
  misc_feature (188)..(188): n is a, c, g, or t
  misc_feature (264)..(264): n is a, c, g, or t
  misc_feature (333)..(333): n is a, c, g, or t
  misc_feature (1089)..(1089): n is a, c, g, or t
  misc_feature (1162)..(1162): n is a, c, g, or t
  Probeset Number=SeqID_13491
ccccccccncncnnnnnnncnnnnnnncccccccgggcccncgcacgcgtgccgtgcgccgttcgcctgcgagagggagttaatcctttctcccacactaatgcccccctttctcatacattttcacggtttcctccacgccacgacccngnaatgctcccccaccatacaaacctcgaacatacacnggaggaagaaattggcgcttgatagccgttcgttgcgtgtgtttggtgggtgagtttttgtgggatgctattttgntctgggcggtgcgatccaaggcgcgggtgcgagtgaagattggtgggggaatggcggcaacagcacaancggaggcggggactgcggtcaagtccacacagagtctaatcatactctttatcaccctataccattctacaccacaaaaaaaaaaaaagggagattatgcggctggggagagtcactactgcagccagatatgagagaagaatactagaagtatcggtggagggataaagacgcgctggggcgagagattataaatcggttgataactaggcttaagcgggtgcaataaaggcttgttaggggaatattattgtaccccgcacgcgttttgtcgtttggggtgcctaatacctcgttagcatccggcatgccgagcgatagagattgttattaaacaacaacattactaatcacatcatcctatctaaaaacagataatgtattagtgaccccattacgttttggggtatggagttgaactggcgttaacaccacagcagagccatatatgtatttaactccaaataataatgcgggcgcacccgtcggaggccacgagatcgcgcggagcgagtaacgaccgcttgtccgtttgtgtgcgcgtacggcggtgtaattctacaatatatcccttcttccggaaaagtggataacttagggttgtggtgggcgcggctcgtgaatctcgcgcggcgcccaaccacctcacacatccccatgtatatattgtagtaacctttaaaatcaactttcgttgtcctcaacgcgtatgatcattacacccccgagggtggtgctaactcacaaaaaataagnccgagagggccgtagagagtgaaaaataagactcgcagaagaccacaacctcgaaataagactaacccataantgtgagggtagtacagcatcacaataataatgtaacgtggtgtaaagcgcccccagcgacaaaacagtagaaagaggtgtaatgcagactttagttcacatcgtctggccgttacttgttagtatcgtgtggagacaccccttcatctctctagccatgcttcctctcacgtgtgcgcgcgccctgtcgacctccgctcggtgtcgcaccataccacccgtacgtgcacgcgcacgcacgatagcc

SEQ ID NO: 3713 - DNA, 1370 bp, Glycine max
  misc_feature (165)..(165): n is a, c, g, or t
  misc_feature (411)..(411): n is a, c, g, or t
  misc_feature (531)..(531): n is a, c, g, or t
  misc_feature (576)..(576): n is a, c, g, or t
  misc_feature (937)..(937): n is a, c, g, or t
  misc_feature (1236)..(1236): n is a, c, g, or t
  Peptide Sequence Number=SeqID_7930
  Probeset Number=SeqID_13492
cggaattggagcgcacacgagatgatgagtatagacacacagcagtatatatagactcggaacagcactatgtagagcgtcaacttagtaggcgtcagtcgacagtctgagtggatatgtctatctataacggacaccgcgcgcgcgcgcgcgacgcgcaacgcncccaggagccgcgcgcgaattagaagagaggagaacgcgcggcgacgcgcgatagatatagatcatctgcgacgcgcgagttgtgtgtgtacgtagaggcggttgggacgtggatacgagtgtgagagataatgagtgggccgacactcgagctcagcttgagctgtgttaggcgcgctatatgtgagtgtgcgaggagtagagcgcgagcggtctctcgcggggtcgtacgggaagagtgtggtntcccgcgagctcgccacactacgcacaccgacacacgagcggcgacgtgtgaaggacaggcagggtagtcacaataaatatcctagagtgattgctttgtgacgtttcctatcacggcgncgaggtggtaataccacgacgacgggtgcgacacgcacgcccacnccagagtgagaaatcaatatcagaccagcaatgagtaagcagtacacatagctcaagcgaggtgatcgcgcgcggtatcgggccggtggcggggtcgcgcggcagcggcacccaattataaggcagagaatgagagacaatacacagagacgaggtcgttctgagtccgggcgacgcgccgtcgtggcgcggagaacaagagacccgacagggacgggcggcgcgggtagagagacactggtcgctgcgcaaggtggtaggatcggaggcggcgggggagtgcgacgcgcgcagggaggtagagcgagaagagatgtggaggttgagtgtagtgtgtttgtgggagagaggtgtaataggntgggtgtcgtgtgtacagcgagattaccgcgggtgagcaccacatgcgatgccggcagatcggttcggatgagccacgccgcgaagcctcgcgagcatagctaaacaaaagcaagccaactgaaaacgacacaagatattagaatttatttaatgcgagatgaaaaagtcgccagtcttacgtctctccaggaatagatccgcgagtcttctcaacgacttattgcctcctctcggttacttttgcttctctcctatctcctctctctcttctcttttctgtttattacacaaacaacnttgtttgttagaagtcgcatttttgttgcgcacgtcgtgggcgcggcgcgcggcgcctggttcagcaccagcgccttccgccccacagtgcgatgctcaaacctgttatcatccatatctctcgcactatctgt

SEQ ID NO: 3714 - DNA, 757 bp, Glycine max
  Probeset Number=SeqID_13493
tgatgaggaaacagagagtgagagattggtagaagaaatgggagagagagagagagagagggttggattggttttcttcttccttttcttctaaagagaatctaatctcaatcctcattacagatttcttcattcctctctcaggcttttctgttttccccctttgacatcctcgttttcgccgaaacaaaaacaactaacatttttttttgtgtgctttgcttttcttctccttgctggtatttgactcgggtgtctgaatcggttgctgcagcagggtcgggagccacagctatgcagagccaacttgtgtgcaatgtatgtaggagccttctgctttacccaagagggccatccaatgtttgctgtgcatggtccaccacacttacctctgttccttcccctgttatgcccctgctccccctttatcgcctttgctcctttcttccttttcccctctccccccttttttcccccgtttctctttcccccttttttcccctttcccccttttttcccccttcccccctttcccccccttttccccctttttcccttttcccgccttttcccccctttttctccccttttcccccccctttttttcctccctccttttcccccccgttttcccccttttttcccccccttttcctttccccttttttttccctttccccctttgtttccccttcccttttttccccccccgttttcttttttccccctttcttcccccccctttttcccccccctt

SEQ ID NO: 3715 - DNA, 257 bp, Glycine max
  misc_feature (3)..(3): n is a, c, g, or t
  misc_feature (96)..(97): n is a, c, g, or t
  misc_feature (140)..(141): n is a, c, g, or t
  misc_feature (150)..(150): n is a, c, g, or t
  Peptide Sequence Number=SeqID_7931
  Probeset Number=SeqID_13494
agntacttttcgagaaatcgacgcggaaagagcttcttcttcttcttccatctctccgattcgcaaagaaggaatgtcgagtctatacagaggtgnntcaaggaaagagaaacccagacgtcatcatgggttgaatcagnngaagaggcnagagatcaaggaagcttttgatctctttgacactgatggctctggtaccatcgatgctaaagagcttaatgttgctatgagggcgcttggtttcgagatgacggaag

SEQ ID NO: 3716 - DNA, 640 bp, Glycine max
  Peptide Sequence Number=SeqID_7932
  Probeset Number=SeqID_13495
gaggatgctgtaagctgtttcgagaaggctgtcaagtctgacgacttgcttgatgctgccaaatcgaacttggcaaaagcccttgcgttggctaagaaacagtagagcaagagatgatgaacggtgatgacctttcatccattgcgctggagcttcgaacaggaaggacctgtccatgcaaacctcgtatctggaatgtcaactttcaaggggccaactcagaagctatgcttggtgactctaaggctgctcccatccgtgtgcagcggatcagcccccaggctccgcagttgcgctggtaggttttctgtggccggtcactcggaaagggaagagtttgaagaaattctggagtaggatttgactgtaagtttgtaacaagcatgcgacatgaatatgaaccgactgtacctgtaccctgtacataacacctcaaagttttagctacaaacacaactcactttcactgtaagatcagttgtcacaacgccgtctctttttttttttttttggcgacaccatctccggtttgaagttgtgttaaaaaaaaaaaaaaaaaaaaaaaaaaaaaaaaaaaaaaaaaaccaaaaaaaaaaaaaaaaaagtttatcgawaccgccdacctcaagggggggcccgg

SEQ ID NO: 3717 - DNA, 785 bp, Glycine max
  misc_feature (65)..(65): n is a, c, g, or t
  misc_feature (304)..(304): n is a, c, g, or t
  misc_feature (340)..(341): n is a, c, g, or t
  misc_feature (454)..(454): n is a, c, g, or t
  Probeset Number=SeqID_13496
cctgaattctggaaggagactcggttctccaaatcaccattccaagagtacactgatctgttggnatagctgccagtgactctgaaaacagtgacgcttgcgctacgctcgaaagatgaacccctacccccccacctataaccaagctccctgaaagggacccgccatcacagggacaaagctcacgataccccgttttgtatcctgtgttaactatcacgactaccatttactcccctaccaccagcttactattcaacgccgctccataatcaagtcctctctcaccacttcccttgcccantcggaacattcgtacccgccgttaactattctcgtnnacactttcggcgcctcaacaccagttaggccaaactacacgcctcccatctttttttaaatcccactaatgaccgacaaattgtgccccatcaccccctctatttaactcccnaagcaaactagacccctagcataggtggcttggaccggttcgttctttcaccttttggacaacaaaaaagtcccaaccttattaaatagtaaccggtgggcctctcccaccccgtaaaaacgggcccataaaacaaccgttttactcaagggccggaagcggcccccattaacggggaaacctatcccaccccccaacccaagttctttctctcggtgattatacgtctggccccgataaaggccccttaaaattcggacaacccctcaaaaggggtaaacccccccgagattaatagaaggttttgcaatgcgcggaaaacacctcggtt

SEQ ID NO: 3718 - DNA, 498 bp, Glycine max
  misc_feature (8)..(8): n is a, c, g, or t
  misc_feature (17)..(17): n is a, c, g, or t
  misc_feature (21)..(21): n is a, c, g, or t
  misc_feature (42)..(42): n is a, c, g, or t
  misc_feature (80)..(80): n is a, c, g, or t
  misc_feature (87)..(87): n is a, c, g, or t
  misc_feature (100)..(100): n is a, c, g, or t
  misc_feature (143)..(143): n is a, c, g, or t
  misc_feature (171)..(172): n is a, c, g, or t
  misc_feature (247)..(247): n is a, c, g, or t
  misc_feature (251)..(251): n is a, c, g, or t
  misc_feature (255)..(255): n is a, c, g, or t
  misc_feature (261)..(261): n is a, c, g, or t
  misc_feature (271)..(271): n is a, c, g, or t
  misc_feature (274)..(274): n is a, c, g, or t
  misc_feature (280)..(280): n is a, c, g, or t
  misc_feature (282)..(282): n is a, c, g, or t
  misc_feature (284)..(284): n is a, c, g, or t
  misc_feature (289)..(289): n is a, c, g, or t
  misc_feature (292)..(292): n is a, c, g, or t
  misc_feature (299)..(300): n is a, c, g, or t
  misc_feature (309)..(309): n is a, c, g, or t
  misc_feature (311)..(312): n is a, c, g, or t
  misc_feature (315)..(315): n is a, c, g, or t
  misc_feature (318)..(318): n is a, c, g, or t
  misc_feature (322)..(322): n is a, c, g, or t
  misc_feature (325)..(326): n is a, c, g, or t
  misc_feature (329)..(329): n is a, c, g, or t
  misc_feature (333)..(334): n is a, c, g, or t
  misc_feature (340)..(340): n is a, c, g, or t
  misc_feature (356)..(356): n is a, c, g, or t
  misc_feature (373)..(373): n is a, c, g, or t
  misc_feature (393)..(393): n is a, c, g, or t
  misc_feature (403)..(403): n is a, c, g, or t
  misc_feature (420)..(422): n is a, c, g, or t
  misc_feature (427)..(427): n is a, c, g, or t
  misc_feature (432)..(432): n is a, c, g, or t
  misc_feature (438)..(438): n is a, c, g, or t
  misc_feature (445)..(445): n is a, c, g, or t
  misc_feature (449)..(449): n is a, c, g, or t
  misc_feature (452)..(452): n is a, c, g, or t
  misc_feature (482)..(482): n is a, c, g, or t
  misc_feature (486)..(486): n is a, c, g, or t
  misc_feature (488)..(488): n is a, c, g, or t
  misc_feature (490)..(490): n is a, c, g, or t
  misc_feature (497)..(498): n is a, c, g, or t
  Peptide Sequence Number=SeqID_7933
  Probeset Number=SeqID_13497
ttaagctngaaggctantttnacaaaaatagaaggtgggccngtggctattggccccccagagtattccagaataagatnttatttncggagctggcccnggggatatttactctatccatgttttgggattccatgtgcctnaaaatggactttccagtctttcactggnngaaaaccatttctactgggtgcttgtttgtttcatgatatgtttagccaatcaaacgtaaaagactcaatcattntctngtangacgtntgcagatagnggncacaanantntctanatnaagtaannctttattcntnncanttncccncannttnaccnngcatcncattctcattttcctngtatacggaaggagtcngagagaagctcctcctcctntaaggaggtnctggtaagccatcatgnnnacagngtttntctcgnatcgctncaancancaagatattcgtgcggtgaaactggtgcgnacanangngagagann

SEQ ID NO: 3719 - DNA, 1737 bp, Glycine max
  misc_feature (1)..(2): n is a, c, g, or t
  misc_feature (14)..(21): n is a, c, g, or t
  misc_feature (24)..(27): n is a, c, g, or t
  misc_feature (32)..(32): n is a, c, g, or t
  misc_feature (49)..(49): n is a, c, g, or t
  misc_feature (54)..(55): n is a, c, g, or t
  misc_feature (157)..(157): n is a, c, g, or t
  misc_feature (262)..(262): n is a, c, g, or t
  misc_feature (265)..(265): n is a, c, g, or t
  misc_feature (302)..(302): n is a, c, g, or t
  misc_feature (372)..(372): n is a, c, g, or t
  misc_feature (504)..(504): n is a, c, g, or t
  misc_feature (543)..(543): n is a, c, g, or t
  misc_feature (717)..(717): n is a, c, g, or t
  misc_feature (823)..(823): n is a, c, g, or t
  misc_feature (847)..(847): n is a, c, g, or t
  misc_feature (1049)..(1049): n is a, c, g, or t
  misc_feature (1077)..(1077): n is a, c, g, or t
  misc_feature (1234)..(1234): n is a, c, g, or t
  misc_feature (1248)..(1248): n is a, c, g, or t
  misc_feature (1385)..(1385): n is a, c, g, or t
  misc_feature (1455)..(1455): n is a, c, g, or t
  misc_feature (1463)..(1463): n is a, c, g, or t
  misc_feature (1518)..(1518): n is a, c, g, or t
  misc_feature (1526)..(1526): n is a, c, g, or t
  misc_feature (1535)..(1535): n is a, c, g, or t
  misc_feature (1645)..(1645): n is a, c, g, or t
  misc_feature (1647)..(1647): n is a, c, g, or t
  misc_feature (1707)..(1707): n is a, c, g, or t
  Probeset Number=SeqID_13498
nntttttttttttnnnnnnnnttnnnnttttnttttttaccttttcccnttgcnnttctgatcttatttttattcaagaagcatgggaagtctctactcgtcgcgatgtgctgtgcacgctttctaagaatactatgagagtataccccctcgtggnactgtctagggagatctctatctcactatactctcttcatgtgtttagagaagaacatacatatctctgttttacggaagagattcgtattagtgtatgttacgncantccgctgcggtccgtgctacgctcttcatgcaccctnctttaaattcgaccacgacacacacacacacactcaaaattagaactcacaaggagattgggttattcgnctaacatcacccgcacgccacataccatgcatggctgcgatacgtattgcgattgtatattccgcattcttatacagcgacctgcagcgagcgtcatgccttcgcacacttcttcgcttcaggtgtagttantgtgtgatagtgatatgtactcatgataaatatcataanttcgagagatagcgatatggctgagactagtcgatatagagcagcataggtcagtatacgaataatatgatattgagcataggacgcgcacataataggaaggccacggtggcgtcctcaccaccccgcctggagactgggcacgtcgagatgcacctccggcgtaacttcatncatacatgtcatagcgtaatttatagtatgtgcagagcgcacacatacagagcgtacacagccgcaaaataacgccacagcacctctcgggcgcggtgctatcctnctacctgatggacatactgaaatntcagatgattggtctggtaatgagtaacgagcagtgactacatatatcacgattactaacactcgctcactaagcagacgatcacgctcaaggtctcccacaacgcaccgccgccttcactgtaagtgggattccttgtgtggtcggttggagttggtcatatcatattatacctatgatcgcgtcttgtttctcacactanactcggcatatttattatgatacattgngtgcgcgatgttgtcgcgagccccgcgcgctccgcctatgcgctgcaccaccgtgtctccataccgcctcttacgtgcctcatccgcctggccgcactgcgctaatgtcgccccgctccgccacatcgtcgcgctcgtaaagcaaaacgccggctcngctagagacatacncacatgtacatacgtctcatagatatatacatcactctagtaccgtcgcctagtactgaaaaccaatatataattgtcatccatctctcctcgctcgctctccgcgtcgagcctgtcttctcttgtcctattgtacntatatataacacacgatagacactccgatctccataacgatgctgactacatcacactacagcagcacanaccgcganaggatgatgaccgcacacccgactatctaagtatcgcgtggaatattactgttancatggcgncggcgcggntgacgaggtgcaatgagtgagagaagcaatcagttagggtcttagacacaatagacacgtcgacgacgtcacactctcgtcttcatcgtgccctcactgctcttctctantntgcatacgctgcgctccaccacctgcatctgctgtgttgatgcgaacggtgcagtgctantatgtgggtctatgacgcgaccggctatac

SEQ ID NO: 3720 - DNA, 1667 bp, Glycine max
  misc_feature (15)..(15): n is a, c, g, or t
  misc_feature (222)..(222): n is a, c, g, or t
  misc_feature (377)..(377): n is a, c, g, or t
  misc_feature (382)..(382): n is a, c, g, or t
  misc_feature (495)..(495): n is a, c, g, or t
  misc_feature (818)..(818): n is a, c, g, or t
  misc_feature (1133)..(1133): n is a, c, g, or t
  misc_feature (1241)..(1241): n is a, c, g, or t
  misc_feature (1243)..(1243): n is a, c, g, or t
  misc_feature (1367)..(1367): n is a, c, g, or t
  misc_feature (1393)..(1393): n is a, c, g, or t
  misc_feature (1413)..(1413): n is a, c, g, or t
  misc_feature (1450)..(1450): n is a, c, g, or t
  misc_feature (1454)..(1454): n is a, c, g, or t
  misc_feature (1456)..(1456): n is a, c, g, or t
  misc_feature (1466)..(1466): n is a, c, g, or t
  misc_feature (1485)..(1485): n is a, c, g, or t
  misc_feature (1525)..(1525): n is a, c, g, or t
  misc_feature (1582)..(1582): n is a, c, g, or t
  Peptide Sequence Number=SeqID_7934
  Probeset Number=SeqID_13499
gtgtttgttgccccngttgccttcttcgcgttacctattatacaggggtattagttgtcagggctagtcgcccctctctctattatacaatatgctttcgcgctcctctcgccgcgcggggacgggctatttcatgtttggtagagtggggctcctcatcaccacccagccccgcatgacacaggcaggtgaaacacttctgcaatcacactcttctctatntatacccatccactacgccgtgcgaattagagtcggacgtaattatatatgagcaaagaagcgcgctattcgtcgtgggaataggtcctcagcattatcacgcaccactagtagtgagtgtctcttcacccgtattattattctactcgcatgtnccgcncgtacttcttaggaattctaagtaaaacaatactatcgacctatgcatattcatctctccattcccactgcgccgcacaacacatcttttgttgtatttgcatcatttgaatngagattgttgttctgatcctgtggtcgtttggcttaagttacacgcacaagctgatatttttagatcacgtgcaagagcatatagcttgtgtgatggttaaaacctacaattggtgttgacttaatggacgcttgctatatatagtgattatatggcgagactacacgccgatcgcaaggcccgcggttgcgcgtagtatatataagcccgcaccaccgcagctggccgaccctatatgtatgaagattatggtcgatgtattaaggtatgatatgactacttctgttgttgtacattagcgtcgcttatgatccggaagcgnggagacgacgtccacacactcaatcttctgtttgtcacgcaactctgcgactctctctattgctggtgttattgtgttctcacacactcacacaccagcaaataagcgctgtgccattctctctgtcgttatgtctcgtcagtttatcttctatgagtatttctctgagccgcgcaatctgtttacgtttattaagtcattctccacagtacactctgtcctccggcccttatgtgctgtacgacatgtcctgtatgtcactataaatagaggagagacgtcagcctatatccactctccattcttgttgcgatnatatgacacgcggccgctatgtatgtgttagtatatgttcactcacacatcgcgcgcgcgggtgtctagctgactattttaattctcgcttctcgcggacgtcgtatntntctcagcccgcagacgttcgttggcgccgcggcgagctcttacgcctcactacactatactaagatactgtacctagtcgagtcaacgcgtcagacacatatcatactcaacgaacgcaccgcngtcgatatatacttattctatatgtncgatcatacataccacatantcgcagccctctgtctgcgcagtgagatgtctccacnggtntnacgctgatanatctgatttgactatactnactaatcatgcactgacgctgcaactctgagtaatctctnataactaatcgacgttctgatattcatctatgagactatagatgtagagattaacgngtcggtatctgctggtatacatcgacatccgatattctgtctgatcattctaatctaccgcccactctgctgtattgctggatag

SEQ ID NO: 3721 - DNA, 1445 bp, Glycine max
  misc_feature (13)..(13): n is a, c, g, or t
  misc_feature (19)..(20): n is a, c, g, or t
  misc_feature (27)..(27): n is a, c, g, or t
  misc_feature (29)..(29): n is a, c, g, or t
  misc_feature (84)..(84): n is a, c, g, or t
  misc_feature (544)..(544): n is a, c, g, or t
  misc_feature (836)..(836): n is a, c, g, or t
  misc_feature (858)..(858): n is a, c, g, or t
  misc_feature (893)..(893): n is a, c, g, or t
  misc_feature (922)..(922): n is a, c, g, or t
  misc_feature (963)..(963): n is a, c, g, or t
  misc_feature (1053)..(1053): n is a, c, g, or t
  misc_feature (1122)..(1122): n is a, c, g, or t
  misc_feature (1126)..(1126): n is a, c, g, or t
  misc_feature (1199)..(1199): n is a, c, g, or t
  misc_feature (1235)..(1235): n is a, c, g, or t
  misc_feature (1287)..(1287): n is a, c, g, or t
  misc_feature (1376)..(1376): n is a, c, g, or t
  misc_feature (1387)..(1387): n is a, c, g, or t
  misc_feature (1445)..(1445): n is a, c, g, or t
  Peptide Sequence Number=SeqID_7952
  Probeset Number=SeqID_13500
tgctttttgtgtnccctgnngtcccgngnttctcggtttcgctctgcgtggttggtggcggtgccctcgtttcgtgttgttctncgttctcggtttccctttccttccattcttcaagcttcttctgtgtgggcataggcgagtatatgcactctgtccaccacgggcgataacccgtgtggtcaacagttaagagagtcctacagcatagaatctagtgatctgacatgaccaagacgcctcagcagctgtagatagtctttctctctcgctactacacactaagacacaccgccacatcatctatccgcaggatacacgcaagagtagcacatgaactgcaaaagactaatttatccactgtcgtgttactggattacggtgttcaaggcgagtcagtcgtccttgacggcgagggagtgatggacattcttattatgtcatcctctgcggactgacgctgctctcttgagcccgtctgttctctcccccgttctttccctccttcacttactcccttcgtcgcgtctcccgcctacccgcncgataacatatttcatttcacctttacctgtcgttctcgttcgcttccattctcccatattgttaaaccattcaagttaatatacgctataatacttctatttcattgccctcgctcacaatcgcattccttcatccaaccatcgtcatcctcgtcctcgtctgcctacacctcgccttctgatacctctgccctacactatcgacaacactgtctctacaagcaccgatagaactgatcatcacacctctgcctctccaccaattgtactaactcagcgtcacgatgtctntcgttctccgcgccgcgccgcncttcggacgcgcgacgcgtcgcgcgcgcgtcggtncctcctgccacgctgaacaagatcctacncttgtctatcagctcgttcccatgaagggcgttgagaccantgagacacccagaccgacccgacgctcctctgccagttccataactcttctattcaattctctattaactactccaaccacatcactctngactaacacacggccaatgctcagatacatcatcaaaaatggcgtattaccccactaatgtgaccacanactnctacgcttatgtgcagctacgtgagccgaatgacacacgcacaccgctttcatcctcgtagagatattatagnattcgtcatacccacctcgtggtgagaacggtcaantacccgcatatagagatgtgatctatacgatgcaccgctgtgagacgagcgnatcacactatctgcactgccgcaagtactcgcacgcgcgctgtaaaaactcttgttctccgcagctaggtaggccttacgtcgcgatangcgtgcgatanacaagagaaccacagtactcagcttcagtaactccgctcagagtctcatgacacggcn

SEQ ID NO: 3722 - DNA, 1659 bp, Glycine max
  misc_feature (1)..(1): n is a, c, g, or t
  Probeset Number=SeqID_13501
ncccacgcgtccgcccacgcgtccgacggctggcgagaagacgacagaaggggagttctgcctcgcgttttgctctggactctcaccgttccttcagagtggaaccctagttgtctctatccttaaggttccgccaccgcaccaagtctcagcacccaaccaggtcttctttcattcatggcggaggaacttatttctcaattaaacaatatgctagaagaaaatggaacaccaagtcatgtagaaagggctttgatgctgatgctgatgctgatgctgagctttctccaccatcacaaaaaggagatgacactaaagaagtttcaaagaagaaaaagaagaaatctaaaagcaagaaaaagaaagaactcttgcaacagactgatccaccatcaatttctgttattgaccttttcccatctggagattttcctgaaggtgaaattcagcagtacaaagacgataacctatggagaactacatcagaggagaagagagaactggagcgcctgcagaagccattatataattcagttcgtcgagcggcagaagttcatcgtcaggttcgcaaatatattaaaggcattttaaagcctggaatgctgatgactgacatatgtgaaacattggagaacactgttcgtaagctaatatcagaggatggccttcaagcaggcattgcattccccacaggatgctctttaaattgggttgctgctcactggaccccaaattcaggggataagactatacttcagtatgatgatgtgatgaaattggattttggtacccatgttgatggatatatagttgactgcgcttttaccgtggcattcaaccccatgtttgatccactacttgaagcatctcgtgaagcaaccaatacgggtattaaggaagctggaattgatgtgcgcctttgtgacattggtgccgcaattaaaagggtcatggattcttatgaagttgagattaatgggaatcgtatatcaagttaaaagtagttcgataatgtgaatggacaatcagcacatggtggagtacgagatccatgtgctggaaatgatccgttcccatttgtagaatcacaaaaagggtggggagcaaacgaagttggaagaagggaagaaaatttttgctaatgcgaaaaaccgattgaacttctacaccaggggaaacggctatcgaacgagattactagcgttttcacatcttgagattttaattaaggtgatgttcatatgcccaagggagagaacatatggaagaatattttagagctgatgtgagtactgggaaaggcagcagtatccatcaattagattcaacaatcctagcccgaccaacttacaaagaagttctatcaaaggttgacgactattaaaagggattagaacggatttttttttttttttaaatgtgatagtaactctgctattatgtttgtgaaatgttttcattacaacatcaacactttggttttaaatatgtgcctgtgaaggaggccattactcgtttaataactgaatatttcctcaatagataatatcgtattagaaggtccacccaaaacattatcattttactaattgtaatcaaatatacagaaccccattcttttaaccaacttggtcacgcttcaaattaaaaaaataaaat

SEQ ID NO: 3723 - DNA, 617 bp, Glycine max
  misc_feature (617)..(617): n is a, c, g, or t
  Peptide Sequence Number=SeqID_7953
  Probeset Number=SeqID_13502
agcgcgaataatacgagagtggaaccccgtgaagaacgatgaggtccttggagggatgatagccgaaatgtgttgacttgcagttccatcttccctcccctgttagttcaccagacaaataccaaattgcatcagggattatttgatccctcctttgaaaacaaaacgatgcccattttcaaaacgccgattcaacggctactccgtaaagttcaggcccttctacgagaaccgtctggccgtggccaccgcccagaacttcagaatcctgggtgacggtcgcctccacgtcctcgacctctcccgggagacttccctccgcatctctgagctggtcggctacgacaccgtcgacgttatctacgacggggcctgctcggaatgccacgattcatcgagatcgccgccgtcgcccacggattccttaaggctcacccacctgtgccctcccgccaaactccaagccccatccggttccttcccaggaacacaccccgtggagggttcatctccggcggaataacaagccccgttccggcccgatgaccttcctttccgtgctacttccttccctggggaactgaacaccccgcccatagttttctttgacacccccn

SEQ ID NO: 3724 - DNA, 752 bp, Glycine max
  misc_feature (593)..(593): n is a, c, g, or t
  misc_feature (602)..(752): n is a, c, g, or t
  Peptide Sequence Number=SeqID_7954
  Probeset Number=SeqID_13503
atatacatatatacacttaatttaagatgttttattccacaagcggccctgatgcattcaacaaaactgctaaaaatggccaaggtactttaatccaaaactggcaagaagaaagagttttaagagatgaaactggtgaaggaagaaccaataccagatctcacattaaaaaacaacatgaagacctcttcttaaagcctacacaagagctaggcactgtttatgtccaaaacaatggtcaagatcaaacatttggcagagtttttggcagaaagcatgagcctacttatgtctctgagcataaagacaaatatgccagaaagactaactatcaagagccagtctttggtaaaaagcacgacttgattcaaagacagtatcttcaagagattcgttcagagttacaatcagctcaaaaaagcaatgaagacttacataatgagagatatatgaatactcatacactaatgaattcgctaaaaagaatggtgccgttatgtcgccggaagaagagtcatgagagatcaaacgggaagagttgaccctatctagaacccagacttatggtgatctggctccttatagaagtaaangccattggnnnnnnnnnnnnnnnnnnnnnnnnnnnnnnnnnnnnnnnnnnnnnnnnnnnnnnnnnnnnnnnnnnnnnnnnnnnnnnnnnnnnnnnnnnnnnnnnnnnnnnnnnnnnnnnnnnnnnnnnnnnnnnnnnnnnnnnnnnnnnnnnnnnnnnn

SEQ ID NO: 3725 - DNA, 889 bp, Glycine max
  misc_feature (3)..(3): n is a, c, g, or t
  misc_feature (5)..(5): n is a, c, g, or t
  misc_feature (26)..(26): n is a, c, g, or t
  misc_feature (31)..(31): n is a, c, g, or t
  misc_feature (36)..(36): n is a, c, g, or t
  misc_feature (40)..(40): n is a, c, g, or t
  misc_feature (42)..(42): n is a, c, g, or t
  misc_feature (44)..(46): n is a, c, g, or t
  misc_feature (49)..(49): n is a, c, g, or t
  misc_feature (51)..(51): n is a, c, g, or t
  misc_feature (53)..(53): n is a, c, g, or t
  misc_feature (60)..(60): n is a, c, g, or t
  misc_feature (70)..(71): n is a, c, g, or t
  misc_feature (76)..(76): n is a, c, g, or t
  misc_feature (88)..(89): n is a, c, g, or t
  misc_feature (91)..(92): n is a, c, g, or t
  misc_feature (99)..(99): n is a, c, g, or t
  misc_feature (105)..(105): n is a, c, g, or t
  misc_feature (107)..(109): n is a, c, g, or t
  misc_feature (111)..(112): n is a, c, g, or t
  misc_feature (116)..(116): n is a, c, g, or t
  misc_feature (118)..(118): n is a, c, g, or t
  misc_feature (121)..(121): n is a, c, g, or t
  misc_feature (123)..(123): n is a, c, g, or t
  misc_feature (126)..(129): n is a, c, g, or t
  misc_feature (132)..(134): n is a, c, g, or t
  misc_feature (143)..(143): n is a, c, g, or t
  misc_feature (152)..(152): n is a, c, g, or t
  misc_feature (154)..(154): n is a, c, g, or t
  misc_feature (156)..(156): n is a, c, g, or t
  misc_feature (165)..(165): n is a, c, g, or t
  misc_feature (168)..(168): n is a, c, g, or t
  misc_feature (170)..(171): n is a, c, g, or t
  misc_feature (173)..(175): n is a, c, g, or t
  misc_feature (177)..(177): n is a, c, g, or t
  misc_feature (181)..(181): n is a, c, g, or t
  misc_feature (184)..(184): n is a, c, g, or t
  misc_feature (186)..(186): n is a, c, g, or t
  misc_feature (191)..(191): n is a, c, g, or t
  misc_feature (199)..(199): n is a, c, g, or t
  misc_feature (202)..(203): n is a, c, g, or t
  misc_feature (207)..(207): n is a, c, g, or t
  misc_feature (211)..(211): n is a, c, g, or t
  misc_feature (219)..(219): n is a, c, g, or t
  misc_feature (222)..(222): n is a, c, g, or t
  misc_feature (225)..(225): n is a, c, g, or t
  misc_feature (232)..(232): n is a, c, g, or t
  misc_feature (234)..(234): n is a, c, g, or t
  misc_feature (240)..(240): n is a, c, g, or t
  misc_feature (243)..(243): n is a, c, g, or t
  misc_feature (254)..(254): n is a, c, g, or t
  misc_feature (263)..(263): n is a, c, g, or t
  misc_feature (267)..(267): n is a, c, g, or t
  misc_feature (287)..(287): n is a, c, g, or t
  misc_feature (291)..(291): n is a, c, g, or t
  misc_feature (294)..(294): n is a, c, g, or t
  misc_feature (297)..(297): n is a, c, g, or t
  misc_feature (304)..(304): n is a, c, g, or t
  misc_feature (310)..(310): n is a, c, g, or t
  misc_feature (315)..(315): n is a, c, g, or t
  misc_feature (336)..(337): n is a, c, g, or t
  misc_feature (347)..(347): n is a, c, g, or t
  misc_feature (352)..(352): n is a, c, g, or t
  misc_feature (356)..(357): n is a, c, g, or t
  misc_feature (362)..(363): n is a, c, g, or t
  misc_feature (370)..(370): n is a, c, g, or t
  misc_feature (376)..(376): n is a, c, g, or t
  misc_feature (378)..(379): n is a, c, g, or t
  misc_feature (388)..(388): n is a, c, g, or t
  misc_feature (391)..(391): n is a, c, g, or t
  misc_feature (397)..(397): n is a, c, g, or t
  misc_feature (410)..(410): n is a, c, g, or t
  misc_feature (414)..(414): n is a, c, g, or t
  misc_feature (416)..(416): n is a, c, g, or t
  misc_feature (425)..(425): n is a, c, g, or t
  misc_feature (427)..(427): n is a, c, g, or t
  misc_feature (431)..(431): n is a, c, g, or t
  misc_feature (469)..(469): n is a, c, g, or t
  misc_feature (485)..(485): n is a, c, g, or t
  misc_feature (488)..(488): n is a, c, g, or t
  misc_feature (506)..(506): n is a, c, g, or t
  misc_feature (520)..(520): n is a, c, g, or t
  misc_feature (543)..(543): n is a, c, g, or t
  misc_feature (758)..(758): n is a, c, g, or t
  misc_feature (881)..(881): n is a, c, g, or t
  Peptide Sequence Number=SeqID_7955
  Probeset Number=SeqID_13504
aancnataaaaatttgtatataaaanaacgngaggnagananannnaanananttatatnaaataaacgnnaacanaaagcacagatnngnnacaaganaaaatnannnanntacnanaanantannnnaannnagagcaagnataagcaancntnttatttatnatnannannntntaanaancngtacnagtaaaanagnncacnaagnaaggccancangtntaagttncnacagtnaangacaacgaccnttataaacnaaancacccaggccaaaggattcnccantcnganaacggcngaaaanatcanaaagatctttagaaagctacnnaagaaatacnggagntccnnctaannaacactnggcacntnngagacatcngancaaaantggcgagacacanggcngntccgtcgantngctnggcgacaatccaagcctcaggccacccgccagtcttcncaggctgtcctagacntgntggcaccgggattgccgnaattcctcggcggntccgccgatctcacgccatccancaacacacaattcaagaacgcggtcaccatcaccccggaggatttcaaagggaactatctgcactacggggtgcgtgagttcgggatgactgctgcattgaatggcatggcgctccacggtggattcgttccctacggcggaaccttcctcacgttctcagactacgctcggaacgccgtgcgcctggcttgcctcatgaacacgcacacgatcntggtgtatacgcacgattcgatcggcctcggcgaggacggtcctacccaccagccggttgagcacctcgcaagtttgcgcgccatgccgaatatgacgctttggcgggccctgtgaggcgtcntacaggcg

SEQ ID NO: 3726 - DNA, 1670 bp, Glycine max
  misc_feature (9)..(9): n is a, c, g, or t
  misc_feature (14)..(19): n is a, c, g, or t
  misc_feature (22)..(22): n is a, c, g, or t
  misc_feature (25)..(31): n is a, c, g, or t
  misc_feature (33)..(33): n is a, c, g, or t
  misc_feature (581)..(581): n is a, c, g, or t
  misc_feature (1163)..(1163): n is a, c, g, or t
  misc_feature (1405)..(1405): n is a, c, g, or t
  misc_feature (1431)..(1431): n is a, c, g, or t
  misc_feature (1490)..(1490): n is a, c, g, or t
  misc_feature (1591)..(1591): n is a, c, g, or t
  misc_feature (1611)..(1611): n is a, c, g, or t
  Peptide Sequence Number=SeqID_7956
  Probeset Number=SeqID_13505
cgactacgnggggnnnnnnggnggnnnnnnngncctccggacccctccccaccaacaaaactgaaataactggtgtctcctcactcgtaggtcagctcacgaatgagcatcaccccctccacatcaagattcttcttttgactgtatgatcctggccgacaccgtcgtcgcacacaccgctcgacccggcaccacccatagctcgcgctcgttgtcatcctgccggacccgcccaccctcgcctctcttctgcccagtgtcttgtcaaagacagagaacacgatccaacgatagatagtcctaccctctattattccatcgtcttatttctatctgtcatctcgctatgttctgtaaccggaacttgctgaatattctaattcacacaacatgaatctagtctaattcgaactcacattcaacaccacccggaataatctacctctcctccctcgtcaattatatgcccaccctgtgtataactgtaaacatagtagaagtctccgcgcgtcacatgtcacgcgcgtgcggtcttctagttcatctccgacgcagccttataatcaatgagtagtgtcagncgtactatacgcacactaacgtctactcctacacactctccacctgtcactcaccgcacaagtatctctcccaccaatttaagagattcacaaatatcaccgctgcttacagacaagaagtccgtagaatacagctatacagcggagactcaaactacaggagtatggtacgagaggaggtgcccggagattctaatagtatagtaatgttgtatctgtactaaacgactctaatatctgtcgccatgcgtctgcgcttaactatctacaacgtaactcacgacctattcccactgatgcgcgtagtaaattcacgaaaataacttagtgacagcgctcagacatgcttataaagcaataacatccgttcactcttttataaatatctacgaatcccacatcgattgcatcctcccgcacgtctatccatcacatcaaattactcacgtacaacatactagtaatcactgcgatcacatactgcagcacattaccgagctctaactaaaatgtcacccagattcaacaatgataataatatccgaccagggagtggcaatgctcgtcttcgtgcactctcgntcatgataagcgataacctatatgtaatctcctcaatagaggcaccgactgtgtcactcacgctacgcttacaacgcgccttatacaatgccgagagagcgacacgagcgccacacacgttgtgaacgccacacacccaatcacttcacttaaggtgaatgacacgagccgtgtcacgatctttacatggtaaatcgtgtccagagttgtatatatgtacgtcgctgctgcaaatcacctcntgagtggagaccgcactatcactccnacagatctcagctgaatgcgtacacagacgacgagcatgaaatagttaaagagaccgcntcacactagagcgtcgtctgtcagacatcctatgatcgatgacacaccacgtcagacgcacagcgtattcaaatgatactcggtacacgtctatcacactncaataagtctgatcgtatcntcattgaataacatcacgcatttgttcgtcagtcgtaacaaagaagcgcataacacttc

SEQ ID NO: 3727 - DNA, 1592 bp, Glycine max
  misc_feature (38)..(38): n is a, c, g, or t
  misc_feature (63)..(63): n is a, c, g, or t
  misc_feature (76)..(76): n is a, c, g, or t
  misc_feature (98)..(98): n is a, c, g, or t
  misc_feature (196)..(196): n is a, c, g, or t
  misc_feature (373)..(373): n is a, c, g, or t
  misc_feature (375)..(375): n is a, c, g, or t
  misc_feature (377)..(377): n is a, c, g, or t
  misc_feature (416)..(416): n is a, c, g, or t
  misc_feature (560)..(560): n is a, c, g, or t
  misc_feature (599)..(599): n is a, c, g, or t
  misc_feature (1139)..(1139): n is a, c, g, or t
  misc_feature (1147)..(1147): n is a, c, g, or t
  misc_feature (1404)..(1404): n is a, c, g, or t
  misc_feature (1448)..(1448): n is a, c, g, or t
  misc_feature (1454)..(1454): n is a, c, g, or t
  misc_feature (1456)..(1456): n is a, c, g, or t
  misc_feature (1459)..(1459): n is a, c, g, or t
  misc_feature (1488)..(1488): n is a, c, g, or t
  Probeset Number=SeqID_13506
cgatatatgatatgatagtcgtcgagagagtgtgttgntagtgtgtgtgtgatagacatgcgngataagaatagcngaggtatatgtcgtgtgtctgntgggacgtgtatagatcgtggagaggtgatgtctcgatatagagatatatctatgtgcagagtgttcgagagtatcgttgcgatctgtgatatgatanatgagttgtcgatatacggacagatgtaactcagagtatatgtgttgagagagaagatgctgtgtgcgcgagtgcacgagcggagccgtatcatatcagaatagattactcaatacttaagtgctgttacggtggtaggctcgtggccagtgtaattgttgtggagcacacatatantntncctatgcgtgcttgagcggtgtgagtgtacattagagantatgttgggtgagtggcgatatatcgataaggtgtgcagtttgttagtgtgacgtaccactaattacgttgtaagagtgtggagatgagcggtggtggatagcgcggcgacgattataatatatagtatcgtgagcattactancactctacggcgcgccagcacagtatcgaagcgtgactngagtatatattcgcagcgtggctctggggctgcgtctatgtgatctcgtgtgtttagatcgatgtagagatcggcggtgcgttataattatacatgtcgcgtggataatcgtgtgcggcatagatagaagacgttggcgtatagctgaagcgtaagatagtatgatagcataagcgggcgcgatatagatatataaagttcgcgatacgcacacgcgcggcgcgctcgccgtcatagagatacacgtgtcacttgtgtgtgcgtgtaaaataatgcgcgcgttctacatatacggagtcagttgctacaacgtaatccggtgccgcgtgcgggaggaggaagcagtacaaatatgtatgatagtgtgcatcacgatagcgcatgttacttcggtgcgaccttagcacgatgattggtgctatacaataacgagtaacatgatgaggagcgaggtgatggaggtcgcgtttacgtctggagttgtgtatacaagggaagtatagacatcgagaggaatggattgcgattgactatatgatnacgtgcangaatatatggacggagtacattcgcgaaaacacgtgttcgcgatgcggaagacgcctgctcgttgatgtgtgctgttcgatcgggtgcgggttctggtgtgtggcgaattcgtctcgcaatatatagtctcgcgatatggcctatcgcgtgatcgcgtggttcctgtctatttacataggcgaatacactcaatcaccaaacgagcggtaggaggtgcggtgagtcgcgtgagagacatgctgtacctcacgtaagngttgatagatgcgcgtttcagggtacaaagtccgagcggggganaaatananagntatatggcacctgatcgtgacaggtgcanagagaggattataactctgaacttatgagtcagaacgagagtgagagaagggtggggagataagacagcacagccaaacacccgaggggccacaaacaccccac

SEQ ID NO: 3728 - DNA, 1428 bp, Glycine max
  misc_feature (11)..(15): n is a, c, g, or t
  misc_feature (22)..(31): n is a, c, g, or t
  misc_feature (36)..(36): n is a, c, g, or t
  misc_feature (42)..(44): n is a, c, g, or t
  misc_feature (57)..(57): n is a, c, g, or t
  misc_feature (74)..(74): n is a, c, g, or t
  misc_feature (80)..(80): n is a, c, g, or t
  misc_feature (90)..(90): n is a, c, g, or t
  misc_feature (95)..(95): n is a, c, g, or t
  misc_feature (108)..(108): n is a, c, g, or t
  misc_feature (129)..(129): n is a, c, g, or t
  misc_feature (153)..(153): n is a, c, g, or t
  misc_feature (172)..(172): n is a, c, g, or t
  misc_feature (186)..(186): n is a, c, g, or t
  misc_feature (192)..(192): n is a, c, g, or t
  misc_feature (236)..(236): n is a, c, g, or t
  misc_feature (238)..(238): n is a, c, g, or t
  misc_feature (364)..(364): n is a, c, g, or t
  misc_feature (413)..(413): n is a, c, g, or t
  misc_feature (436)..(436): n is a, c, g, or t
  misc_feature (770)..(770): n is a, c, g, or t
  misc_feature (1253)..(1253): n is a, c, g, or t
  misc_feature (1428)..(1428): n is a, c, g, or t
  Peptide Sequence Number=SeqID_7957
  Probeset Number=SeqID_13507
ttttttttttnnnnnaaaaccnnnnnnnnnnaaacncttctnnncacccactcaccnccactactctctctacnaccaantcctatccanttaanaccaactctaccncactccccacacaccgcccancaatacaaaacaccatccctctcnacactgtacccaccccatntctacccatacccnacgccnggccgcgcaccactaccaactccctcaccccattaaaataaatnanaaacacatatagcattaatcactctgtgatggttgtatcacactgagttgagatgcgtagtgatatataagatttaatatatagatgtagtgtagaggtgtggtgtggtgtgtattgtgttctganggagtggttgtgtgtggtggtgagattgcatccgagcttgggtggttgngtggtggtcgtgtgttcgctctncgccgctcaacgcgagagtgagggcgcgtcggatagatctatatgaccctcttgtcacgacgctccgcggcgcttcccgcgcacaccccgcacgcctctcgcccaccgcctcggccgaccgcctgcgctcggcgcacctacgtcacagatgcactccgtgtcacgcactctccgtctcgcgaccgccgcgcgcccatagtatctagtgatctcatctgatcatgcatcatctaccgtgcgacacacaccacaacgcgcctgctcgcccctattgcgaccacccacaccctctggttgacgtcgcacgacgcaacgtgccacgcacatcacacgnaacatcttctgattgtgattcgcggtgcggtgtacattgtcccttactatataccgcatcgcctttccccttcattcatctcgtcttccttcatcatcactctctctgatgtttattatctgccatatagctatgcgactgcgtcaaggctccggctcatcccaatgtttcaaaggcgaggagtacgtgcggcgttcgcatctcgtgtcttctcaattcttacgtctctctatttactccacgctgctcacctaatgccctcattcgttgcgacaacaagaacgcctgacgaaccataccgtgcccgtccaccatcagttctttatcctcgtctcctacattgctgacgcttatgtatctgcatgctgtctctccttataaggtatccggagaagcgcaccacagtacgatggagaagtaatcactgtgaatgcgactcacgccatcgctataactacgcggctcgaccggcaccgcatcgcngctacacatgtccacacaaaccacgcggtctcgctccacgcgcccgctgacgatgccggcatgatcgctctcgctctacgcacagtacacccagcatcataatctatactagcgcgccgacccgccagcacactagcgtctgttatccaccacactctattacacagtaatactn

SEQ ID NO: 3729 - DNA, 1774 bp, Glycine max
  misc_feature (12)..(12): n is a, c, g, or t
  misc_feature (21)..(22): n is a, c, g, or t
  misc_feature (43)..(43): n is a, c, g, or t
  misc_feature (65)..(65): n is a, c, g, or t
  misc_feature (185)..(185): n is a, c, g, or t
  misc_feature (257)..(257): n is a, c, g, or t
  misc_feature (286)..(286): n is a, c, g, or t
  misc_feature (373)..(373): n is a, c, g, or t
  misc_feature (425)..(425): n is a, c, g, or t
  misc_feature (512)..(512): n is a, c, g, or t
  misc_feature (525)..(525): n is a, c, g, or t
  misc_feature (527)..(527): n is a, c, g, or t
  misc_feature (566)..(566): n is a, c, g, or t
  misc_feature (590)..(590): n is a, c, g, or t
  misc_feature (1274)..(1274): n is a, c, g, or t
  misc_feature (1367)..(1367): n is a, c, g, or t
  misc_feature (1435)..(1435): n is a, c, g, or t
  misc_feature (1536)..(1536): n is a, c, g, or t
  misc_feature (1577)..(1577): n is a, c, g, or t
  misc_feature (1589)..(1589): n is a, c, g, or t
  misc_feature (1608)..(1608): n is a, c, g, or t
  misc_feature (1644)..(1644): n is a, c, g, or t
  misc_feature (1670)..(1670): n is a, c, g, or t
  misc_feature (1723)..(1723): n is a, c, g, or t
  Probeset Number=SeqID_13508
cccccccctctntctcgcacnnccccgcgtccatactctctcnctgcgcgctgtcgatgtgcatntatgtcgagcgacatagtgtcgcgtactactcgcgatagagagacggacttgtacacgacaccatcgacgacgactgcagcggatcgccgcggcagagaggtcacaagcgcagttgacgncgtcgctccttacgctcaccgactactgcgtctatgctagcatcacgatacatgactatgcgactgtcacangatctgcagcacgtatgacatcacacccnccaccacaccatacgaccgacagtcaatccgatcgcggaacacacgtcgctcgctcccgagtgtgctccctcgagtcgtctatgtanagactagacgccgctcagcacagtggacaggagtatgtagtgccaatgtgangcaagagagaagcgactgtagttactggcgatgtgcgcggccgacgtcgtatcatccctgctggctacgcgtgaaggtctacgagantgagcctcgcccncnccccgtgctgactccacgcactcgttatgtataatgcanttgttacgcgctcaatcggacagntatctcgatcaatgctgtcacttcgtgtcacaccaacagaaagatgtaaagtgtatgcgcagcgcaatatgtagtgacagtaagttcttcatgctgacgcagggatgaatcatgtacgcaattaacaatcttgctcgcgttgttctggtgcgcgccgcggtcgcgcgtctataatataccaactagaggctatagaacgaggatagatacgggacccgcgtcgctatcgatattgtcggcgcgtagaggttagtatgacgacatagtattgactatcgattcatcatgtccagacacagctcgaacgtagatgaatctaatgagacagatgtatgagacacaaacgaggaagtgcgacaaagtaaactagcttggatatgcactatgacgtgattagcgacgagtctgacatactacttaccactctcttacgatgttcacgcgtatcggcgaagcgatggcacacgagcaccgacgagtcgctgaaccataatcttatatcctcgctgacatcgccactcacatacttatagtagcaatatctacgcacgactgctacctcgtcaacatccgcgctatctcacgcgacgtgtgtctacatactggctcatatagataaagatcatattacaaattatatataactgatcgatgtgtatatatgtagcagatgtatctagtctnacccctcgtcactcgcgctcgcaccttcatgcttaccacttcattgtacgacgatgcagcaggtcgagctcgcgcatcgctcgctgcgcgacncgccgcacttcagtatagctcgtgatgacacgtgatatccgttctctgtccgtctccgcctcattgcnatcgatcatctctctgatgatagtgcagtgcgatcagtcctgatcagtgatgccatgtacacgcgagagggatggagagcgcggcatgcacgcccacacgncagttcacatcgcatgacagtactacgcgctgatatacaangtaatccgtacntatacacatccgacatatnaaatgaaacatctcgaaagagaatgagacgcgatgntggtagatgatggggcgagtgagaanagacacgtgcgagtctctcatctatcacacagtgacatactcaatcgacgtangagtgtgctatcgggactatgtactgcaccagtcacgctctcgtcgtggtg

SEQ ID NO: 3730 - DNA, 836 bp, Glycine max
  Peptide Sequence Number=SeqID_7958
  Probeset Number=SeqID_13509
aatttctgtaagatcatcaaaagttgatacaccaagctgatttataaacctctacacactcaatttctagcatacaaaaataaaagaaatgggaacagagatggtaatgattcacgaggttccttttcctccacagatcatcacttccaagcccttctctcttcttggccaaggcatcactgacatcgagatccatttccttcaagtgaagttcacggccataggagtttacttagatccttcagatgttaaaacccatcttgacaaatggaaaggcaagaccggaaaggatcttgccggtgatgacgacttcttcgacgccctggcctccggggagattgaaaaggttataagagtggtggtgataaaggaaataaaaggagctcagtacggtgtgcagctagagaattcggtgagagatcgtttggctgctgaggataagtacgaggaagaagaagaaaacgagctcgagaaagttgtaggattttttcagtctaagtacttcaagactcattccatcatcacttaccgtttctcagccaaagatggtatctgcgagattggatttgaaacggaaggtaaagaagaggacaaattgaaagtagagaatgcgaatgtggtagggatgatgcagaaatggtacttgtctggaagtcgaggagtttcaccgtccaccatcgtctccctcgccgattctctgtccgcagttttaacctaaaactccttatataagcctatatcatctatgtgtgtgttttatgttgttgtattatgtcgttcttaagtgagacatcgtgtttggttatctttataaaatgttgaatggttgtctttat

SEQ ID NO: 3731 - DNA, 606 bp, Glycine max
  misc_feature (43)..(52): n is a, c, g, or t
  Peptide Sequence Number=SeqID_7959
  Probeset Number=SeqID_13510
tttactaccttaagaccttaactgatttttttccccaaaaaannnnnnnnnnaaaaaaaaaaaaaaaaaaaaaaaaaaaaaaaaaaaaaaaaaaaaaaaaaaaaaaaaaagaaaaaaaaaaaaaaaaaaaatttccggggcccgggggaatccaaaattttaaggaaagggggaaaaaagccccgaaaaaaaaaaaaggtttgccattgggagccaaaaaaaggggttcatcaggagtaataaatttactttccccaaaggggaattcaaaaaaaagccccgccaaacaaaaaaaaaaatttttttgccccgaagggaaaaaattttgcctgggaaaaaaagggggaaagtcttcaagcctttttaccccaaggtgggaaagggcggggaactttatcggtggaaaacctggttaccatttcctggatggaagatttggaacaacctgaccaatggcccaatgaaaaatgttttgaacaaaaccccctccaggggttggtttgcccggtaatcccggaaaagggctttgcgggaccgccccaccttaaggattttccgccaccggttgaaaaaaaatcaattggccccgccattttttccaaaaca

SEQ ID NO: 3732 - DNA, 1423 bp, Glycine max
  misc_feature (12)..(12): n is a, c, g, or t
  misc_feature (14)..(14): n is a, c, g, or t
  misc_feature (16)..(17): n is a, c, g, or t
  misc_feature (23)..(23): n is a, c, g, or t
  misc_feature (31)..(32): n is a, c, g, or t
  misc_feature (34)..(36): n is a, c, g, or t
  misc_feature (38)..(39): n is a, c, g, or t
  misc_feature (46)..(46): n is a, c, g, or t
  misc_feature (108)..(108): n is a, c, g, or t
  misc_feature (113)..(114): n is a, c, g, or t
  misc_feature (179)..(179): n is a, c, g, or t
  misc_feature (204)..(204): n is a, c, g, or t
  misc_feature (223)..(223): n is a, c, g, or t
  misc_feature (227)..(227): n is a, c, g, or t
  misc_feature (282)..(282): n is a, c, g, or t
  misc_feature (334)..(334): n is a, c, g, or t
  misc_feature (549)..(549): n is a, c, g, or t
  misc_feature (631)..(631): n is a, c, g, or t
  misc_feature (1219)..(1219): n is a, c, g, or t
  misc_feature (1330)..(1330): n is a, c, g, or t
  misc_feature (1335)..(1335): n is a, c, g, or t
  misc_feature (1353)..(1353): n is a, c, g, or t
  misc_feature (1373)..(1373): n is a, c, g, or t
  Peptide Sequence Number=SeqID_7960
  Probeset Number=SeqID_13511
atagggggtgtngngnngggggntggtgggnntnnnannaaggttnatatcgaagagagcgcgcggagcaggagttagaagggatagtagagcgtaggtggtgaggtnatgtnngaggctgggccccccccacacactgctgaaggtacgcagtctctatctaccgtgggatgcgtagngctatctctctcttgtatcgagttntgtatagcggatttatcanctcnactgctccaatagtgtctacggtagaacatcatatataaataaggtaggtagaanatagctcaccacgtctgagcagacatgtgagtatgactgtgttgtgagatcncggccgtatgctatagacatacgtgaacgaccagatagacgagaagagaacagaaagagaagatgcagaataatatgtaatgaggcacatacacattcctgactgaccgtcggagcggagagcggagcggcgtgacgaagagccgacgaacgcgacggcactccgcaagaatagttttggaagtcagctgtgtcgtgtggtgtgtctggcgaagntaagtggcatcctgcgcgccactcactacgacagtcgtgcgtctgccctcacgttgcgtcgacggctgtgccggccgagacntgcgccgcgacgtggtgattgctcgtgtcgtctcccatctcatactatgacagcgctgtcaacgcacttacctcctaccattctgcactcactctctcactattgtttattaactatactactcacgaactttgcatacatatcttacacgtactatgttgtgcgcagtgtatatgttcaatcataattggtgtatagatagtgtaatggggtgaaggatgcgagaccagagatgatgatatacaaaccggtcgatgtcagcgttcaataacgatgatacatgcaacgctacgatcgccatggtggttgtgtgataccatactaacactcacgcactgggatcacactacagcggctcctatgacagcaatcgaacaagagagcacacgatacgagatcgtgcgtcgccgctcgcgtgctgagctgtgtgtcccacaccactccacactctcctgcacgacatggtgcggggattagtcgtcggccgcccgcaccgtgagcgtcgaactcttggctgtagaccgagacaagatactacataacgactacagtaagatcgatcagagagggaccggagcacgtccggangtgcgcggtgtggtagatacgagatggtgacgcagctgacggcgagactcgtcgctgcatatcatactcggacagtatatgttggtgtgtgcagggaatactcgatgtaangtgtnagaacgagtggaaggcgncggcggtagacgggaacaantgtatagattcctaggtatacactactcgtcgattaatatctctcttgcg

SEQ ID NO: 3733 - DNA, 1334 bp, Glycine max
  misc_feature (18)..(19): n is a, c, g, or t
  misc_feature (23)..(33): n is a, c, g, or t
  misc_feature (45)..(45): n is a, c, g, or t
  misc_feature (153)..(153): n is a, c, g, or t
  misc_feature (370)..(370): n is a, c, g, or t
  misc_feature (503)..(503): n is a, c, g, or t
  misc_feature (544)..(544): n is a, c, g, or t
  misc_feature (625)..(625): n is a, c, g, or t
  misc_feature (1186)..(1186): n is a, c, g, or t
  misc_feature (1334)..(1334): n is a, c, g, or t
  Peptide Sequence Number=SeqID_7961
  Probeset Number=SeqID_13512
accaaaaaaaatataaanncccnnnnnnnnnnnttctgtgtcttntagtgatctcgcgagcaggccgcgtgggaatcgcagagtctactcgcggtggtctgacttaaggcttcttcttctctcttctcttctttcttcctcctctgctcgcgngcctcttttcctctctaaaacttctgtaacatatacgcttgttctgctgtattactcattctacctaatactgctcttgatgcattattgcttctcgtggtctgctataaaaaataaactaagtagtcatcatacaatgttaccaggctatggtagtctgataggaatgtgtgggcatgttctatataacttctcgacaccgaggatttgaagaganatgtataaatcaacaacagcaacaagaggaggagagcgtgagcaacgagcgacgagcacacgagagtatatctacatctcttcattcgcttctactctcctctatgtaactctccgattatcgataatgagantagtaatatacataaagatgacggtggctatcattatacanatttatcagtacgcgtgggcgtcgagtgcgacgaggatggtgtacttagagtaaagagtcacgcggcgcctgcgctcgcgntgggagcgtgtagacgtgcagcgcgtgacacgtggacctcacacgcggtataccacactcagcctcagagccagtatggcaaaacaaggtgggtgggtgcaactagaatgtaagaatgtggagtgaggggcttatgtgatctcgaggtctgtacgtgtggtatggactcacgaggagcgagatgctgatcgagtggatccaggcgctgtcatttctggtacttcatctcttgaacttagtcgtgctatggttagacgttggatgaggtcggcatgtgtcgcagggcgtgagtgtccatataggcgtgccggtgttgttgagtgtgttgttggttatagtgaggatagtggtgggtgttgtgtgtaacttgtcccccgtcgacggcgcacctgcctctctctcattctctgtgatggtttctgatcgatcattgcacgatgtaggcgactttgcgccgcgggtgtgtctttcgtggtttctgttgcgtgggtgacagccctcacatccctggtccgtttctatatctgacggtgagcctgtgtctgcacatcacaggctcgngccagtgtcccggcgccctctgtacatcgcgccagagcctactagcgagggccggctttggtgtgcgacgcgatctcagtcttatgcatctgttgttgttggtgtgtgttgggtatgtgcgctgatctgtctggttatgcagatgttn

SEQ ID NO: 3734 - DNA, 1680 bp, Glycine max
  misc_feature (36)..(36): n is a, c, g, or t
  misc_feature (49)..(49): n is a, c, g, or t
  misc_feature (51)..(52): n is a, c, g, or t
  misc_feature (58)..(63): n is a, c, g, or t
  misc_feature (69)..(69): n is a, c, g, or t
  misc_feature (71)..(71): n is a, c, g, or t
  misc_feature (73)..(74): n is a, c, g, or t
  misc_feature (76)..(76): n is a, c, g, or t
  misc_feature (78)..(78): n is a, c, g, or t
  misc_feature (83)..(86): n is a, c, g, or t
  misc_feature (88)..(89): n is a, c, g, or t
  misc_feature (93)..(94): n is a, c, g, or t
  misc_feature (96)..(101): n is a, c, g, or t
  misc_feature (106)..(107): n is a, c, g, or t
  misc_feature (110)..(110): n is a, c, g, or t
  misc_feature (114)..(114): n is a, c, g, or t
  misc_feature (116)..(116): n is a, c, g, or t
  misc_feature (120)..(120): n is a, c, g, or t
  misc_feature (124)..(126): n is a, c, g, or t
  misc_feature (129)..(129): n is a, c, g, or t
  misc_feature (176)..(176): n is a, c, g, or t
  misc_feature (182)..(182): n is a, c, g, or t
  misc_feature (208)..(208): n is a, c, g, or t
  misc_feature (238)..(238): n is a, c, g, or t
  misc_feature (240)..(240): n is a, c, g, or t
  misc_feature (381)..(381): n is a, c, g, or t
  misc_feature (412)..(413): n is a, c, g, or t
  misc_feature (537)..(537): n is a, c, g, or t
  misc_feature (544)..(544): n is a, c, g, or t
  misc_feature (582)..(582): n is a, c, g, or t
  misc_feature (611)..(611): n is a, c, g, or t
  misc_feature (616)..(616): n is a, c, g, or t
  misc_feature (796)..(796): n is a, c, g, or t
  misc_feature (850)..(850): n is a, c, g, or t
  misc_feature (889)..(889): n is a, c, g, or t
  misc_feature (964)..(964): n is a, c, g, or t
  misc_feature (1046)..(1046): n is a, c, g, or t
  misc_feature (1093)..(1093): n is a, c, g, or t
  misc_feature (1104)..(1104): n is a, c, g, or t
  misc_feature (1242)..(1242): n is a, c, g, or t
  misc_feature (1255)..(1255): n is a, c, g, or t
  misc_feature (1412)..(1412): n is a, c, g, or t
  misc_feature (1415)..(1415): n is a, c, g, or t
  misc_feature (1498)..(1498): n is a, c, g, or t
  misc_feature (1617)..(1617): n is a, c, g, or t
  misc_feature (1619)..(1619): n is a, c, g, or t
  Probeset Number=SeqID_13513
ggtgtgttgtgtgtgttttgttgtgtggtggtgttnttgtgggtgtggngnntatgtnnnnnnggctanananncngnctctnnnntnnattnntnnnnnnaccgnnaanaggnanaccnaccnnnaanaaacatgtggtcgtagaaggttgatattgtgccgggatacattgttncgatgnataagctacttgttgtgagacgcaancatcgatcatgtactagcaatcgggagaangntgtgtaatatgatgacgctgtgtgatgagatgcactatggatgttagacgagccgtctgcgtcttcaatctccagcggatagacacgcgctcagacgtcgcgctcacaggagccaccttcttacgatctcgcaccaacacntgagctcttctctgctacctctctactctcnntgtctgtcgcgcgtgtagtgatgggttgcgtctgtctggggtgtcggttcgttggtcgtgtgttcgtgtcgggtctcgtctctgcttcgctctccatgcgcacacacactactgagacgcaccncaaggcnactgggcacagacagcacctccgacgactagcagaaangcaacacaacagcaacacaaggaacgaanaaganaaataagagaagaacgacacaataagacgcgacgagacgtgctcgcatcgattcgcagtcgcgcaaccacgcacatatcgaaccccgcgtcgaccgcctcgcgtcgcgctctcgcacagactcgtggcgtcgccacgtgtcgccacgttcctgctacctatatacagtctgtgacgattntagtgagtgcgagtgaccacggtgcggtcatgatgagcggttgcagatatgctngcttacgatgtctgtagcacgctactatgatccagtctntatctgcgatcgctctcacgacacgcttgctacgatgtcgcttcagactctgaggtgctgccgctgcgcgtgcgnacgcatcgttctgcgcacatcgagatcctgatgagtgagaccggacgcgcggttatcactatcgccgactgcctcgttcatngactatcacaatgtcatgatccatcactagcgcgctcgacccatcancctaacgtgcnagcgacagaaggcgacaatcgcaacatggtggcgccgcttacgaagacctcgagcgtgcgaccaaccgatgacttctgcacgacggccggaacatccgtcaaccgtctcctcgtcgcagactgcgcacgtgcggagantcgtgcctacgantcgcggctatagcgtgatgcggcaggtctttcgaggtggcagcgcgctgacagcgtcgacaggtgcgcgagctagacggctcgaccagatgagactaagcgccgattgcacctctgctgtgtaatgtcttcttagcctgtgtacactctcacacacngangcgtgtgactatacatgagtgatgctatatattgatctcagtgtagtagtgctctatacagatatatgcgctgtgagactgancactcaactgaacgcgcgacgggtgagcgcctgccgcgtgtctctagctacagtgagctgtcatgcgtctcgagtgtgtgcgtctgtgtcacgcgacgctagtcgtaccgcgcgaaaangntcatcgatatactggctcaagaacgacacgtaaactcgtgttcgaggacgaggccacaatg

SEQ ID NO: 3735 - DNA, 1478 bp, Glycine max
  misc_feature (1)..(32): n is a, c, g, or t
  misc_feature (1478)..(1478): n is a, c, g, or t
  Peptide Sequence Number=SeqID_7962
  Probeset Number=SeqID_13514
nnnnnnnnnnnnnnnnnnnnnnnnnnnnnnnngaaaaagcattccataggaatacacgttaaattatatacacagctctttaaatttccaaacttcaaagcagcttcgtagatcctcaatcatgtcttctatataagtacaaaccttcacccatctcacatatcacaacactgtcacaaaggaaaagtacttttttttttaaaaaaattatcttatttgagtgtgatcgatggcatacccaaacccttatccggcgcaaccgtatccctccacctccgtgccgatgccggcggtgcccaccgccgtgatcggcccccagttctgtgcgccctacccgctggatctggcggtggtgaagaaggtgatgacgctctccgacggtaactttgtggtcaccgacgtcaacggcaacgtcgtcttcaaagttaagggatcgctcatgaccctccgtgaccgccgcatcctcgtcgacgccgccggcaaccccctcgtcaccctacgccggaagataatgaccgcgcatgatcgatggcaagctttcaggggtgaaagcacagaggccaaagatctaatctttactctgaagcgttcgtcccttatccagtttaagaccaaattagatgtgtttttggccaataacacaaaagaagatgtttgtgactttaaggtcaaaggtagttggttggaacgatcttgcgttgtttatgctggtgaatctaacaacatcgtagcccagatgcataaaaagcacacggttcagagtattttgattgggaaagaccaattcatggtcacagtgtatcccaacattgattatgcgttcgttgtggcactaattgttattcttgacgagattaacgaagatgagaaagaagattagagaaatgctacacattcagcaaatcgtgttgtactttttatcgacggtggcatatttccactgaagctattgtgtttgtttaggtgtttcgtctttctaatttatgagtaaataaaaatatttaaattcgagctgcattcaaaaacaaaaaaaaaaaaaaaaaaacgatctcctctgtttaaataaccaaaacaatctctctctctcttttttccttcttttaccaaaaataaaatcggttttaatcaactaactttcagtatttattcaaacaatttaattagaatgtacctttacaatgccatttgaatcttaaattattaagtaaggttgctaacttttattattaattaaactcaatatattttgtgggaatgaatattgcagatgcataaaaagcacacggttcaaaatattttgattgggaaagaccatttcatggtcacggtttatcccaacattgattatgcgttcatagtggcgctaatcgtgattcttgacgagattaacgacgatgagaaggaagattagaggaaagctatacattcagcgaatctttttgtttgtttaagtgtttcgtctttctatttatgagtgn

SEQ ID NO: 3736 - DNA, 1356 bp, Glycine max
  misc_feature (38)..(38): n is a, c, g, or t
  misc_feature (84)..(84): n is a, c, g, or t
  misc_feature (361)..(361): n is a, c, g, or t
  misc_feature (834)..(834): n is a, c, g, or t
  misc_feature (926)..(926): n is a, c, g, or t
  misc_feature (1090)..(1090): n is a, c, g, or t
  misc_feature (1098)..(1098): n is a, c, g, or t
  misc_feature (1176)..(1176): n is a, c, g, or t
  misc_feature (1232)..(1232): n is a, c, g, or t
  Peptide Sequence Number=SeqID_7963
  Probeset Number=SeqID_13515
gagagcacgcagccgcagagcaaagtgctaatcggcantgacgaataggaactacaatgtaaggtacatatcgagataagcganagcgcgacacgcaccacataattaataattcagtgtggtagagactcccacctccacgctcttatacataagaggcgagtgcgtatagtgagatatgaacagacactgtcacatacgcacagcacagccgccgcgcgctaacgaactgcacgagcacggcgtgtgactgcgggacggacgtgccgacatcggccaccaccatcactatgcgatacgtcacttttactgtaggctgatatgatttctcttggtcccactaagggcgaggtgtctctcncacattcatatgcaatccttgcaaagacgtaatcggtggtgctgcgcggttgtgttcggtataccacggcgcgcaggttgcgaggactgttatgtgcacggcgcggcagatgagcgcgctttcgcatgaatgtgtcgaccaagcgcgagagaggcactggttggtgttaaagaagagagagttgagtgaggaatgcgggcccggacgcgagcgagaatagtattagatggcggcgttgtctcacgtgagattatacagtaattgttatatatgaggggtgtcgcgacgggcgggctggcgccgatgagacagagcgtgaggttgcgtcgctagccgtataggtcagcattggccatagctatgaggtgtgggcgtgagcagacagtgcgtggatggacgactataaacaggatggtgactcacagtacgtatctgctagacgcagggcgatttagtccgagacaagtgttacntacatatctgtgctgagccacgcctacatgagcgatattgtggaacatcgtctagtcgcgcgtacgaatgcgtgagagagacgcgtgtaganaggccatgcgaatcgtatagaggaggtcgatgaacatctcgtccttcatgcgcttagacgcgagtactcggcgtctcactgcaggagcgcgagacgcgtcacgcgcatggtacatagcgcaatatgacaccgatactgcgcttagcctcattgctatagagctnctagtttntatacgcatggagatgacatcagatgctctgtcgtgtctcgaagatgtcgtcgggcgcataggcagatgctccgacantagcatctgacttccgtatggcgatatgatctgacagccgcgagacaccagcatcnccagcatcgacgactcactgctgaagctgactgcacagtcgctatgatcgtggtgcgaactcgctcgcgcagcgcagtagtgcgacactgcgttgactgacggcgcatactcagatatcatcag

SEQ ID NO: 3737 - DNA, 351 bp, Glycine max
  Probeset Number=SeqID_13516
gctggtaaaactttggagggttcttaaattcagccagccttgcagacatttgcctatcatcagcgcattacaccttaatcatggtttgccacttcctaaattaagatagagctaaaaagcatcctcgtttatgttgacaatatgggtgaataccaacagcctattttttatgtagcttctcacagcttatagagtgcttagactgccccatttttggagaaattggttctcaaagatattgaggcatgattatttattaacagttctggataatttgagcatgatagccagggaatttggtcagtgtgaggtgacagccaccagtctgggtttatccccagtctgcctggc

SEQ ID NO: 3738 - DNA, 1391 bp, Glycine max
  misc_feature (1)..(1): n is a, c, g, or t
  misc_feature (209)..(209): n is a, c, g, or t
  misc_feature (347)..(347): n is a, c, g, or t
  misc_feature (437)..(437): n is a, c, g, or t
  misc_feature (566)..(566): n is a, c, g, or t
  misc_feature (1075)..(1075): n is a, c, g, or t
  misc_feature (1117)..(1117): n is a, c, g, or t
  misc_feature (1172)..(1172): n is a, c, g, or t
  misc_feature (1183)..(1183): n is a, c, g, or t
  misc_feature (1189)..(1189): n is a, c, g, or t
  misc_feature (1304)..(1305): n is a, c, g, or t
  misc_feature (1307)..(1308): n is a, c, g, or t
  misc_feature (1311)..(1313): n is a, c, g, or t
  misc_feature (1330)..(1331): n is a, c, g, or t
  misc_feature (1336)..(1337): n is a, c, g, or t
  misc_feature (1359)..(1359): n is a, c, g, or t
  misc_feature (1361)..(1361): n is a, c, g, or t
  misc_feature (1363)..(1365): n is a, c, g, or t
  misc_feature (1367)..(1368): n is a, c, g, or t
  misc_feature (1370)..(1371): n is a, c, g, or t
  misc_feature (1373)..(1373): n is a, c, g, or t
  Peptide Sequence Number=SeqID_7964
  Probeset Number=SeqID_13517
ngagagagcgagagagagaagtagagggaagtgaggatagaaagagaatatacacatagatagtgagaggagtagagaatatatgtaatactagaggacatactcacatgagaccatgcgaggccgagatatacttatctcttataagaggtgggtcgttggatagtgtaagagagataagagtagtaggcgcgctgtgtcgccagagncgcgcgacatgtactcgtcagcggcatgatcagtggcgtttgtagtcgtgatacatgtaggcggactgcccacacggtagtgggatgagttgtcgctattcagttagactgtatatgtgcgcggtatatgcgagcagnatcaattcatcagagacggtgaagggtggtaggggtgggggcaaacacaacacgagaggaggatctctgtgacattgcgctctggcagcngagtgtggaggaagtcagatctcacgggacgagttgaggagacaaggcacacgcacacgcctctagatcgtcttagtcggtagtccgcgatgatatataatgaacaagtagacaacgacgaagcagtgnctttgcacccggatagagccgaaacagtgtaatacactactaatcctcgcgcttactttgttgagcgccttcacttagcgtggtgtctctgcatggcacaactggtacgtattccggacacccaattcgttatctcatatgccctgcaacgtggcatgaggcttccaatatagctgtagataacataaggatgaggcaaacaacaagaagaaaacacgagacaggaatagcaacagaacgcctaggagggagcaattctacctgctactactctcacatctactcgtccgtgggttgtgttggattggcttctgtgttattgatgatctttaacttttttctctcctctctgttcatcagttctctatttctcacataaattatagttatgacagaagctttaaatcacacaatataagatagcggagagaatagtggcgagagacagacgcagacaacaccacagtcagcatggtgctacgtgcgattggtatagagcctagcaatcnacgtgtgtttgtatgactgcgcgagggctttctatctccttnatataattggttgtgtaggaggaggtatgtgagatcggctaatgtatgataacancagatgagagnatatanaaccacgaataataccgtcatgtgtgagttagtgcattatgcgagaggacatcctcgcgtaccatccaggattaactctattattccagagtagacgatgaggtgtgttatctanntnnttnnngggaggcggagggaggnnagtannaggggagggagaaggaggaagnanannnannannangggagagccaaaacacaa

SEQ ID NO: 3739 - DNA, 1584 bp, Glycine max
  Probeset Number=SeqID_13518
aaaaaaataactttatttcaaataaagacacatcataatgagtagatcaaccattattttctgctttttgctcgctttcgctactttgggttctgccttctatgatcatggctccaaagtcgtcaaacttactgctgccactttcagagaaaaggtcgtgaatagtaacgaactctggtttgttgaattctatgctccctggtgtggtcactgtcaaagacttacccctgaatgggaaaagcttgctggtgccttgaagggtatgatcaacgtcggtgctgttgatatgaccaccgatcaagaagctggtgctgcctatggtatcagaggcttccctaccatcaaattcttcggttccaacaagaacgcccctgaagattatcaaggagatagaagtgctcgtgatatggtcaacttcgcctttgatcaagccaagaaagctgccaactctagacttagcggtggaagctctggtggatataaccaacaaaaccaaggtggaaaccaaggtggtagttgtggaggaggcaaccaaggtggattcggccaacaacaacaaggaggtggtagctgcggaggaggccaaaatcaaggaggtcaccaaggtggaaacgcaggtggaaataatggtggaggagatcaagatgtggttgtcttgactgacgctaacttcgatgatttggtcatgaatagtgaagatctttggatcatcgaattctatgctccctggtgcggacattgcaagaatcttgagcctgaatggaacagagccgctactgaacttaagggagaagtcaaggtcggaaaactcgatgctactagagaacatactatcgctggaagatataatgtcaatgcttatccccaaatcaaattgttcccaagcggccccaagagtgataatttaattgaagactacagtggagctcgtgattccycttctatygbcsamttttggtmargccaaaaaaatccawtwtaasccagttmaaaaagttgaacaacttgtcaaccaacaagtctttgataaattatgcaccaaccttagaggaatctgstwcattgctttccttcctcatakmtatgattcttctgccgaagaaagaaataactacattgaagtcttacaagaattggcaaaatcaaacagagctaatccagttacattcctctgggctcaaggaggtgattactatcctattgaagaatccttgggactcgcatccggttatccttctcttgttgctatcagcgtcaataaaatgaaatacgcccacttgactggttcattcagcaagaagaatgttgattctttcgtcaagtccttgattgctggcaaacaaggcttgttcgatttgagacaagctcccaaagtaaataccgttaatgcttgggatggaaaaaacagcaagcctcaatatgaaacctctgatctttaaagcttgaacttttttataaacaaagataatgcaaagatttttgtcacaagttgatgggtgtattccataaaaattataaagttatataatgaaatttattttatttgacctattcatcttatgaactttcaatctaagtcccccc

SEQ ID NO: 3740 - DNA, 1743 bp, Glycine max
  misc_feature (62)..(62): n is a, c, g, or t
  misc_feature (64)..(64): n is a, c, g, or t
  misc_feature (75)..(75): n is a, c, g, or t
  misc_feature (95)..(95): n is a, c, g, or t
  misc_feature (126)..(126): n is a, c, g, or t
  misc_feature (138)..(138): n is a, c, g, or t
  misc_feature (188)..(188): n is a, c, g, or t
  misc_feature (191)..(191): n is a, c, g, or t
  misc_feature (194)..(194): n is a, c, g, or t
  misc_feature (209)..(209): n is a, c, g, or t
  misc_feature (221)..(221): n is a, c, g, or t
  misc_feature (245)..(245): n is a, c, g, or t
  misc_feature (266)..(268): n is a, c, g, or t
  misc_feature (270)..(270): n is a, c, g, or t
  misc_feature (317)..(317): n is a, c, g, or t
  misc_feature (327)..(327): n is a, c, g, or t
  misc_feature (342)..(342): n is a, c, g, or t
  misc_feature (349)..(349): n is a, c, g, or t
  misc_feature (392)..(392): n is a, c, g, or t
  misc_feature (403)..(403): n is a, c, g, or t
  misc_feature (413)..(413): n is a, c, g, or t
  misc_feature (429)..(429): n is a, c, g, or t
  misc_feature (452)..(452): n is a, c, g, or t
  misc_feature (468)..(468): n is a, c, g, or t
  misc_feature (526)..(526): n is a, c, g, or t
  misc_feature (536)..(536): n is a, c, g, or t
  misc_feature (569)..(569): n is a, c, g, or t
  misc_feature (595)..(595): n is a, c, g, or t
  misc_feature (642)..(642): n is a, c, g, or t
  misc_feature (644)..(644): n is a, c, g, or t
  misc_feature (717)..(719): n is a, c, g, or t
  misc_feature (721)..(721): n is a, c, g, or t
  misc_feature (780)..(780): n is a, c, g, or t
  misc_feature (805)..(805): n is a, c, g, or t
  misc_feature (808)..(809): n is a, c, g, or t
  misc_feature (883)..(883): n is a, c, g, or t
  misc_feature (916)..(916): n is a, c, g, or t
  misc_feature (920)..(920): n is a, c, g, or t
  misc_feature (1003)..(1003): n is a, c, g, or t
  misc_feature (1036)..(1036): n is a, c, g, or t
  misc_feature (1075)..(1075): n is a, c, g, or t
  misc_feature (1145)..(1145): n is a, c, g, or t
  misc_feature (1201)..(1201): n is a, c, g, or t
  misc_feature (1205)..(1205): n is a, c, g, or t
  misc_feature (1262)..(1262): n is a, c, g, or t
  misc_feature (1269)..(1269): n is a, c, g, or t
  misc_feature (1272)..(1272): n is a, c, g, or t
  misc_feature (1425)..(1425): n is a, c, g, or t
  misc_feature (1560)..(1560): n is a, c, g, or t
  Peptide Sequence Number=SeqID_7965
  Probeset Number=SeqID_13519
ctactacagcgtcagcagagccgtgatgagataatatagtactgtagatggggagtagtagntntatgtaggacntcgctatactatagatatgngcgatgatagtgtatcacgtataagtgtgtnactgcagtgcantggtgcgtggcagcagggagcacagtagtacgagatcgattactgttaanatntgngactacaatgatagntcggtcgtactncatgatgtctgcatatgagatcanttagaattcagcacatacagnnngnggcggaacagtatacgatagatacggcgcttcgtatcgcataagtanactaactgtntctgatatcgtgtgntgcatgntcctaatctgagttctgtgtgacgatcgtatcgctcgtcgtcngcgatcaggangcgagtcgtncacagtgctagtgcangtagcgcgtatgtgagtcgagangcgtgtagtcggcagnacgcactacgtacactcagtgcggatgagagatcggactcgcgtcgcgaccatcgtcnatctacacangggcgctgacgtggtttgctgacctggttttgnacatatactatgcacagtattgtagngacgtagtggtccagagagatctgtagcatatgatgctcatagcgangngcaagcgatgcgtgcgactctaggtgatagtactcgtgagtagagggaggagtgggtatcgtacctcgctgtnnncntcctagtagtatactattagaaggagtggagagtctagtcataagctgatgcgcgtatnttgtgctatttgtaagatagataanagnngggcgcgaccacgctggatatagtgacgcatatgccgactgctactcgctagctacacatgcgcgacacaactnagctcatcatacatatacacctcgtatagtaangaantacgcacgtcgatcgtgtctgtactatcagtctcgagctatgcaaatagtagcctgtagatttgtatcatgcgtgtcagtgtngagagagacccgagatagatagatggtggtagnagcgtgagtcactaatgcggagatggtctgtgccagtgngtgtgcgtctacgatcatgtaagggtgcagtacgcaagcaatacagagtatagagatgtatagcgtagantcgtaagagtcgtgcatcggtcatctatgacgtcaggctgtataattagagtcacngcancacatgtattccatcatgaaatgtatactctaaatatgctcgtcataatcacaatcnagacggnagnagatgtctcacatagctactcgtcattgcgcagtctcagtgacgcgttggttggtgcgtgtgcgtgagagtatgtgtgttatgaagtaagcagttgcgatggatgtatgagatatgtgagagaatagctgcgtgttgagatgatagacggatnacgatcatagagaggttagtgagtatggatgtcactcgtgcttcactgcttactcataagatacacggtgacatccaattgtatgcgtagtagagtggtagagacgagatgggaagataaataagaagtagaganaatagcgatagcatggacccacgttggtgtgataatctatccaagttgtctattgacggctggtcgcgtcgcagacgggacgcccgggacgccgcagacgagttagtgctgacgcgagggagcgggtgtctattgatgcgtgagtgttggatgatatagagtagaacaacctattctatgaag

SEQ ID NO: 3741 - DNA, 1394 bp, Glycine max
  misc_feature (1)..(1): n is a, c, g, or t
  misc_feature (8)..(8): n is a, c, g, or t
  misc_feature (98)..(98): n is a, c, g, or t
  misc_feature (215)..(215): n is a, c, g, or t
  misc_feature (311)..(311): n is a, c, g, or t
  misc_feature (344)..(344): n is a, c, g, or t
  misc_feature (372)..(372): n is a, c, g, or t
  misc_feature (684)..(684): n is a, c, g, or t
  misc_feature (873)..(873): n is a, c, g, or t
  misc_feature (1254)..(1254): n is a, c, g, or t
  misc_feature (1286)..(1286): n is a, c, g, or t
  misc_feature (1364)..(1364): n is a, c, g, or t
  misc_feature (1367)..(1367): n is a, c, g, or t
  misc_feature (1374)..(1374): n is a, c, g, or t
  Probeset Number=SeqID_13520
nccggcgngagaggagatgtccgagaacgtcagcgtactatactgctaacttcacaacactatacactcgcggtcgctatatgcacgcacgctcaganactagaacgacgacatatatgcgtgcggtcgggcgtgggcgtagcgcgcgcggagacgctagaagtgttcacgtacgtctacatgccttcgttctatcctagtgttgttgagtgganggtgttacagcgaaccgcacgctgtggctcgccactctgtgtccatcgatagcagtggcgctccgccgctctccacagcggtacttcttatctgtngctccctcgagtgcattagtctagatatcgtgncgtggccgtcgcatacgagaacgcatanatacgcgacggtggctgagcgtgggttggtgcgtgcgcaccgactcactctaactcgtgtgtgggtgcgttcgcaatcaggcgaccaggagagtgactacgcacgccacacgtcattcgcgtctcgcgtgtggtgtcattgattgtgtctcattacattactgcatgcggttcttcgcatgagcgtcgcttcctgcttgattattgtatcatgtcaacctcatctagtagacggaggggaggacggacgggcacatacattacagcagacgcatttagcgtcagctacacacagatccgctgcttcagtganctctgataatattattgcatatgtaaggtgtgaggtcgtaccctcatgatcacgcaaagcattatgacgaggccgagaatgctacatttcagtagtgagatgaattcttctctctattgcgtcccgcttgtctcacactctctagctgctgttctatcgattttcctgagatgcgccttgttgtcgccncaaggtcggcgtggtcgttctcacaatcacgtcgaatacaccgacgacaagcgacagacatgagtagtagcgtttattgagtaatgttgatggtaatgtaatatattatgtgtgatattattgattgtctgcggaagactacattctgctcacccatcatcgcacgcggctgtgtgtaaataagtaaggacaacgatgacatactcaactacgattcattctgtatggtcgctgtatattttgtttgccacccctacatcctcataaccaaaatatgaagcaaccatttatacaaaaaactcatgagccacacacctcttcctgcactggcgtgttggccacactaacacgggggcccgtgggaggcgatattgggtttgncgcgtcgttggtgctgcccgcggcggggaggngggggcgcctccctcctccccccccaccaccgcactgatctcgctcccgcctcccttgtccctccctccccacctctntancctctcncccaataaaaaaaaacaata

SEQ ID NO: 3742 - DNA, 1450 bp, Glycine max
  misc_feature (16)..(16): n is a, c, g, or t
  misc_feature (20)..(21): n is a, c, g, or t
  misc_feature (31)..(31): n is a, c, g, or t
  misc_feature (36)..(36): n is a, c, g, or t
  misc_feature (215)..(215): n is a, c, g, or t
  misc_feature (290)..(290): n is a, c, g, or t
  misc_feature (670)..(670): n is a, c, g, or t
  misc_feature (780)..(780): n is a, c, g, or t
  misc_feature (1136)..(1136): n is a, c, g, or t
  misc_feature (1200)..(1200): n is a, c, g, or t
  misc_feature (1402)..(1402): n is a, c, g, or t
  misc_feature (1421)..(1421): n is a, c, g, or t
  misc_feature (1450)..(1450): n is a, c, g, or t
  Peptide Sequence Number=SeqID_7966
  Probeset Number=SeqID_13521
ttaaaaaaaaaaatangggnnacgggggagnggccncctcaacgaggacgagaggcatgcggcgaagcgcggtgggctggttgtcgcgggcggcgctcgcagtgtcgtggcctatccacatccatatctctgtttttttgttctattacatcccgtctactacatctcttaatactacgtgacgtcacataactgacgtcgcttactacatgaangggtaatacagccgtcgggtgccgatggcgcgtatacattgctatggcgtggcggcgcgtcggggggagcaaagngacgctcagcagtcaggtacctcgcgtctcgtcggctgcgacctcactatcaccacctgctcccgctctgcgcccggctcgcatgtatttggtcttattctgtactcatctctaatatcatacagattctatatcatcgttgtggctatactatttatcttttgcggtgacggcctctcgcgagtgctagatgatcgcggatgtgcgttgaaatcagggagcgtgattatatacatggtgtcagtaacaattaaaccgcgaacctaactaatcacacttcgtgctctctcccggccataaacacatatagccacggacggcaatatgtctaattatctcctaccttcgttcctctcttcctctactactcgtgagcaccncccgcaaccgtcctatctccgtctgggtcgttctgggcatcgttgttggcgtgcaatcgattaccgtttgataatctatatacactcctgttgtattgatcatatactcnaccgcccccgcaacctacgcgacgagcgttacgttatactactcttgtatttatacagttcatcatctctatagtgcgcactgagtagctactagactagagctgggaactagttacccatcgtgttgtatcaccaccgtgcccgactccctcgctgaccgtaatgcaccatctatacgttacacaacacagctgtcgatcgtataatatgtggtgcatattatgcagctgatatgcgcgaagacagtagtatatcatgcgtaggcgtgtagcatatatcgtcgatcgtcgcgctcccggacgacactcgcgaagcgacaagagatttattattcgtggacggctagctataaaangtgacaacaccacagacgagcgacatgcgatgtgctctcgtgtgaatatagtatctcagataantgcataccggcgttctgttatcacatgctctcgagcagtgcgtgcttggctacatcatactatagtaatataaatagattctatcctactgccacagtgtgtctgatattcacgctgagactaacgataagcgtgctgtatctatctatagtttcgcgacgatacgaatgcgacgatgtgatgatatagtgctacacatcantcgtttgtagtcatgagtncatctaactgatgcacagctatctactcn

SEQ ID NO: 3743 - DNA, 1391 bp, Glycine max
  misc_feature (1)..(1): n is a, c, g, or t
  misc_feature (66)..(66): n is a, c, g, or t
  misc_feature (599)..(599): n is a, c, g, or t
  misc_feature (888)..(888): n is a, c, g, or t
  misc_feature (926)..(926): n is a, c, g, or t
  misc_feature (1022)..(1022): n is a, c, g, or t
  misc_feature (1360)..(1360): n is a, c, g, or t
  Probeset Number=SeqID_13522
natacgcaacacagacgcactccattgataaagctaagtaatatacaacacagatggtactcgaanatatgattagcggcagccgtatcatgactcgtctgctcatgtatacatagatacgcatttgaatagtagtgatataaatcgtatacagatgcaccggtgagatacaccactatcacatatgagtagtgatagtgaatggtacgtcataagccatatcacgtagagacgcaccgcagactaatagaccaacgcaaaggacatgacaagcgatcgcactgcggatacagttacagtagtatcaactgagtatacgtgtatcatcatagcgcatcaggatctgactgtcgtgtgtaattatctatgatcgcatatagcgtagtactatatgatgagacatcatagcgcatcgacaagaacggggtcaacagcgctacgatgcgccaggcgactatcgcacaggagatctgtaagatacagcgagcgtcgtgcatatcagagatcgatcgaatacacacatagattagatagtaggtatcgagtgtggtggaagcgctgcgtgcgatacgcttaggcataacgcatcttctaggcantgctgcctgctagcggaactcagataatattcaccaagaatctcaatatccactgtctttatgcaatggatatagtaagaatacactcacttacgatcgagccagcgagagaaatcacgcgagcagaagttctatcaacacagactcgctcgaagttcgtgctgcgagccgtgtagcgccacagatgtcattgtagattgttgtacgcaacaggcaggaatgcacaacaacatcgctagcagcataaacaggaagggcaacacgagtacgacacaaatgagcaaagagncgctcgagtgtgtgatacaatgagtcaagacttgaatncacagactgatagtgttgtgacagaattagaggttgatcttacactcacaatcacgcccagtgctatctgagcgacattcgacgaattatgtgcanaacgaatagtatgtgatatgaagagtcgtgtgtgacaccattcacccacgtcgagacctcgcgacgctgcggccggcgcgtcggtcgtcatgtctgcggactccactttacacagttacctggtcagccacagaggcacgtgagggtacgcgattgtcttgtatttgtgaggatttgctctcagtctcgattgagcctctccttctacagtagcttctaggtgcgtgtgcgtgaatagtagtgaatccagatttatattgatggggagattgctgattatcgcggagcagctgcgaggctggagcgtacgtgagggctagtatcgattgggcacaagnaacggatctagagtgtcgctgtgttccacaa

SEQ ID NO: 3744 - DNA, 1766 bp, Glycine max
  misc_feature (170)..(171): n is a, c, g, or t
  misc_feature (855)..(855): n is a, c, g, or t
  misc_feature (894)..(894): n is a, c, g, or t
  misc_feature (1192)..(1192): n is a, c, g, or t
  misc_feature (1320)..(1320): n is a, c, g, or t
  misc_feature (1380)..(1380): n is a, c, g, or t
  misc_feature (1481)..(1481): n is a, c, g, or t
  misc_feature (1607)..(1607): n is a, c, g, or t
  misc_feature (1637)..(1637): n is a, c, g, or t
  misc_feature (1651)..(1651): n is a, c, g, or t
  misc_feature (1693)..(1693): n is a, c, g, or t
  misc_feature (1695)..(1695): n is a, c, g, or t
  misc_feature (1766)..(1766): n is a, c, g, or t
  Peptide Sequence Number=SeqID_7967
  Probeset Number=SeqID_13523
gataagaaggaagacaaaagcgcgagggacaggtgggatgatacataaaaatacgagcgtcgacccgggccaccttgtgggtggcgcagtagcggaaattggccagggaatggaggtgtggctctctcttaacaaagggtgaaagtttttccccaagagaattcagagannaaggacccaacaatcgcgcggtcgtatgttaaacgcaagaggggaccagcacccagaatttaataactacatggcgtggctcgcgcccaccggaaaccacacacctcgcccactttctgccgccctctggtctccgcccctgtatgttttattgtagaccccgaatgttaacgcacaaagcttgtgagacactatgcgcgcagccgttaattgatgtcccggtgtacccccatatattttctctatacccgaagaacgtcctccggcgcgttgaccaaaataaacatattatacccccacgaccactcgattacagaccaccaggtgataggcagcacgaaagagcgacgcgcggtaagcgcgttatactgtgcgcgccacgcgtcttaatgatatggctgcgtgtacccgataacaatctacataataacacccacccccacgctaccgtaatatatacacacttatataatcacgtcggcacaatcaagcgaagacacgcgacaacaagaattaacaaaaccccctactatacacccacgagaatacaaaatcaactatacgccctgctctcctccgagattatattaccacgtattatgttgcgagagacgcgcagggcctagagcggcgtacgtgacggtgataatatgaaagcgcgccggagaaggagcatgacacagncgatatcggtaggatatctatagatagattagacaagcngattatatggacgagagagagtagacgagacgtcagagaagtgggagtttcacggaatgtataagagggccgacatcgatgcgtggaggtagcgacactctataatacacactgtagcggcaggcaccacgtgaatggctacaataatgttaagataaacatgaatgcgcacgagagagcgctaagtcgtcgatataacggtgttgtgcatatacacgtgatcaggtggatatgcactccttccgcctctcggagcgtcagtctaatagtgtagagtaatacttaatatataaataantcatctacgcgtgagcacacgtataatattacacactaaaattgtcgctgagcgagataggtcgtagagtccgctcggaacgcgatcgcgcggatgattgggagtatcgagggaaaatcagcgaaggngagatagcacagtatatagagacgtatatacgacgttgacgacgcctcagccacgcgcgncctatactactgtattaggacgctgaggtcttgtaaatcgtgatcaccctaacgccactcccgagactgcagacagtcgcggacgaggacacgacaagagnacgtgacgagaggagagtagaatgtgagaatgagtagggtatctcgcacgacgcgaccgcccccacgactagacaatactacacaacttgtatgtgaaataagcagctagtataccagtagtgcangaatgctcacaatctgacacgatctatagntagcatatagattntaattataatgagacggctacacacgcatgtggatgatgtantnattttatcactaagaccgtatgcgcatcgaacggacgacgagcgtcgacacgacccattactgtggtgtan

SEQ ID NO: 3745 - DNA, 760 bp, Glycine max
  Peptide Sequence Number=SeqID_7968
  Probeset Number=SeqID_13524
aaaaaaaaaaaaatagagcatattaaaaaaagagaaaaaagagcaatggtagtttatgaacatgaggaaaagggcatcatttgataacatggcgacatggtttgaggaactgctaagccatgctgacaaaaacattgttgtgatgcttattggcaacaagtgtgatcttggaactcttagagcggtgccaactgaagacgcggatgagtttgcgcaaagagagaacctattctttatggagacatcagcacttgaatccactaatgtagaaactggctttctggccattctaactgagatacacgtacttgaaagcaagagaacactcactgccaatgatgatgcagatccaagtggtatttcaggacttctgaagggactctagataattgttcctagccaagacattaattctggtgaaaagaagggtggctgctgctaagattccgagctttagagcgtgttcactcctctttggaagcattttgcatccctccccggctccggcaacatgtagcatttgtaaagacggtagttactatttttggtcatcctatgatcagcagaatgtagcctatatctccttgtcactgtgcctgtttaatgcaagcatataaagtctttcttctggtataggtccgatctagctttaggcattcaatatgttaagacgagactaccggctgtgaagggatgggtcaattcagatataggaatgcaaactgtcataccttactagatgcgagtgttgtttgccggt

SEQ ID NO: 3746 - DNA, 1354 bp, Glycine max
  misc_feature (64)..(65): n is a, c, g, or t
  misc_feature (73)..(73): n is a, c, g, or t
  misc_feature (79)..(79): n is a, c, g, or t
  misc_feature (83)..(83): n is a, c, g, or t
  misc_feature (105)..(106): n is a, c, g, or t
  misc_feature (116)..(116): n is a, c, g, or t
  misc_feature (118)..(118): n is a, c, g, or t
  misc_feature (145)..(146): n is a, c, g, or t
  misc_feature (149)..(149): n is a, c, g, or t
  misc_feature (167)..(168): n is a, c, g, or t
  misc_feature (171)..(174): n is a, c, g, or t
  misc_feature (182)..(182): n is a, c, g, or t
  misc_feature (187)..(189): n is a, c, g, or t
  misc_feature (193)..(193): n is a, c, g, or t
  misc_feature (198)..(199): n is a, c, g, or t
  misc_feature (201)..(201): n is a, c, g, or t
  misc_feature (203)..(203): n is a, c, g, or t
  misc_feature (206)..(206): n is a, c, g, or t
  misc_feature (217)..(217): n is a, c, g, or t
  misc_feature (229)..(230): n is a, c, g, or t
  misc_feature (242)..(242): n is a, c, g, or t
  misc_feature (258)..(259): n is a, c, g, or t
  misc_feature (261)..(262): n is a, c, g, or t
  misc_feature (266)..(266): n is a, c, g, or t
  misc_feature (268)..(268): n is a, c, g, or t
  misc_feature (284)..(285): n is a, c, g, or t
  misc_feature (287)..(287): n is a, c, g, or t
  misc_feature (290)..(290): n is a, c, g, or t
  misc_feature (298)..(298): n is a, c, g, or t
  misc_feature (302)..(302): n is a, c, g, or t
  misc_feature (307)..(308): n is a, c, g, or t
  misc_feature (315)..(316): n is a, c, g, or t
  misc_feature (329)..(329): n is a, c, g, or t
  misc_feature (432)..(432): n is a, c, g, or t
  misc_feature (434)..(434): n is a, c, g, or t
  misc_feature (446)..(446): n is a, c, g, or t
  misc_feature (452)..(452): n is a, c, g, or t
  misc_feature (460)..(462): n is a, c, g, or t
  misc_feature (466)..(466): n is a, c, g, or t
  misc_feature (468)..(468): n is a, c, g, or t
  misc_feature (475)..(476): n is a, c, g, or t
  misc_feature (485)..(485): n is a, c, g, or t
  misc_feature (491)..(491): n is a, c, g, or t
  misc_feature (517)..(517): n is a, c, g, or t
  misc_feature (524)..(524): n is a, c, g, or t
  misc_feature (530)..(531): n is a, c, g, or t
  misc_feature (534)..(534): n is a, c, g, or t
  misc_feature (537)..(537): n is a, c, g, or t
  misc_feature (542)..(544): n is a, c, g, or t
  misc_feature (546)..(548): n is a, c, g, or t
  misc_feature (551)..(552): n is a, c, g, or t
  misc_feature (556)..(560): n is a, c, g, or t
  misc_feature (593)..(593): n is a, c, g, or t
  misc_feature (602)..(602): n is a, c, g, or t
  misc_feature (628)..(628): n is a, c, g, or t
  misc_feature (631)..(635): n is a, c, g, or t
  misc_feature (638)..(638): n is a, c, g, or t
  misc_feature (645)..(649): n is a, c, g, or t
  misc_feature (661)..(662): n is a, c, g, or t
  misc_feature (692)..(692): n is a, c, g, or t
  misc_feature (715)..(715): n is a, c, g, or t
  misc_feature (718)..(718): n is a, c, g, or t
  misc_feature (734)..(735): n is a, c, g, or t
  misc_feature (741)..(741): n is a, c, g, or t
  misc_feature (751)..(751): n is a, c, g, or t
  misc_feature (753)..(753): n is a, c, g, or t
  misc_feature (1117)..(1117): n is a, c, g, or t
  misc_feature (1238)..(1238): n is a, c, g, or t
  misc_feature (1253)..(1253): n is a, c, g, or t
  misc_feature (1311)..(1311): n is a, c, g, or t
  misc_feature (1315)..(1315): n is a, c, g, or t
  Peptide Sequence Number=SeqID_7969
  Probeset Number=SeqID_13525
acagcgcgttgacgcgtgctaccacatgtgcactacatcgcgcgccgtagcacaccgcgcgttnncgctccgntctcgnctcncgtggcttggcccccaccaccnncccccgcgcncngcgcactcaaacacccacaccacacgnnacncctattctcccctggcgnnccnnnnccgcgcgnccccnnncccncggcnncngnccncctggagcgcncggccctcgccnnccgcagcaggcncctccttagcgccttnngnncctncnctagacgcgctgcgcnncnctnccgtcctnctgnctctnngtctctnntcttctccttctncctccgctctcctctcctcttcctcgctctcgctcctctcctccaccccctcctgcgccgtcccccgtgcaacgcgcccctcgcgtgtcctcccggcgatacncncggcagaatagntcgganactaccgnnncccncnctcgccnnccccctcgnggcgcngagcaccgccccgcagcgcgcgcgcnccccttncttccnnccntcncgggnnngnnnccnntccnnnnngctgggtgggccgcgcccccgccggtctccggncgcgcaacnacccccccacctcccgcgcgcgggcnggnnnnnggncgtgatnnnnngacacaatatannatagtcgcggtcttgccgcgaaacaccccntcttatctccgagctgagtgcgnatncccccgcgaaacgccnnggccgnggtcacaacncncccgacacaaagagaacaagccaacccgacaaagggagtgaaatttattcggttataattcaattcttatatgattcttctatttctaacacttactccataaaaacatacagcttaagaactaatctccctaaacacgatataaaacacaggggataacaaactagactgtgaactacagagcgcgaggacaccactccaccgaaccacgcataaccaccaccgctacaccgacacaatactaatctctaccaaagacttgtggtatattacggacacgcaggactcctgtgtgcttccgggccctctccctacgactcactgcgggggtgaaaatgcgatgatgattcctatcccttctcgnatatactgcctctacctactataagaagaatctatgcgcggaggggacggggcccccgtgcactaagtctgacctatgacagaggggagcaccccctctactccatcataggggtgatatnggtttaagggtggcngcctcctcctctctctctccaccactcgctggcctgccacgaaccctacgcatgtgantttntatatgcaacacgaccgaaacccaacgcacccccaacac

SEQ ID NO: 3747 - DNA, 3369 bp, Glycine max
  misc_feature (3108)..(3369): n is a, c, g, or t
  Probeset Number=SeqID_13526
gaactaatgaaccttgggcaaaggaaccgtgcagttcaataacatcaatagtagatgatacaggaacaaggcttgcatctggcacactgagtcctctactattgatgttattgaactaatgaaccttgggcaaaggaaccgtgcagttggagcaacagcccttaatgaccgcaaatgctcttcgaccagcagcaaagagaaattcaggagctaaggcatagtcttcactccacaaaagatggtatgcagttcatgcaaatgaaatttcacgaagacttctccaatcttggcacgcacattcatggcttagctaatgctgcttctggatatcatagagttcttgaagaaaatcgcaaactatacaatcaagtccaggatcttaagggaagtattagggtgtactgtcgagtaagacccttctttcctggacaatcaaaccatttgagtgcagtggaaaatatagaagatggaaccatcacagttaatattccttcaaagaatgggaagggacgaaggtccttcaactttaacaaaatttttggaccatctgctacccaagccgaggtcttcctagatatgcagccactcgttaggtctgttcttgatggttttaatgtttgcatatttgcatatggccaaacaggatcaggaaaaacttacactatgactggacccaaagagatcacagagaaaagccaaggtgtaaattacagggctctaagtgatttgtttcttatagcagatcaaaggagggacactgtccactatgacgtttctgttcaaatgattgagatttacaatgagcaagtcagggatctgctggtcactgatggaacaaacaaaagattagaaattcgaagtagttcacaaaaaggactcagcgtgccagatgcaagccttgtccctgtatcatctactattgatgttattgaactaatgaaccttgggcaaaggaaccgtgctgttggagcaacagcccttaatgaccgcagtagccgatctcatagttgcttgactgttcatgttcaaggaagagatttgacatctggagccatccttcgtggatgcatgcatttgcttgacgcggcaaccagtgattcctcagaacctgccttactttggcagttgaatcattccaaacttagcaccgtgaccaatggaattggatcaaagactatgaaatctatctcagaggcagcaaagaacagacctgagttgatcaagaatgctgtgcattcttttcctgtaggtccttcacattaattgaaaaactgacatggagcaccacatcgatcaagacggcgtgcggctacaattgacgcgaaacgctcaactgcgaatagaacataatcgtgtttactgaataggcaaagagagtgattgtttatatttgatattatgttagttctttcccttaggacatcgacgcgagagagatagacagatcgttataagctttttggaggtccgtaattatgtatcacacggttaatggggggattaagccccccccccccccttacaggagatagacttaaagaagcacagcatattaacaaatctctttcagctttgggagatgtcattgcttcccttgctcagaaaaactctcacgtaccttacagaaatagtaaactcacacaactactccaagattcacttggaggacaggctaagacactaatgtttgttcacataagtccagagagtgatgctattggagaaacaattagtaccttaaaatttgctgaaagagttgccacagttgaacttggtgctgctcgagtaaacaaagatagtgcagatgttaaagaactcaaagaacagattgccagcctcaaggcagcactggcaagaaaggaaggagaatcagaacattcttttttgggcagctctgaaaaacatagaacaaaggctagtgagctatcaccttatcatataaaccagcgaggtcctgacgctgtggatcagcttggatgccggcaaccaatggttgaggttggcaacatagaacttcggagtaataccacagtgaggctcaaaactcagagctttgattttgatgagatatcagcaaattcaccatcatggcccccagtgaacaatagtcttgcacaaaactatggggaggatgacaaagaatctggtggttctggagaatgggttgataaggtcatggtcaacaagcaagatgtaaacaaaactgagaacctcttgggatgttggcaagcagcaagcaatgggaacttatctgaggccttttatcagaaatacctcaaagattctcccaaaatgtactcagaacaatccgataatatgttcatgggagccaatcagtttaacattgccggttcagatgacatggatgagcttgatgctgcaaccagtgattcctcagaacctgacttactttggcaatttaatcattccaaacttagcagcgtgaccaatggaattggatcaaagactatgaggtctaaggcagcaaaaaacagccctgagttgagcaagagtgctgttcattcttctcctctaggtccttcaccttcattgaaaaactcaaatggtgtcccacatcgaacagggaggcatacagctccagttgacgtgaaacgtagaactgggagtagaaaataaacgtgtttttactgaaaaggtaaagagagtgattgtttatattatgattcttttataattttttagatcgacgagagagagagagagattgttataatttttttcttggtttgtattttgtaatcacacggataatggagcaatagcgcttgttgctttgtttgtatcatgacattcttttattttactccacactagatttttaggggatgtaaaaaaatgaaactcctaacactgcaatgattttttatttgtacaaaaaaaaaaaaaaaaaaaaagaaaaaaaaaaaaaaaaaacctttaaggccgggaagaactcactagcttctaacagcgggacgcccacccgcgggggggaactcccaggctttttggtccccttttaagcgcgcggctcatattctccaagcctctcgccgtaaatccatgggggcataaaacttgctttctcctgagcgagaaaatttggtnnnnnnnnnnnnnnnnnnnnnnnnnnnnnnnnnnnnnnnnnnnnnnnnnnnnnnnnnnnnnnnnnnnnnnnnnnnnnnnnnnnnnnnnnnnnnnnnnnnnnnnnnnnnnnnnnnnnnnnnnnnnnnnnnnnnnnnnnnnnnnnnnnnnnnnnnnnnnnnnnnnnnnnnnnnnnnnnnnnnnnnnnnnnnnnnnnnnnnnnnnnnnnnnnnnnnnnnnnnnnnnnnnnnnnnnnnnnnnnnnnnnnnnnnnnnnnnnnnnnnn

SEQ ID NO: 3748 - DNA, 1726 bp, Glycine max
  misc_feature (1)..(1): n is a, c, g, or t
  misc_feature (71)..(71): n is a, c, g, or t
  misc_feature (243)..(243): n is a, c, g, or t
  misc_feature (250)..(250): n is a, c, g, or t
  misc_feature (283)..(283): n is a, c, g, or t
  misc_feature (528)..(528): n is a, c, g, or t
  misc_feature (534)..(534): n is a, c, g, or t
  misc_feature (608)..(608): n is a, c, g, or t
  misc_feature (684)..(684): n is a, c, g, or t
  misc_feature (751)..(751): n is a, c, g, or t
  misc_feature (1048)..(1048): n is a, c, g, or t
  misc_feature (1198)..(1198): n is a, c, g, or t
  misc_feature (1201)..(1201): n is a, c, g, or t
  misc_feature (1256)..(1256): n is a, c, g, or t
  misc_feature (1275)..(1275): n is a, c, g, or t
  misc_feature (1339)..(1339): n is a, c, g, or t
  misc_feature (1456)..(1456): n is a, c, g, or t
  misc_feature (1477)..(1477): n is a, c, g, or t
  misc_feature (1509)..(1509): n is a, c, g, or t
  misc_feature (1513)..(1513): n is a, c, g, or t
  misc_feature (1516)..(1516): n is a, c, g, or t
  misc_feature (1518)..(1518): n is a, c, g, or t
  misc_feature (1521)..(1521): n is a, c, g, or t
  misc_feature (1524)..(1525): n is a, c, g, or t
  misc_feature (1537)..(1538): n is a, c, g, or t
  misc_feature (1543)..(1544): n is a, c, g, or t
  misc_feature (1566)..(1566): n is a, c, g, or t
  misc_feature (1588)..(1588): n is a, c, g, or t
  misc_feature (1615)..(1616): n is a, c, g, or t
  misc_feature (1658)..(1658): n is a, c, g, or t
  misc_feature (1662)..(1663): n is a, c, g, or t
  misc_feature (1667)..(1667): n is a, c, g, or t
  misc_feature (1686)..(1690): n is a, c, g, or t
  misc_feature (1693)..(1693): n is a, c, g, or t
  misc_feature (1697)..(1697): n is a, c, g, or t
  misc_feature (1700)..(1700): n is a, c, g, or t
  misc_feature (1705)..(1706): n is a, c, g, or t
  misc_feature (1709)..(1712): n is a, c, g, or t
  misc_feature (1714)..(1715): n is a, c, g, or t
  misc_feature (1719)..(1719): n is a, c, g, or t
  Peptide Sequence Number=SeqID_7970
  Probeset Number=SeqID_13527
nggatgttagatagattaataatgattagtgttatgattgagatacttcgatagtcgcagtatagatacanactgatagttttatatattctatattatacaagtgtgacacatatcttgacagtgtcggagagttagtagagtcggagtgcggcgatattagcagtagagctagtgtgtgctgtgaggtggcgaggtgtgtttcgtcgagatagtgtgacatataatagtgacgagtggctntacacgncgaggtgagatgataatattgaggatgtataanaacgattaacatgagagacagagagtatagagcaagtggtgagatttcgatatatatgagtaatgattgacgtggacgaatagtagagtagaagcacagtgaggtgcgctagagagggcacacacagattatgcacaggagcggagtgtatccgatgctgatcagagtgatatcacgacgcgacacatacatcacaacctatgcatcatccgccgtaaacactggtgtctcatgtgtcaggatgngtgctntagtgatagtagataagatagataatacacataatgagaggaaatgacactgagatgacgacggagggagtagngggtcgatatacgatacataagacacacacgatgcgtgtgtaactagagatacggaacgtgcacggtaaccaattnataatattatatatatgagagaggagataggaatggagtatagagagtgaggtgagagggatatagnagtgagagtttagggtaatggaggagagagggctacggggagtagagatagataataatatgactatcggtcgtcagcgtagaggaacatacaaaatcagcataacgcgctataggagcagtaagagtgtgtaactgtcatgctgtgcccatataaagtaaccggtgagcactcatcgcaggtacatgcttcgcacccaatataaacacgagagcataggaatgtgagtaagaaggtaaagtagtgaatgatgcgtagcaccaaaagcgagtacgctccaggtacgactctgatgtnactctttatcatactataatatgaggagtacacatcaccaaatactaaagagtgaaacacatagacaacgataaatacaatcaaaataacgacatataaaacacgatagaatatcacaaaagcgtatgaacacacaacattccactattngtntctagtgctcgcgcgccgtagcgtgtggcgggacagagatgagagagagggggcncgaggagagaggtgagggnagatgatggagggactaggcacgcgaacagagatacgcagagatgagcagagggggaagcgggnagagtgaggatagaaggagcaacgcacgcagagaggcgaaggaagagagtgaagagtgtgagaatactcagctgtaagagtatatgatggtagtagagttagcacgggtgggttgtngagtggtatattgtgtggtanatcgttggtggtggtttacatctcggatcttntctnaangngtnaanntttatgggtgtnnagatnngagggagatgggagggattttntgaaagatatgatgtgtgattntagtgtgaggggggagtatatgggtgnnaggggggaggagtgggttggcttaggagagagagggagaagngaanngagnatagggagagggggagggnnnnnggngagnganggaannaannnnanngaanaaaaaaa

SEQ ID NO: 3749 - DNA, 1711 bp, Glycine max
  misc_feature (22)..(22): n is a, c, g, or t
  misc_feature (71)..(71): n is a, c, g, or t
  misc_feature (219)..(219): n is a, c, g, or t
  misc_feature (221)..(221): n is a, c, g, or t
  misc_feature (230)..(230): n is a, c, g, or t
  misc_feature (232)..(232): n is a, c, g, or t
  misc_feature (243)..(243): n is a, c, g, or t
  misc_feature (257)..(258): n is a, c, g, or t
  misc_feature (457)..(457): n is a, c, g, or t
  misc_feature (544)..(544): n is a, c, g, or t
  misc_feature (548)..(549): n is a, c, g, or t
  misc_feature (551)..(551): n is a, c, g, or t
  misc_feature (575)..(575): n is a, c, g, or t
  misc_feature (620)..(620): n is a, c, g, or t
  misc_feature (633)..(633): n is a, c, g, or t
  misc_feature (656)..(656): n is a, c, g, or t
  misc_feature (722)..(722): n is a, c, g, or t
  misc_feature (735)..(736): n is a, c, g, or t
  misc_feature (754)..(754): n is a, c, g, or t
  misc_feature (757)..(757): n is a, c, g, or t
  misc_feature (761)..(761): n is a, c, g, or t
  misc_feature (770)..(770): n is a, c, g, or t
  misc_feature (777)..(777): n is a, c, g, or t
  misc_feature (793)..(793): n is a, c, g, or t
  misc_feature (806)..(806): n is a, c, g, or t
  misc_feature (902)..(902): n is a, c, g, or t
  misc_feature (966)..(966): n is a, c, g, or t
  misc_feature (975)..(975): n is a, c, g, or t
  misc_feature (977)..(977): n is a, c, g, or t
  misc_feature (1019)..(1019): n is a, c, g, or t
  misc_feature (1024)..(1024): n is a, c, g, or t
  misc_feature (1220)..(1220): n is a, c, g, or t
  misc_feature (1238)..(1238): n is a, c, g, or t
  misc_feature (1275)..(1275): n is a, c, g, or t
  misc_feature (1278)..(1278): n is a, c, g, or t
  misc_feature (1337)..(1337): n is a, c, g, or t
  misc_feature (1356)..(1356): n is a, c, g, or t
  misc_feature (1367)..(1367): n is a, c, g, or t
  misc_feature (1441)..(1441): n is a, c, g, or t
  misc_feature (1445)..(1445): n is a, c, g, or t
  misc_feature (1480)..(1480): n is a, c, g, or t
  misc_feature (1482)..(1482): n is a, c, g, or t
  misc_feature (1486)..(1486): n is a, c, g, or t
  misc_feature (1491)..(1491): n is a, c, g, or t
  misc_feature (1545)..(1545): n is a, c, g, or t
  misc_feature (1580)..(1580): n is a, c, g, or t
  misc_feature (1616)..(1617): n is a, c, g, or t
  misc_feature (1621)..(1621): n is a, c, g, or t
  misc_feature (1635)..(1635): n is a, c, g, or t
  misc_feature (1641)..(1641): n is a, c, g, or t
  misc_feature (1653)..(1711): n is a, c, g, or t
  Probeset Number=SeqID_13528
aatgacgtagctacttagtcgncgcgtcacacatcactcaccgcgtatatcgcatcgtcgtcgcgctgtantctaggtgttgtgctcgtcacattgtcgggtggctctaacgtatgttgtgatggctcggcattcgcacaccatggcgcgctgcacttcgtagtagtgagtgtgaagggggcctctcttcaccaggacgcatgggcatctgtctcgcgngngcaaatgtntnacgcacctccnctctggatggtgtnnctctgcccgtcgcgctatggtgtgtaacctgaccagtgaggctagacagatcacgcggaagagaagcgaggtgcggagccgcaaagcactaacaagggtcttcctcggcgtctagaaggacgtgacacttgtccttctccctactcttctctgacggtaggtccttcggcgtgaggagtgggtggcgggcgacgttcgnattaatggacggttggagtcgcacggcctccagtgagtccccacgagacgcacattgtggcaccttcagcgctgtgtgcgtagtccncacnngngagcgtgggcgtgtacggatgaangatctctcgctaataagagatcatgagttgattccgtgaactcgngtcggtatatgcnttggatcttatgcctcgagtcgnaccgctgcgtgctgtccgtctctcactcatcacacctcactcatagcctacactagatggtctagnagtacgtgatagnntcatcagaaattcaccanagnggtnggtccttgngcgttcnccgcttcttcctgctntttgccgtccgcngcgtgcgacacggaaggcctgtgtcctatactaggtgtgaggtgtgaggtgggagcgtgctcgtcgtcgggcccaccaacaacatcctcctacaanacatacataccacatcccacatgtggtccggccatgagagataaggctcctcctaacgcgcaanctatagcgncnctctaggcagagaggagaggagacgattctgacgacagtcancgtgnagtgatgtgattctctcgtgtgagacggagagtttattggttattgtgtggttgtgtgagagtgcgtcgcgggtaggtcctcttcctagtcgcgcgctctcgcttctgcagtgagtgcgtaggacctattgttctatctctactttacatcgcctcgggcgacacgcagcgcatgcactctaatgacgctaccatnccagctactgggggagangcgcttcgacactgcaaagtactaagtagtctctctnatngtcttcgctactcatgagctgatacaactactcactaagatagcactcaccatgtcggngcggtcgaggcgggctatnttgggtcgagnagtgtcgagccgtactcgtcgcgctagccgtctggtctatcgctccgtgctctgcatcgtaatctcatttcatncgtncgtggtgagagatacacacaaatatatacatatananacantatangcacctcttcccacgcgcacgcgcgccgcggatgggcgctccctcacctctgcntttgtcagaagaggcctgtcctcctcctctgcgcnggtggtggagtggagcctctctcttcctctcttctnnctgnggagggtgaggttngtgtgntaatttgggggnnnnnnnnnnnnnnnnnnnnnnnnnnnnnnnnnnnnnnnnnnnnnnnnnnnnnnnnnnn

SEQ ID NO: 3750 - DNA, 1441 bp, Glycine max
  misc_feature (16)..(16): n is a, c, g, or t
  misc_feature (45)..(45): n is a, c, g, or t
  misc_feature (103)..(106): n is a, c, g, or t
  misc_feature (113)..(113): n is a, c, g, or t
  misc_feature (120)..(120): n is a, c, g, or t
  misc_feature (194)..(194): n is a, c, g, or t
  misc_feature (217)..(217): n is a, c, g, or t
  misc_feature (869)..(869): n is a, c, g, or t
  misc_feature (1165)..(1165): n is a, c, g, or t
  misc_feature (1407)..(1407): n is a, c, g, or t
  Peptide Sequence Number=SeqID_7971
  Probeset Number=SeqID_13529
tagttgtgtgtatgancaatgatggagttcatcacacacacaganacacaatcaactacactaacaaaatcttctatcatcttcttcagatttgtatttattnnnnccctttnctctcgngttgttgatcttaattaaaggataaggggtccgaccgccccactcccagcgcccaggagtctctctaccatatnatgtggtatagcgtactcttttncattctaacatatagccactatagaagacccatccatttagataaatagctcaccatacatccaatatcacattagtattaaatatgaccatccgggctgacgcgaacagacgccacacacaagcctcccgactgtactcaccatatcactcctccacctgcacctccaccaccacagcggcgcggcactcgtgacatgatggggaaaagttgatgagttgcagccctgaagatgattgctgcaaaggtgtactgtctgggtgagccaatagtgtgcccgccgtgatgctgggtgtgtggctgtggtgttgtgtttgtggtgggatgtgaggtggactggggatgtgtggaccgcgcggtagagcgtaggggtttggagtggtgatgcctgtgggcgtagacgggtgtggtgcgtgtcaccgcgctgatcctgtagccacacactgtcgaccgcagtagtagaccgcgcacgagtatgtctattagtgagaatctgtcctggcagaacctagatcactaccgccggtcgtatgtccccactatacctaaatcgcctctcaccaacggccgaccatcacgtcaatctcggcactagtcatcccgtctctgcactcgttgcctcgtgccacctccgtataatgcgtgttactantatagtatctactcttacaattatatccattaataatatgtacccccatactactactacttccctcactcttatctcatctactgatgtctacacactacgattcgcactaccgtacatctgcttataccttccgccgtcactcctccccggctaacgacttatcgcaccacaacaacaccacgcacacatccacacgtagtggaatgatcatactccatacaatcagtagctctcagacgccactccagtccgacacctcgcgctattctcatgtgtccgtaactgtcctacgnataactatacctacacctcgctctgaaatacatagagactatccttcgtctcgatgaagttgattataactctatcgcgcgctcgttgtcgtcatatctcaagaacacacactcactatgataagtatcgtgacaatctcctcacataaacacgccatcgacgacgtataacgtgctatcgataccagacgacaacgtcagatggacgatactcatcatcaccgcgacagacatgcctcttnactcttctcatagcaaatagatacacaccgcacg

SEQ ID NO: 3751 - DNA, 843 bp, Glycine max
  Probeset Number=SeqID_13530
aaccaagcagccgctgcaacatactgtacaattactttgcactagcaacacaacgctcttactgagctcatagcgtttgcacctgcccatcttaactagttgatcaccgcagcaatggcctccaccaacagctggacccacgagatcgagtcgtcggtcgcggcaccgcgcctgttccgtgccggcgtcatggactggcacactctggcacccaagctcgcgccccacatcgtcgccagcgcccaccccgtggagggcgaaggcggcatcggcagcgtcaggcagttcaacttcacctcagtcatgccctttaccctcatgaaggagaggcttgagttcctggacacagacaagtgtgagtgcaagtcgaccctcgtcgagggcggcggcatcgacacggcgatcgagactgcgacgtcgcacatcaaggtggagccggcggccaacggagggtgcttcgtgaaggtggactcgacgtacaagctgctgccaggcgtggaggtgaatgacgaaatcaccaaggccaaggaatccgtcaccgccatctttaaagccgccgatgcctacctcatcgccaaccctgacgcctacaactgaatcagttgagagggatcatatatgattatgatgtccctagtttgattcttttgtgctttcttcccgatgtaataaagctgctccatctctaagctacaaatagtaacgccgagggcgagagcaccgaggagagtgtggacgtgagaagttgaaaatttagtatttgtaactactaaaggggcctgtttgtttgatgatgttggtgcttgctttatgtgaaatacctaaacgctcttgttttcttag

SEQ ID NO: 3752 - DNA, 389 bp, Glycine max
  misc_feature (48)..(48): n is a, c, g, or t
  misc_feature (277)..(277): n is a, c, g, or t
  misc_feature (282)..(282): n is a, c, g, or t
  misc_feature (312)..(312): n is a, c, g, or t
  misc_feature (316)..(316): n is a, c, g, or t
  misc_feature (321)..(321): n is a, c, g, or t
  misc_feature (380)..(380): n is a, c, g, or t
  misc_feature (383)..(383): n is a, c, g, or t
  Peptide Sequence Number=SeqID_7972
  Probeset Number=SeqID_13531
ttttttttttttttttttgccaatcttaaagcataatgggatattganatatttaaaaatcaccaataaaataatcttttaccgattaaaccaattttttaaaaattttcaaaactggaagtttcaaatgccttatttttattttaatttagttttttttatcaacagtaaatagttatctatcatttaaattattttttttaatttacatactttatactttactggtattttaaaatagtcatactcccaaacttgaatggacttaattattcanagagngacaagcctaaactcttattaatccttgcnccanaaatnaaaactgagtttttcattagtcattaggccttttttatgcttgcttgattgcttcactnaanatatat

SEQ ID NO: 3753 - DNA, 1399 bp, Glycine max
  misc_feature (583)..(583): n is a, c, g, or t
  misc_feature (652)..(652): n is a, c, g, or t
  misc_feature (765)..(765): n is a, c, g, or t
  misc_feature (875)..(875): n is a, c, g, or t
  misc_feature (950)..(950): n is a, c, g, or t
  misc_feature (1013)..(1013): n is a, c, g, or t
  misc_feature (1024)..(1024): n is a, c, g, or t
  misc_feature (1033)..(1033): n is a, c, g, or t
  misc_feature (1062)..(1062): n is a, c, g, or t
  misc_feature (1140)..(1140): n is a, c, g, or t
  misc_feature (1144)..(1144): n is a, c, g, or t
  misc_feature (1197)..(1197): n is a, c, g, or t
  misc_feature (1205)..(1205): n is a, c, g, or t
  misc_feature (1210)..(1210): n is a, c, g, or t
  misc_feature (1226)..(1226): n is a, c, g, or t
  misc_feature (1232)..(1232): n is a, c, g, or t
  misc_feature (1268)..(1268): n is a, c, g, or t
  misc_feature (1290)..(1290): n is a, c, g, or t
  misc_feature (1358)..(1358): n is a, c, g, or t
  misc_feature (1360)..(1360): n is a, c, g, or t
  misc_feature (1396)..(1396): n is a, c, g, or t
  Probeset Number=SeqID_13532
gtgtagggccaccgcccccgcctgttgctcgcacataatgtacatataaaacagagatttcggccctcgccgctcccataaccacgccgcgcggcgggtgtcgatccttacccctataattccttattttcccgtatgtgtaacgttattgctgaaacatttaggctgcgcgcggatggcgcacgaatagatggatatatctcatgctgctccgcgatccacgcgatacccgccgttaacattgttgtgtatgcagcgttaccgacgtgaatctcagcgccccacaactcatcatcgatcaccagaccaaagtagtgggacgcgaaaccatctcgtgattagtgtgcgtctgctctctcgttccgtccatatatgcataaatcgccgcgcaagatagaagatgatgttcctgcccacaacaccacccgaccgtaacgtgaccctggcttaggagaactatcgcgataataagtgggaattagttaactgtgcgaactgcccgcacacacgcgactaatacgtataggggaccggtcttgctatctatcatttcacatatacaggctgcggtatcaccatcaantcagcgtttgtcctccgctccccatctgtgaaccgaagcgttatcgggatatgttatcccccatttatnctgaacggacgttgccctgcactccacgcatattcgcccgcacgtatgttgatcgtgctccgcatccaccatcccattcacgcctacgcgccacaccgtctgtgtgcggtttnaacggaaaagacgttaatttcttgactgcgcgcgtgccgttaaatcccatacgcccagcagcagcaccgtaagatatcaatcgaatatcgtagcgtctcgccctgctcantaatccacacgccacatatcaccgcctgtacgaatatttatctacgcgatcaaacacactctaatagtaatattnatactctccacctgtatgatgacagacgcgaggtccgctcctacacatacatcacccgccgcngactgcgagtnagccacacntatcctattcatatctatgtaagaatgancaccgcccggcgtggctgtctgtcaataataatgtgtattcatgtctgtacatgatatatacgcacacgacatacgtnagcnctgacgccgcactctgtatatgttgatttactcagcgtgtcacggaccgcgcngacgacanaccancatacgcgatcttttngagaangtgtatcgacaacctcgtactcacgattgacggagnagataataaccagagcactacnagtatctgctgcacggcggtgcgcctaaacaccgacacgattacacggcgatatatagtcactccggntngtcgcattcacgtatgtacggcggatcttacgcaantgt

SEQ ID NO: 3754 - DNA, 1457 bp, Glycine max
  misc_feature (12)..(14): n is a, c, g, or t
  misc_feature (28)..(28): n is a, c, g, or t
  misc_feature (45)..(45): n is a, c, g, or t
  misc_feature (54)..(54): n is a, c, g, or t
  misc_feature (62)..(62): n is a, c, g, or t
  misc_feature (130)..(134): n is a, c, g, or t
  misc_feature (136)..(146): n is a, c, g, or t
  misc_feature (150)..(150): n is a, c, g, or t
  misc_feature (152)..(153): n is a, c, g, or t
  misc_feature (155)..(156): n is a, c, g, or t
  misc_feature (158)..(158): n is a, c, g, or t
  misc_feature (161)..(163): n is a, c, g, or t
  misc_feature (395)..(395): n is a, c, g, or t
  misc_feature (477)..(477): n is a, c, g, or t
  misc_feature (599)..(599): n is a, c, g, or t
  misc_feature (1112)..(1112): n is a, c, g, or t
  misc_feature (1158)..(1158): n is a, c, g, or t
  misc_feature (1316)..(1316): n is a, c, g, or t
  misc_feature (1344)..(1344): n is a, c, g, or t
  misc_feature (1388)..(1388): n is a, c, g, or t
  misc_feature (1457)..(1457): n is a, c, g, or t
  Peptide Sequence Number=SeqID_7973
  Probeset Number=SeqID_13533
tctttttttttnnntttgttttttggtngtttcttccgtgctccncattgtttnaggtgtanagtgataatgttggaacacaaatacccccaataatcgatacttcgcgcactctcactccacctccccnnnnnannnnnnnnnnntgtntnntnntntannngctgtggtggcgctcttcacctcttccgcgggcgcggctgtgtcgctgctcttcttattatcgactaagacatatatatgctgttccgtcccgtggtggggtgtgttatgggaaggagttatgctacacccagttcatcactataggtagattagctagaagattccctcaaggataaggaagataatatactagggtgctagtagacagtgacacaggcacctctcaagtncgatatcactcgccccacacccacgtgcgccactagggcgcccctcctatcaatttcttcagagatacacaccagactgggnacctagtgtctctctagacttgagagtctcagtgcgcgttagacgtgtggtgtaccttattatgtgctatagctatcggtagtgttgctgcgccctctggcatctctcagaaacagaccatntacggcacaacggaggacatgttatgtaacagtccctacgttgcgcacgacgctcgcttgctgaccagctccactccgcacagcgcgtgtggctcactgcgctattcggcctcttcagtgctggagcccgcccggtgtttgcggggcttcctcctctgttttagaggacgagtccgctgctttcgtatgcagcggtcggccttagaactcaagagccacgtatcgagcctagccgtgcgtcccgcctctctatccgaagatgtacccgcgcgcgtctggtgttctgtccgacgcgcttcatgtactttccttctcctttctaggtctaggggagtgtcctggatatgcatcgtgtgctatttcatctcctacactgccacatatagcacgcgcccgggcggatgctcgtgacgatcgtagccgccacttccctcctccacggcgctatcgatatgtatcgacaggactccgctcaaagtctctcgcctactcccgccgcgatgcctctcagtnctacggtgtgaggctctctgctgctctgatcttggtgacaccgcgncactgctgtgctcaatatagtatctcatagagctgcgctcgtctgtatgtactgtcctcagatcgtccttgtctctcacgcgcgcttctcctcgtcctcgttctctcgcgccgcatctccgacgacacaacgttacgtatctcagtccgctgcgatancgactactagatcactctcgtatcttgntctcatatcgacgcgtcgtcgttgtcgctcgttcaccgattccngcggtgctactatctatgtcttcttcgcactcgctacgtctgtgtctcgagcatccgatcgtactctan

SEQ ID NO: 3755 - DNA, 469 bp, Glycine max
  Probeset Number=SeqID_13534
aacaagttttctacatccacacaaaaaaggttttccaaacataagcacacatttacagacatggatgatcttgagttattacaagatctgtcccaattcaacttcccagcaaccatcaagatcccatctaaaacctctaaagacaacaaagacggcgatggtgataacgacgagggctttagctgcagcacacccacatctcaagaacacaagattccttctgtccacgattctccacctcccccgccgagaaaacctcgtgcactgccttcaaaaccgtcgcctacggcggctctggtgataagatcgtgtaagaggaagctcttagtgtcggctcctgagattatcatgaacaaggaagagattgaccgtttcttctcctctgtctatagtgacacgtcaacgacggctaaacggcggagacgttatctttattgtgcgcgaagatgagcttttagttcaagattta

SEQ ID NO: 3756 - DNA, 672 bp, Glycine max
  misc_feature (36)..(36): n is a, c, g, or t
  misc_feature (45)..(45): n is a, c, g, or t
  misc_feature (95)..(95): n is a, c, g, or t
  misc_feature (281)..(281): n is a, c, g, or t
  misc_feature (613)..(613): n is a, c, g, or t
  misc_feature (621)..(622): n is a, c, g, or t
  misc_feature (641)..(641): n is a, c, g, or t
  Peptide Sequence Number=SeqID_7974
  Probeset Number=SeqID_13535
gattgcctagtaattaacaatttgatgaaatctcanaatctgatnaatgagctgaaaggaatcattgactttataagtagacatcctataggatntcaaacttgataaataggctttgataccatgtcctgaacctaaactaactatcctaaaagcttaaaaacttctcaataagcactcataagagaagaaaataggaggcaaaaggtataaaatttctcccctaagttaaaatcaatttattctcagcttttagagaagttagatgaaagaacctctanaaaactgatgtgcataagttcattttaacttttgggaggaattttattcctcttatcttcccatgttctttttgtataaggtgttggtgaaaagttcatctaaacaattatgtgcttgctgggttcatctgacaagagacacccccagcttcaaagttctagcaagcactcctaggtcatgcttggaatttggacatgggttggcactttcgaatttttaaggaaaaatcacctcccaaattttggatgtcttcccattttgacaaacatgccagacctactttggtttcgtgctcataaagtccacggcgctccctgcgtcggcaatgcanaaaatggnntgagccaatctgccctcgncctcaaccggaatcttatcataaggtgcagc

SEQ ID NO: 3757 - DNA, 1617 bp, Glycine max
  misc_feature (16)..(18): n is a, c, g, or t
  misc_feature (26)..(27): n is a, c, g, or t
  misc_feature (73)..(73): n is a, c, g, or t
  misc_feature (512)..(512): n is a, c, g, or t
  misc_feature (605)..(605): n is a, c, g, or t
  misc_feature (838)..(838): n is a, c, g, or t
  misc_feature (1055)..(1055): n is a, c, g, or t
  misc_feature (1232)..(1232): n is a, c, g, or t
  misc_feature (1408)..(1408): n is a, c, g, or t
  misc_feature (1423)..(1423): n is a, c, g, or t
  misc_feature (1438)..(1438): n is a, c, g, or t
  misc_feature (1450)..(1450): n is a, c, g, or t
  misc_feature (1578)..(1578): n is a, c, g, or t
  Peptide Sequence Number=SeqID_7975
  Probeset Number=SeqID_13536
ggccattttattcttnnnccacgccnnacattatctatcaatgaacctaagatcccgattctttaccacgagnaagcgcccatattggagcacctctcccacggaccgcgcgatatggcgcgtcccttccagacaatacagaagtggatgtccccctgggtggtgagcaaggatatgttctcgtagaagaaaacatcacttcagaataagaatgcattactccaacacacagaaaagagcttcatatatagccgtattatgagcggccttagcgcacttccattgtgctgtgggtgttataagtggtgagctgtagtatgcactacgtccttgtgctaatagatcgccatcatacgcaaaacgtaacgaataaatcgatagtccaagccctaagaaaaagatagaacacggaccgaggctgtgtacgagtagttcattgttagagccatgtgttggtcccctctctctgggtagcccgcctcattgctttgcgtcgccgtcacacaccaacntgaagatctacacttcctacaaacatagcagaagccgacccatccattggacgcgacagacacatacaatctttataatgcctaatagtcacnatcagtgttagtcttgtatatggtgaattatgtctcgcctgctccacactctcatgcagaatatgatttacccctaatacaatcatattatgattagtagacttagaataattcactacagcgcttcaaatttctccatacacttccccaactaataacctaccgctcaggtagaagagtgagcgagtcggtctgctgtctgtgtagtatgacgagagagacgaacgaaagcntgacgcactgtgcttgctacgcgtcctccattctaaacatctgaaataatcaagaatataactattcgtataattcagtacccactaatctcctccttttgttcccacgtaactaatgtgtgagtgtatagtttatcagtgttacgaagcgagaacatactctagcggtcgtatatatcgtgactctccatttctatcatcgtattatggaccgttntactcacagactcatcatatagatctcccatatcctttatcacgacagcactgtaacatcaactatgttggtctgcctcgtcagctctctttgcgcaacctcacgactctactaacttgtgtccatcttgcagcacacgcgtgtagtctgtactagtgaggtaaacacatccatacnctcataccatctctcagtctcccattgcagcgcacaacgcatatcgaatcacgacctacatctcacacactgcgacgcgcccgcggctcacgcacagctgtatcactcattgcatcttctctctactttatatcccgcgacacctgtgtgcagcgcattattctctatgctcatcnccgcagctatatatnttgatatcacacctngcactgtctctnacttgtatcactatctatgcgataacgactcgtctctatgtcttgtatattatctctctatcttcgtgatgctactctaacactctgtcttgtcccgcatgctcgccatcgctcaccctccgagacancaactgtcgccactgcactcagctctcgctatcgtattg

SEQ ID NO: 3758 - DNA, 1310 bp, Glycine max
  Probeset Number=SeqID_13537
gttctggttctggatgtggataagaaagaaagaaaggatacggttttgtatttagtaaaaacattacttgatcaaaaatgaatagaattccgttttgggccaaagcagtatgtggtttgggtgtgtatgccggaggggcatctattcttaaagaaaaacttggaggcccggctttcgacgccgacgttgaacttggtggaaaagtagcaattgtcactggggcaaactctggcatagggtttgaagtggcaaaagaactagcttcgcgcggtgctaaagtttacctagcctgtcgtgacaaagaccgatgtgcagcagcccgcgaagatatatttctcgctacagacaataaagacatattctgtagatattgtgaccttgcttccttagaatcagtgaagagatttgttcgacgtatccacaaagatgaggagaagattgatctgctggttaacaatgcaggagttatgtggggtccttatcaagcaacaagcgatggctttgaaactcagctgggtgtgaatcacttaggtcacttttttcttactaatttgcttattgaaagtctcaagaaaggtgcacctagtcgtattgtgaatgttgcaagcactgcgcatctcaaaggcaaaataaacacagaggacttaaacagtgccaataactatagtgaaagtggtgcatacaaccaaagtaaactagcaaatgtattgttcactcgtgagcttgcaaaacgtctggatggcacaggtgtaactgtcaatgctgtccatcctggaattgtggataccaatattgttcgtaacagtggatttttcaccaaaatgttaatgtatatacttacaccagttgtttggccgtttattaaaaatccaaaacagggtgctcaagctgtgttacatgttgctctgcatcctgatctcaaacagacaacagggcaatattttaatctacgagaaattagtgaaccatctaaggaagctctcaatgataagttggccttgtggctttggcttacaagtgagaagtggacgaaattgagggagacttgcaaggaattaaatattcaaccactgactcatccgtgggagtcagtgaacaacatttcgatatcagcttctaaactgaagtcaaatactatcagtgtgaatggtatgagccaggtttctcccagcaaaatgacagccaataacgtagcttcctagcacaggcctttgtgccttaaggggcactatgactattccttgtagatgtgatcacacttatttcccctacccttttttgtttgtatttttcaataaatttggtatcac

SEQ ID NO: 3759 - DNA, 1888 bp, Glycine max
  misc_feature (7)..(7): n is a, c, g, or t
  misc_feature (15)..(15): n is a, c, g, or t
  misc_feature (34)..(34): n is a, c, g, or t
  misc_feature (80)..(80): n is a, c, g, or t
  misc_feature (107)..(107): n is a, c, g, or t
  misc_feature (133)..(133): n is a, c, g, or t
  misc_feature (198)..(198): n is a, c, g, or t
  misc_feature (365)..(365): n is a, c, g, or t
  misc_feature (371)..(371): n is a, c, g, or t
  misc_feature (412)..(412): n is a, c, g, or t
  misc_feature (427)..(427): n is a, c, g, or t
  misc_feature (491)..(491): n is a, c, g, or t
  misc_feature (535)..(535): n is a, c, g, or t
  misc_feature (569)..(569): n is a, c, g, or t
  misc_feature (655)..(655): n is a, c, g, or t
  misc_feature (759)..(759): n is a, c, g, or t
  misc_feature (763)..(764): n is a, c, g, or t
  misc_feature (769)..(769): n is a, c, g, or t
  misc_feature (821)..(821): n is a, c, g, or t
  misc_feature (830)..(830): n is a, c, g, or t
  misc_feature (832)..(832): n is a, c, g, or t
  misc_feature (898)..(898): n is a, c, g, or t
  misc_feature (927)..(927): n is a, c, g, or t
  misc_feature (951)..(952): n is a, c, g, or t
  misc_feature (965)..(965): n is a, c, g, or t
  misc_feature (1011)..(1011): n is a, c, g, or t
  misc_feature (1037)..(1037): n is a, c, g, or t
  misc_feature (1053)..(1053): n is a, c, g, or t
  misc_feature (1061)..(1061): n is a, c, g, or t
  misc_feature (1064)..(1064): n is a, c, g, or t
  misc_feature (1103)..(1103): n is a, c, g, or t
  misc_feature (1110)..(1110): n is a, c, g, or t
  misc_feature (1117)..(1119): n is a, c, g, or t
  misc_feature (1121)..(1121): n is a, c, g, or t
  misc_feature (1123)..(1124): n is a, c, g, or t
  misc_feature (1144)..(1144): n is a, c, g, or t
  misc_feature (1170)..(1170): n is a, c, g, or t
  misc_feature (1355)..(1355): n is a, c, g, or t
  misc_feature (1361)..(1361): n is a, c, g, or t
  misc_feature (1363)..(1363): n is a, c, g, or t
  misc_feature (1489)..(1489): n is a, c, g, or t
  misc_feature (1537)..(1537): n is a, c, g, or t
  misc_feature (1549)..(1550): n is a, c, g, or t
  misc_feature (1602)..(1602): n is a, c, g, or t
  misc_feature (1626)..(1627): n is a, c, g, or t
  misc_feature (1629)..(1629): n is a, c, g, or t
  misc_feature (1668)..(1668): n is a, c, g, or t
  misc_feature (1680)..(1680): n is a, c, g, or t
  misc_feature (1703)..(1703): n is a, c, g, or t
  misc_feature (1745)..(1745): n is a, c, g, or t
  misc_feature (1780)..(1780): n is a, c, g, or t
  misc_feature (1782)..(1782): n is a, c, g, or t
  misc_feature (1787)..(1788): n is a, c, g, or t
  misc_feature (1841)..(1843): n is a, c, g, or t
  Peptide Sequence Number=SeqID_7976
  Probeset Number=SeqID_13538
catacanctcgtcgnaagcagatcagcagtggancgcagacagtgcgcagagtgaagatatcaagagagacggcagcaanatacgacatatgcagcagtagtagcantactacgtcactgtggtagtactcgnaacgtagcactacgctcatcacatgagatacagtcacgagtatagtttgatgagactgtgatagnaacgcatgagtcatagtgattagctcgatagtaggcacaccgcgtagtcgagcaggcaggtacgtgatcactgcaaatgattgagtgacagcatagagtcgaacgagagtgatgcgagatgagagtaggtgacgcagagtagtcgacggaacatcattcgctacacngagcgnctcgtgactgctacgcgtagtagttcagtagtatgttaaantcgtcatgtctctantcggcatatcagtgcttgaggcagtgtgtgagtcatcgtcgacgacgatgcgctacattgctcntcagtatcatgcatgcgggtgacatgagcgctctgatgagctgnggtcatctattagtaggtgtcgtgcgtgctacgngcatcgtgctattcgtagctagatatcagctctgtcactgctgagtagtcgtgtgtctctttcagtgaggtacgacaacagctctntcgtggtctgaatagtacatctgagagatggaggagcgtagagtgtgagatatgcgtcatcacatcatcgacagactgtgtagtatagcgggaagtgcagcagngggnngaganggtgtgtggtgtgtcgcgctgtgtctacgcgctataccaacatcatacgtcncttcagtangnccactctgcgcgtagccggtcgatttagctgcgcgatgctatcgcgagacacacgagacagaacgngcgagatgcagatgacgtaacgagatagnattacaggagagatagtacacatnntttatcgtattangatgcacgctctgtatgacagtgtgtgcgtgctctcctctagtttntagcatgtagtagatgtagagatgtngtatctagctgatctnttggactnctntcactagggcagtctgcttgaatacagcacacagatgangttgtcntttgccnnncncnncccgacgagccgccgcacgngcatgtccgtgactgtatcttgctangtattcgatcatatacgtgcgccgtcactcgctgctattgtgcagaggcaacacaacgcagcacgagccgcgcagcggcatcgcagcatctgatctcgtattgatatgtagctgactctatgtggcgcgtggcagtggttgtgttgatgatacgtgtgtgtattaagtgtggtgtgctgtatatntatatntnatatatacataactaacatactacatactagtatacttatatacttcatcacctacccctcgctgcgacagccacgcccgtatgagtatatcttatgagtatatagtcgtatcgctcgagttcatncatacaatcgactgtccatattgcaaaagaagaaataatagttatgangggtgtatgtgnngggtagttactgttgctctctgaggtatactcagctgcttgcaagcatgatngacgactcgtcactacatatacannanacaacaagtagcgtgattatgatggacgtgcacacagcntcaggcgcgccnagctgagtatatcttacggatantacatcagcacgtccctcgcccacacactgctcactgtcgtngtctccacgctcgccatctctccttgaggtcgttntngtttnncggcgcgctctcttctatctacctactatattctccacactctatatttctcnnnaacactcaacaaaatactatatttatatcttatcgaatatattaa

SEQ ID NO: 3760 - DNA, 3102 bp, Glycine max
  misc_feature (1)..(1): n is a, c, g, or t
  misc_feature (61)..(61): n is a, c, g, or t
  misc_feature (67)..(67): n is a, c, g, or t
  misc_feature (74)..(74): n is a, c, g, or t
  Probeset Number=SeqID_13539
nctcgaggctggggaggcagtcagcacactctaatcgctggaaaccggattttatgtttcnttggcnagcgaancatacttgatctttgctaggagaggagagcatgcgggttactctcatttagcagtatatgcacacgaacagatatcaagccatacatagagctggattgcaactctagccggaatcagcaagaagtgagagcatgaactgaggtcagtgctatacatacagtacgcactcgagctgaagtttggactgtcgtaactccactttcggattatcatgaggaagaggagtgatgaatcaacacttccaggctccaaccccttcaccacgcgtccgggattcccgattgatgaagccaaaagagggagtttggggaagttctctcggatgctcaagcgtttgcttaatgacttggaggttcgccagattatgaaggctgagaggttttgtgaagcgaatcagcttccacctgagtatgtttgtgtgaatggacatccactttcttatgaggaattggtaactttgcagaattgccccaaccctcccaagaagctgaagccagggacctattggtatgataaagtatctggtctttgggggaaggagggacagaagccttcacaaattataagtccgcatctgaatgttggaggccccatccaacaggatgccagcaatggaaacactcaggttttcattaatggtcgggaaataacaaaagtggagcttcgtatgttgcagttggcaggagttcaatgtgctggcaacccacatttttgggtcaatgaggatggttcctaccaagaagaggggcagaagaatacaaggggatatatatggggaaaggctggaacgaagcttgtatgtgctttcctgtccctgccagttccttctaaatcttcaaattctttgggagaacaaccctccagtctggctagcagaacaatgcctgactaccttgagcatgggatagttcagaagcttctcttagttggtggcagtggatctggaacgagcactatttttaagcaggccaagattctgtacaaaagtgtcccattctcagaagatgagcatgaaaatataaagctgaccattcagagtaatgtttatgcctaccttggcatgctgcttgagggacgtgagcgttttgaagatgaaagtttgggggatttaaagaaaaggcaatcatctgtacatgatacaacaggaactagtccaaaactggatgagaagactgtatattccattggtccaagattgaaagcattctctgattggttactgaaaactatggtgtcgggcaaacttgatgccatctttccagctgctactcgtgaatatgcaccattgattgaggaattatggaatgatgctgccattaaggctacatacgaaaggagaagcgaattagaaatgctgcctagtgttgccagttatttcttagagcgggctgttaaaatattaaggacagattatgaaccctcagatttagacatcctttatgctgagggagttacttcatctaatggggtggcttgtgtggagttttcatttccccaatcagtgtctgaggaaactgttgacactaccgatcgatatgattctttggtcaggtatcaactaattagggtgcatgcaagggggctaggagaaaattgcaagtggctagagatgtttgaggatgttgaaatggtcatcttctgtgtttccttgactgactatgatcagttttctgtcgatggcaatggttgtctcactaacaagatgatattaagcagaaagttttttgaaaccattgtcactcatccaacctttgagcaaatggaattcttgttgatattgaacaaatttgatctgtttgaggagaaaatcgaacaagttcctttgaccaagtgtgaatggttctctgatttccatccaataatcagtcgcaatcgtcccaacggcaatagcaacagcattaataataatccctcccttggtcagctggcttcacattacatagcggttaagtttaaaaggctttattcatctcttacaggacgaaagttgtatgtgtcgccggtgaaggggttggagcctggtagtgttgatgcatcacttaaatacgccaaagaaattttgaagtggagtgaagagagaccaaactttagcttgagtgagtactcgatgtatagcactgaggcgagttcattctctcattgattgctaattcaggcaagagttgcaagtcatacttgtgtatggcttgacacctgttcgtgtacatatactgctaactcggagtaaaagggatggtttcttctactagctatccacttgtaagatttcactagacgtagacacatgtaggtaaggtttccagcgattagagtatgctggtgagtcagtcggcacataccacagatcatggtgtaatgttcaaattcatttttttttttcatatggtaaggtagcatcttgatcatagaatttgtatatcacttttagtcagtggtctgtcaacttatatttgagttgcaaacctgattctgtgtgctagaaaatacatgatgtattcaagcctaagatattactaggctctctggcttcatcccgtttgtgaatggcataaaaaagacataatattcgtgaaggtcaaaaaaaaaaaaaaaaaagcactcgatgtatagccctgagtcgagttcatgctctcaccttgccgctaattcagagggaagttgctagccataggtcctgtatggcttgatatctgttcgtgatcatatactgctaaattagagtttcatggttggtttcttttttgggctatccacttgtatgaatcgctagacgtagacacatgtaggtaaggtttccagcgattagagtgtgctgattcctttcaccagcatcagatggtaaggaacaaacttagcataaaattgtgcctatcacttttagtcggtctgtcaacttacattggagttgcaaacctgcatctgcgtgctagaaaatacatgatgtatcacggcggtatatcgttcaagcctaagatattactatcctgtttgtgaatggcataaaaaagacataatattcgtgaaggt

SEQ ID NO: 3761 - DNA, 480 bp, Glycine max
  misc_feature (444)..(444): n is a, c, g, or t
  misc_feature (476)..(476): n is a, c, g, or t
  Peptide Sequence Number=SeqID_7977
  Probeset Number=SeqID_13540
aaatcgccattgttgctgcaccactctgattcatttcgattgagtttttggtgtttgtcttgtaatggcgcgtcggtccggagattgcatgagatgtcttgtgatcttcgcggtggtatctgctctactagtgtgtggacctgcgctttattggagattcaacaaaggtttcgttggatcatccactcgtagaaactctgtgtgtcctccttgcgtctgtgattgcccacctcctgtctctctcctcgggattgctcctggccttgcaaatctctcaggtacagattgtggaggtgatgatttagagctcaaacaggaaatggagaagcagtttgtggaccttctgaccgaggagcttaagcttcgagaagcagttgcagatgagcatagccgtcatatgaatgttacccttggagaagctaaaagagctgcgtctcagtatcnaaaggaagctgagaaatgcaatgcggctactnagat

SEQ ID NO: 3762 - DNA, 368 bp, Glycine max
  Peptide Sequence Number=SeqID_7978
  Probeset Number=SeqID_13541
accgggtcttctctgcctcaaagcgcagctgcggcgcccccggccatgccatctggtgggcacgacggtgctctgcttgccgtccgttgtgattctcctcctccagcacatccttggcactcgcggcctggggtcgcggccgccattctttctggtgctcaccggcgagagtgtgccggtggacctccataacggacgtgcgcggcggcgcacgggccggcgctgctcctctacttcgtctctcgtcaggtgatccacatcgccgatccggccgccgccgaggagtgcctgacggcccacgacatcgtttccctcgaccggcccgagctcccctccgcacaccacctccccaatgactctccacgggc

SEQ ID NO: 3763 - DNA, 708 bp, Glycine max
  misc_feature (708)..(708): n is a, c, g, or t
  Peptide Sequence Number=SeqID_7979
  Probeset Number=SeqID_13542
acagcaaacactcaatcaatctcccactcccggcgcaccaaaagcaaggacgtagcacgaaaacacgatggcctgcgccttcttcttcgacgccgagcccggcgtgcacgcgctggacgcgtgcgcgctctgcaccaagccgctggcgcgggacagcgacatcttcatgtacagagtggacacgcccttctgcagcgacgagtgccgccacgagcagatgcagctcgacgccgcctgcgccaggcaggccgccgcccggaggcagaagcagttctcgtcgggaacgggggtccggacgtgcgcaccgggaggcgtccgtcgcgagctgaccggcgagagcggcatgctccgtacgtgcttgagccaacaagatcggcgtgcacgaagacgccatcgcccgtggccaactgatcagcgcggggtcgagaagactcgccttggttgaagaatcaagacgcgtgtcactggagttgttcacggcaggcggcgctgcacgggccaccggtcaagtgatttgggtataaacgcagcggaaaggagctggactggatytgaagaagtcaatcaaacaggattytccmcggcattaggcggccatgtgtgcccctcagctytcctttgtttcggcattgatgtcagttytgtatgagagcgaatttgcagtggcactttcactgtcaatcgaatgaaataagacatgtctttgtn

SEQ ID NO: 3764 - DNA, 502 bp, Glycine max
  misc_feature (502)..(502): n is a, c, g, or t
  Peptide Sequence Number=SeqID_7980
  Probeset Number=SeqID_13543
taatataaaaattgttattttagattgaataattcaaaattttttgaaatggaagttcaaagtgagaaccaacaccctattactagcgaaaatgttgaagacaccaaaagaagtgtttccaaaaagcaagaagctggagaaaaatctcctcctcgctccgtcttaaagagcagaaatagaaacgagcaaggtggtgaacaagacacttctgctgctaaatctaaggtcactttcaaagaaggtgatgagaataaaggatccactgatagagaaactgaaaacactgaaaaggcagagactagaagtgacacccaagaaaaggaaaacccctcaactgaagagaaggcaagaagtcctgccaaagaaaccgaagaaagaactcaagaggggcccaaaagaagcgaagaaaagactcatgacgagccaaaaagaagtgaagaaaagactcaagaacaacctgaaagagctgaagaaaaaaccttgacacctgaaagaccgaagn

SEQ ID NO: 3765 - DNA, 504 bp, Glycine max
  Peptide Sequence Number=SeqID_7981
  Probeset Number=SeqID_13544
gtcacacattgattttgttttcgctgcttatctcaacgtctaatcatcatgggtttgaaggaggagttcgaggagcacgctgaggaagtcaagacgctcaccacgaaaccatctgacgcggacttgctcatcctctacggtctcttcaagcaagccaccgtcggcccagtcaccaccagccgtcctggaatgttcagcatgaaggaaagagccaagtgggatgcttggaaggccgttgaagcgaaatcgacggatgaggccatgagtgactacatcactaaggtgaagcaactcatggaagcagcagaggcttccgccgcttcaacttgatgaatttatatatgattcaccaaatgctccactccaataattccatctaaacttcaaataacttagcataagactttgttcttgttgcttcttgtgttttcatccttataaatctatcatttacattatgacctctgtcttgatttttaaaaattgatcctatggtttcgggtc

SEQ ID NO: 3766 - DNA, 1825 bp, Glycine max
  misc_feature (4)..(4): n is a, c, g, or t
  misc_feature (9)..(9): n is a, c, g, or t
  misc_feature (50)..(50): n is a, c, g, or t
  misc_feature (53)..(53): n is a, c, g, or t
  misc_feature (57)..(57): n is a, c, g, or t
  misc_feature (60)..(60): n is a, c, g, or t
  misc_feature (95)..(95): n is a, c, g, or t
  misc_feature (157)..(158): n is a, c, g, or t
  misc_feature (191)..(191): n is a, c, g, or t
  misc_feature (229)..(229): n is a, c, g, or t
  misc_feature (231)..(231): n is a, c, g, or t
  misc_feature (304)..(304): n is a, c, g, or t
  misc_feature (311)..(311): n is a, c, g, or t
  misc_feature (359)..(359): n is a, c, g, or t
  misc_feature (365)..(365): n is a, c, g, or t
  misc_feature (481)..(481): n is a, c, g, or t
  misc_feature (488)..(488): n is a, c, g, or t
  misc_feature (510)..(510): n is a, c, g, or t
  misc_feature (598)..(598): n is a, c, g, or t
  misc_feature (737)..(737): n is a, c, g, or t
  misc_feature (796)..(796): n is a, c, g, or t
  misc_feature (826)..(826): n is a, c, g, or t
  misc_feature (914)..(914): n is a, c, g, or t
  misc_feature (1014)..(1014): n is a, c, g, or t
  misc_feature (1072)..(1072): n is a, c, g, or t
  misc_feature (1134)..(1134): n is a, c, g, or t
  misc_feature (1139)..(1139): n is a, c, g, or t
  misc_feature (1151)..(1151): n is a, c, g, or t
  misc_feature (1177)..(1177): n is a, c, g, or t
  misc_feature (1212)..(1212): n is a, c, g, or t
  misc_feature (1334)..(1334): n is a, c, g, or t
  misc_feature (1394)..(1394): n is a, c, g, or t
  misc_feature (1396)..(1396): n is a, c, g, or t
  misc_feature (1419)..(1419): n is a, c, g, or t
  misc_feature (1520)..(1520): n is a, c, g, or t
  misc_feature (1536)..(1536): n is a, c, g, or t
  misc_feature (1570)..(1570): n is a, c, g, or t
  misc_feature (1573)..(1573): n is a, c, g, or t
  misc_feature (1647)..(1647): n is a, c, g, or t
  misc_feature (1698)..(1700): n is a, c, g, or t
  misc_feature (1713)..(1713): n is a, c, g, or t
  misc_feature (1747)..(1747): n is a, c, g, or t
  misc_feature (1782)..(1782): n is a, c, g, or t
  misc_feature (1790)..(1795): n is a, c, g, or t
  misc_feature (1803)..(1803): n is a, c, g, or t
  misc_feature (1806)..(1806): n is a, c, g, or t
  misc_feature (1818)..(1821): n is a, c, g, or t
  Peptide Sequence Number=SeqID_7982
  Probeset Number=SeqID_13545
cgtngatantaagtcggcatgtacatcagatggtcagtcgtgtacgtgcnagntcantcnactaataagcagcgccgtatgcatattgtagtacnggattacgtgacggagtagatcctcttctctgtcgcgccaagggcgagctggtgtatatgtnntgtgacgtccgatcgcggtctgttactatactntagtatatatagtatcaggatagcagcgacggacgctncnaacacagactgaagagtgatatacaacgacgcagctcgtctgagatcgacacgtagtcgtcgtctacattgtncacctgntgcgtagcacgtcactctatacgtcgtcgtagagactatcgcacatgntgtagnagctagcatatgatatatttttgacatacactgtatgagagcagatatatatagatactgatacgtgtcacactgcggtacactcactactctcacacgctatcactcatcgcgcnattcgtntactgatacgtgtcgagggctncgcgaggtgagcagtgtgagtagagagtgtactacctcctcttgtatgtgagacgtagactcagctcacatccgcatgtcgtgtacgncaccatagctcgtcatcccccatatgtgatctcacactgtcatctgaatatcataacgatatcgatcacatatcactacagaatctgtgtccttcgcgtcagagcgtgatgcgtatcgctgtatcttctaattcttacnctcacatctatgtatatacgagatagtagacatacactaactgacgattagtacgcacngttacgcgtcgactaatcaactcagtagcnatcctacacgtcacgtacattcagagccagagagcgacagagcgatgcgagaagtgcgtgatgagcgtcattagaggatggtgatgantgtgcgtatcgcccagtgtgcagatatatgagccatccaaagcatgcatgacattctatcttgtgtcagtttcttctctgtgagtggtggttgagtggcntctcacgtgatgcaatactgttgtgttctggtccatattatatctaaattaatatgtnctacaatctatacatcacactgttgaaacgcgtcttcactataccaagtcactaatatatancatantgatcatgagtngtattatatactatatatgagtatanatttgtgtatcgtatgtgtggttcttcacacatcncatcacgtctctactaggggtgcggtagtgtactgattgttgtgcagaacataagctcaactcaatacacacacccacaacacacattatcgtaagacaacattgcggcatcactaaacatnccatatcgctcatcttggatggtatatatatttccgtaactatgaaatcgaggataggangnaaagcaccagtaatcgcgagcantacgtggcgcggcggggtgttgaggtgcatgcggtgatgctattcgaggtcgtcacgatggcctacttacatctaatctaactcagcgtggctgagggtgngcgcgggtatttcatnatagacacccctctcagctaccagcgactcacanccnaacaggagaggcaggcagaggccgtaatacttatatatatgattatacttaatatgtactcgtgttgtacactncgtcttcgtcgttcatcaagttatcaatcatctagttaccgagaagaggtnnngagagaggcacanaccaaaaatccatagtagaaagggagtagatagnggtgtggaggatagagaagtagaaatgaatggtgnacaaatannnnnnaaaaaagnaanaacaaaaaaaannnncccc

SEQ ID NO: 3767 - DNA, 478 bp, Glycine max
  misc_feature (379)..(379): n is a, c, g, or t
  misc_feature (455)..(455): n is a, c, g, or t
  Probeset Number=SeqID_13546
tcaactcatccatcttctttccatgccacggagccagagctgcgagacaaagtacttgcaacaaaaaagcaccagagcccacacggatccggcgatgggagcggcggtgaagcgcgcgagggaggaggagccggtgtcgctggcgctggcgctcaccacggattcggcggcgtcgtccaccacgtcagccgactcggccggcgcgccggcggcgtccaggaagagggcgcggcggggcagagtggtggccacgtcgggggagggcgagttcgtgtgcaagacctgcagccgggccttcgccacgttccaggcgctgggcgggcaccggaccagccacctccgcggccgccacgggctggagctcggcgtcggcgtcgcnagggccatcaaggagcggaagcgtcaggaggagaagccgcacgagtgccacatctgcgggctggggttcgagatgngccaggcgctcggagggcacatg

SEQ ID NO: 3768 - DNA, 1607 bp, Glycine max
  misc_feature (61)..(61): n is a, c, g, or t
  misc_feature (273)..(273): n is a, c, g, or t
  misc_feature (282)..(282): n is a, c, g, or t
  misc_feature (518)..(518): n is a, c, g, or t
  misc_feature (662)..(662): n is a, c, g, or t
  misc_feature (801)..(801): n is a, c, g, or t
  misc_feature (1010)..(1010): n is a, c, g, or t
  misc_feature (1301)..(1301): n is a, c, g, or t
  misc_feature (1327)..(1327): n is a, c, g, or t
  misc_feature (1426)..(1426): n is a, c, g, or t
  misc_feature (1491)..(1491): n is a, c, g, or t
  misc_feature (1574)..(1574): n is a, c, g, or t
  Peptide Sequence Number=SeqID_7983
  Probeset Number=SeqID_13547
cttaccaccttttctttttctacaccccctttttactttttttccttttccccccgggcgngcaccggtaaagagttgcgtgttagaacttttgtctgaggagagttgacaatgcacagaaataattgcccccttcatattgtcctgttgcgtacacacctatttgtatcccccacccgacgccgtgttgacgccagtgtgagccctggccaccgtgttggtgtttttttttgtgatacaaacgcacgttgatgcagctgagcgcacgacggnccgagtgtntgtgagtgcgagcgagggagaggagagtgcaggcgatgttcgaggaactatctgcgcagcactcatggaggagacgttctatcagacttggcgcgatacgatgcatctcgaaaaaagtgtaaggagacgggtaaccaagtcgtcaagagacagagagctcgtccgaattgaagacctggggatatatgacgggtagtcataatatcgacgcaaattctaacatttgaccaacacgntcaaggatgcaaacgccaccacacggtgtgcgacaaatgtgttgacaccgcgattgtccaccaccctcggtgttgtggtataggaggctcagaggacgtttcagacaccctgtttggcagagacgagtagagcaagcagagttngagcacacggatgcaacatttatctgacaccgcacggacactgtgtggtttgtgttctttcgtccttccacgccctcgttgacgacacgcgcacggttgatggacacgaacaggttaacagctacgccctggccagatntgtaggacgcgtgtagcgacacacacagtgcgattacgagaccacaccagctttggtcaccgtgtcacaagcgcgcgatatacacgacgtggtgtgtagcagcaacgatttcgcgtgtacactctgtgattttctcattgacacactgtgattcagtgcgataccctaccactcatctttctcgaacgcttttctgtccacggttattnttgagccccacttgattctgcaacgacacagggagcgtgtcgatggcatggaaatgatatatcaccatgatagaagtttcagctatagcggtggtggacgcgatgtgagggaatttgagagcggccacaacagtatagatatgctcgccgttctgcgcggagtgagacgagagcgtgggggaacatacaaaggagcagagcgatatacacgaatgtgttttgctccgccggtcgccctgaggaacaatgtgagtagtgagagtcggcggacgcttgtaccatgccctaacnttagtggtatgtgggtcgaagatcanacgcgcacgaatagcgtgttgttaccacactacgacccacgatgccgtgagttggatcttacgaatctatcacacgcgctatggtatgtcacacacganatcgtgctgcgcacatatgcgtatagacacgagtcgctcgcgcatagtgcgccactcttgacttntgtagtatcgtgacacaccacacacgtgtctatgtggtgtggttataacacgcaccagccgctctttggctgcgacgagcgangatatcgcgcgcgccaggtacctgtcgactgcg

SEQ ID NO: 3769 - DNA, 1528 bp, Glycine max
  misc_feature (172)..(172): n is a, c, g, or t
  misc_feature (439)..(439): n is a, c, g, or t
  misc_feature (507)..(507): n is a, c, g, or t
  misc_feature (823)..(823): n is a, c, g, or t
  misc_feature (900)..(900): n is a, c, g, or t
  misc_feature (951)..(951): n is a, c, g, or t
  misc_feature (1011)..(1011): n is a, c, g, or t
  misc_feature (1065)..(1065): n is a, c, g, or t
  misc_feature (1068)..(1068): n is a, c, g, or t
  misc_feature (1070)..(1070): n is a, c, g, or t
  misc_feature (1209)..(1209): n is a, c, g, or t
  misc_feature (1239)..(1239): n is a, c, g, or t
  misc_feature (1318)..(1318): n is a, c, g, or t
  misc_feature (1413)..(1413): n is a, c, g, or t
  misc_feature (1417)..(1417): n is a, c, g, or t
  misc_feature (1470)..(1470): n is a, c, g, or t
  misc_feature (1528)..(1528): n is a, c, g, or t
  Peptide Sequence Number=SeqID_7984
  Probeset Number=SeqID_13548
cctccccacccacgcgcctcccccgtcccgccttcgcgcctcgtcagccgccccgcccgctactcaccgtacgttgtactactggctgatgctcacgcttaagtgggtgacgcagaactactactgatctcagcatccacgccccacgcgcgacagcacgtgtctatatgtnactcactgcgatcctgtttcgctcgcgttcgtcgtgtcccatctctaatttattctatcacgtcatcacttcgctcatctgtcgtactagacttgctttctacgcgtactcggcctgtgccagtatgcactctagtccctccgccgcttgggaccgtgtgtggtctatctgacgccctcaatcacacgcctcagacgtagacgtgagcagcgagtaacgacatgtggacgagaggagagaactcgccgtgcatgagcccccgcgtgngtggttagagacctaacgacggtatgcaacgcacctttgggtgctcgcacagtctcccacagagcgcntccgctgcactgtctgttatcttgcgaccaccacgcggcatcacacgaatagtgtagagctggtagtagtgcagaaaccgccgcactgttggcgcggcaatatcctcgcattggggaggcaagcctaacgagtaacgaagctctcacacggttaccggaccatgatacctatcgatacgcgcacgaatcagctcgagatgttgacgatctatcgtgacggatcgtatgaagtgttgagaccggcgcgctgacaccatacggtgtgcttgctcgtgacttttcactgtcatactcatgactgtgcgaatatcacacntcatacacagtcctggacgtctataagctcgtgcactctcgccatctgcatcgctatacattgcgattttgtgtctnatatcctatctcgcgactgatgctcctcacgaactcccacgcgcacacgcngcataaccaagctgaagagttatgctgcactaacgacggaccgacgcaccacggtatatntatgcttatattcgtgtaccgacgatctgtctactcgctctagctctagctccncancngcttatcttcatattgatatataagcgtatccctaccccactacagcctacagtaatctattcgtcatatactggtgccgctcccatgtctcgtggatacctcgagcgcgacatcgacgactaaatctgacgtactaancgttactactcctcgataactgtcaagttncacttgctgacgtccactatactatcagtactcacccacactcagcaactgtctaatcatatgatctgtagacacctgnacattgagtataatcaactgcatgtgtagctctctgcgcctaccttccgagatatgatcgacactggcacgcatctctacgctacacgcataaantcgnttgcacggcgtatatgactgcagccgtgatgtcatcgtgagtcggcgtatcgnctctcgcgctcactatccacacgacggttcatctctatctcgcgtcgcgcacgactcn

SEQ ID NO: 3770 - DNA, 550 bp, Glycine max
  Probeset Number=SeqID_13549
gacgctgacacaaaccacggtgccctcatacgcagacaaagccgccactggaggcgccccctaccacaccactgataagcctctgcgtgatagagtactgctcaagatctaggacgcacaggacaacactgcatgtgggatctgactgccaccccctgctcaaagcgacccgcaaggaggagaaaggaatgctgatgcggacgtgaagacggttgggaagagcacagaggatgtcagcgagaatacaggtgtgcaggtagagcattcaaagaatgcaacgactgacggggcgtatattggatcaaaacgatcgattcagaacgatatgacatcggtggcattctcgcaacatatgagggcaaggatcttaagcccataaatgatagagtcttcgaataggatacacaagcggatgcataaaccgccaggggtgtaggtcctcacaaagccacctcagaatagcccatcctatgcaacatggcaccttacatgtcataccagggcgggccggagtcctctggatgaagaagagaagacaaagccattgtca

SEQ ID NO: 3771 - DNA, 236 bp, Glycine max
  misc_feature (216)..(216): n is a, c, g, or t
  Peptide Sequence Number=SeqID_7985
  Probeset Number=SeqID_13550
atgcctgcagggtgcttaccatagccgatgcctatcttggccgttattggacctttgtaatagcatcagccatttaccttctgggaatgtgtttgttgactctagcagtgtcactaccagcattgagacccgcaccatgtgctcccggcatagcagacaaggattgccaacgagcattcgtcgttttcagtggggaattttcttcttttgccttgnacatcattgcagcaggcaca

SEQ ID NO: 3772 - DNA, 296 bp, Glycine max
  Peptide Sequence Number=SeqID_7986
  Probeset Number=SeqID_13551
tgccctgtgtccttacagtaaatatggcgattggttatcataggatctctcagcagggggctatctcagagataatcccatctaatgaagaaatggcaggcatgaatgtcttgcgacgttaaggaaaagggaccgtacgcctaaataagctttctgttccaatattcttgattgaggttttcccaaaaggagtggatgcggatactgtggttttgatggcagctcaagcttcaagacttgagaatcaagatgcaatagacactgccatagttggaatgttggctgatccaaaagag

SEQ ID NO: 3773 - DNA, 655 bp, Glycine max
  misc_feature (655)..(655): n is a, c, g, or t
  Peptide Sequence Number=SeqID_7987
  Probeset Number=SeqID_13552
ataacaaaacattttctcttctccttacagtttcagttttttcgagatgtacaatgaatgcagttctccttcttccgctagatcaacgagaagtactacccacagaatgagatctccgatctgctgcctaggagccaacgcggtggttgaacctgaagcgatgatcggaccgagaacacctcgatctccttacgagtggctcaaatccacggcgcaggagctcgagctcagagaacgttgccgccgggtcaagacacgcgtcaaggttacgtgccgcaacaacaactgcgctcatcacaaccaccaccaccaccagagacaccagagccagagctatcctgtggatttcagctacgatgcgttgagctacgccctcaatttcgaggacgatgtacgtgcggacgaggacggttctttccctaatttcacggcgaggttgcctgcatctccggttacaaagcctagatcggcgagggttgatctgatctcgttctgaccgttaagtagtagtccctttgttcgtgtgacggcgaaatgtgaatgttctccgttgtgcttatttgagaaataacgtacgagtatgacgtcattattgtctatgtaaatgctctttcgcatattgataatgtgtggaaaaaaaagaatcattttctan

SEQ ID NO: 3774 - DNA, 745 bp, Glycine max
  misc_feature (674)..(745): n is a, c, g, or t
  Peptide Sequence Number=SeqID_7988
  Probeset Number=SeqID_13553
tcagcaacgtaggcccccccccctttagataagaatcttgatcatatggcgatgttgaaggatgtctcacctattagtcacaagactgatatgttgaaaggaggatcattatttgaagatgttagcttgattggaagaagtggaagatcaacacaaaaaggaagtatctctcatatcaaaagagatgcatccacaaatactgaaaaaactgtcgaatcacttgaagagacaccaaagccaaagaagcagatgcctcaagtacatatgtttgctgcacaaaaagaagtaaagaaaccactaagaaatctaggagaaagaaaatggtccaatgataaactgagaaatggattttcgaaatacatgaagacaatatatggagaaaacaactataacgatccggtttctttggttgttcagacagaaccaggctatgatgagttaagtggacatatgacttcagtttatgaagagagatatttgaaccttctcaatagagaattaagacaaaagaatctcaagagatataatatggataattctgattatcatgatttagcctttgaaaaagagattctggcagccaaatatcacactttcgctcagtatgaagaaaaagattcttctcaacccgaacaacaatctccttctccagaacaaacaatcaaatctgctcnnnnnnnnnnnnnnnnnnnnnnnnnnnnnnnnnnnnnnnnnnnnnnnnnnnnnnnnnnnnnnnnnnnnnnnn

SEQ ID NO: 3775 - DNA, 456 bp, Glycine max
  Probeset Number=SeqID_13554
atttcctcttcgtcgccgtctacgaaaactctacagctcctcctccgatattcattcaataacttccgcaaaaatgaaggttgtcgctgcgttcttactcgccgttttgagcgggaaagcttctccaaccagtgccgatatcaaggacatccttggatcagttggggctgaaaccgaagatgctcagattgagcttttgttgaaggaagttaaagggaaagactgtgctgagctaattgctgtcggaagggagaagctagcttctgtcccgtgcggcggtggtggtgttgcgatggcttctgctccatctgctggcggtggaggaggtgctgctcctgcggctgaggccaagaaggaagagaagaaagaagagaaggaagaatccgatgatgacatgggtttcagtctatacgagtaagcgggtattacttggcttctatttttgtcttcaccttt

SEQ ID NO: 3776 - DNA, 1506 bp, Glycine max
  misc_feature (1)..(1): n is a, c, g, or t
  misc_feature (29)..(29): n is a, c, g, or t
  misc_feature (58)..(58): n is a, c, g, or t
  misc_feature (70)..(70): n is a, c, g, or t
  misc_feature (173)..(173): n is a, c, g, or t
  misc_feature (176)..(177): n is a, c, g, or t
  misc_feature (220)..(220): n is a, c, g, or t
  misc_feature (303)..(303): n is a, c, g, or t
  misc_feature (312)..(312): n is a, c, g, or t
  misc_feature (317)..(317): n is a, c, g, or t
  misc_feature (330)..(330): n is a, c, g, or t
  misc_feature (440)..(440): n is a, c, g, or t
  misc_feature (910)..(910): n is a, c, g, or t
  misc_feature (1000)..(1000): n is a, c, g, or t
  misc_feature (1148)..(1148): n is a, c, g, or t
  misc_feature (1180)..(1180): n is a, c, g, or t
  misc_feature (1214)..(1214): n is a, c, g, or t
  misc_feature (1221)..(1221): n is a, c, g, or t
  misc_feature (1263)..(1263): n is a, c, g, or t
  misc_feature (1362)..(1362): n is a, c, g, or t
  misc_feature (1398)..(1398): n is a, c, g, or t
  misc_feature (1506)..(1506): n is a, c, g, or t
  Peptide Sequence Number=SeqID_7989
  Probeset Number=SeqID_13555
nttcctttaatttaacctattcttttttnttaagaaacggccgcgcaattgggaatgnataagagtcganagaaaagaaagaggaaaaagaaaagaggaaggaagagggagcgcggggaggaagagggaggaagaaaggttccaaaaaaaagaggggagaaaagaagaaaaanganngttgttttccccaaaaaagagaggagagggaaaaacagaagangacgagaagaacgaagaaacagcacgagacagaaacaaagaacaaaaccgcgcccgagaagaacagagagagggagggagaancaagaaganacganagagagaaagganaagaacaacgaaaagagagggaggagagagaaagagcgcgcaagaggaaagagaagaacgagagaaggccgaagaggagagaagacaagagagaaacaagagaagagaanacaagggcacgagcgagaggaggaggggagacaagagagcgggagagaggaaagggagagcgaaacgaaaaacacaagacaagagcccccagccagcaacggagacaagacagcgaggagagaaacacaagcaagacgcaagaaaaagaaaggagggagaagagcgagaaaaaataacagtgacaacgcgggaagaaagagaacaagacaagaaagacgaggaggagacggagaagacgcgaaggagggagggaagcgcgcaaggacccaagaagagagcgagcgagggagaggaaaaggaaagaaggaaacgagcgggggagacgaaagcggggcaccgacaacgggtagcagaaaaggagcaaaaagcgcacaaaccgaaacagaaaagagacagacggtgaacgcgagaaagcgaacgaaacaagagcagagaagaaagaagaagaacagagcgaagcacgacgcgnggcaaagaaggaggcagagcggagagagagagaatgaggcgcgaaggagcaggagagagaagagcggagagacgtgacagcagagagacnataagaagcagagagtggcgcgcaaacggggagaacagagagagagaaccaagaggcagacgcacagatagagcagagagaaagaggagagacaggcagaaaggacaggaaaaagagcaggaaagcgacagacaacagagagagagcngacggaaagcgcggagaggcgacacagacgcntgaagaagtcataagggatgcgaaggcggcaganaggcagncgaagagggagaagaaagagagagaatcggcgaggaacaaanaaggcgcgagcgaggacaaacgacaatcacaagcgagacaagaacaagaacaacaaacagacacaagatagaaacaagatgaacacacgaagagaagcncggggacagagcatgcaggcaggacaaatagagacnagagggacgcgagaggagaagacgaggacggagcagaagacggggaacagagggagagagagagagaggtgagagcgacgagcgcgaagacaaagcgagtgagaggan

SEQ ID NO: 3777 - DNA, 390 bp, Glycine max
  misc_feature (41)..(41): n is a, c, g, or t
  misc_feature (336)..(336): n is a, c, g, or t
  misc_feature (357)..(357): n is a, c, g, or t
  Probeset Number=SeqID_13556
aaaaaatttcaaaccaccactcagatccttagacgaagaanaaaggattgttgaaatcgaagatgtcatcatcatcacgtgaagagaatgtgtacatggcgaagctagcggagcaagccgagcgttacgaagagatggtggagttcatggagaaagttgccaaatctgttgacaacgaagagctcacagtcgaagagaggaaccttctctccgtcgcttacaagaacgtgattggagcgaggagggcttcgtggaggatcatctcttccatcgagcagaaggaagagagcaaagggaacgaggatcacgttgctatcatcaaggactacaggggcnagatcgaagctgagcttagcnagatctgcgatggaatcttgaatgttcttgaag

SEQ ID NO: 3778 - DNA, 423 bp, Glycine max
  Peptide Sequence Number=SeqID_7990
  Probeset Number=SeqID_13557
gtaaccaactcattattgttatcgtctcaattacacttcgttcatatacttttctttgcctttctagagagttcatcagagatggctggtcgaggaaaacaactcggatctggcgcggcgaagaaggctacatctcgcagtagcaaggcggggctccaattccccgttggtcgtatcgcccgattcctcaaggccggaaagtacgccgagcgtgttggagcaggagctccggtttacctcgccgccgttcttgaatacctcgccgccgaggtgcttgagcttgctgggaacgcggcaagagataacaagaagactcggattgtgcctcgacactttcagcttgctgtgaggaacgacgaggagctaagcaagttacttggagatgtgacgattgctaatggaggagtgatgcctaacatccac

SEQ ID NO: 3779 - DNA, 470 bp, Glycine max
  Peptide Sequence Number=SeqID_7991
  Probeset Number=SeqID_13558
attttcctaagttttgcactttcttctcgtctcagcgcctcacacccttgtttctttcttctctttctttctctcacaaaaacaaaacaaaccccaacaacaacgcttcttccatttttagccacaacccaatctaccaaaaacacacgtacgaggaaacaggcagcaacaacgttattttttgttttagtgtttgctcttgctttgtccacgtccgttacgcaaaaaggctctaaatagaggccaatgagaacggaaatgaggtaatgatgatttgtgagcatttataagccataaaacaccctccttccttcgttttcgtataacaacgatcgtttccccttcatcttctctccctctattcctctgtttttacgttcttgtcctttttattttttattttattcttttcctctgtccacgagaagagtctcgcgaggttgctatgtctccaatctctccacacgctt

SEQ ID NO: 3780 - DNA, 1843 bp, Glycine max
  misc_feature (1)..(1): n is a, c, g, or t
  misc_feature (80)..(80): n is a, c, g, or t
  misc_feature (157)..(157): n is a, c, g, or t
  misc_feature (211)..(211): n is a, c, g, or t
  misc_feature (243)..(243): n is a, c, g, or t
  misc_feature (249)..(249): n is a, c, g, or t
  misc_feature (256)..(256): n is a, c, g, or t
  misc_feature (263)..(263): n is a, c, g, or t
  misc_feature (359)..(359): n is a, c, g, or t
  misc_feature (361)..(361): n is a, c, g, or t
  misc_feature (364)..(364): n is a, c, g, or t
  misc_feature (390)..(390): n is a, c, g, or t
  misc_feature (450)..(450): n is a, c, g, or t
  misc_feature (482)..(482): n is a, c, g, or t
  misc_feature (495)..(495): n is a, c, g, or t
  misc_feature (501)..(501): n is a, c, g, or t
  misc_feature (692)..(692): n is a, c, g, or t
  misc_feature (898)..(898): n is a, c, g, or t
  misc_feature (1009)..(1009): n is a, c, g, or t
  misc_feature (1252)..(1252): n is a, c, g, or t
  misc_feature (1440)..(1440): n is a, c, g, or t
  misc_feature (1458)..(1458): n is a, c, g, or t
  misc_feature (1540)..(1541): n is a, c, g, or t
  misc_feature (1553)..(1553): n is a, c, g, or t
  misc_feature (1591)..(1591): n is a, c, g, or t
  misc_feature (1616)..(1616): n is a, c, g, or t
  misc_feature (1624)..(1624): n is a, c, g, or t
  misc_feature (1628)..(1628): n is a, c, g, or t
  misc_feature (1682)..(1682): n is a, c, g, or t
  misc_feature (1684)..(1684): n is a, c, g, or t
  misc_feature (1704)..(1705): n is a, c, g, or t
  misc_feature (1715)..(1715): n is a, c, g, or t
  misc_feature (1721)..(1723): n is a, c, g, or t
  misc_feature (1735)..(1735): n is a, c, g, or t
  misc_feature (1738)..(1738): n is a, c, g, or t
  misc_feature (1741)..(1742): n is a, c, g, or t
  misc_feature (1744)..(1744): n is a, c, g, or t
  misc_feature (1750)..(1750): n is a, c, g, or t
  misc_feature (1757)..(1759): n is a, c, g, or t
  misc_feature (1762)..(1762): n is a, c, g, or t
  misc_feature (1764)..(1764): n is a, c, g, or t
  misc_feature (1766)..(1767): n is a, c, g, or t
  misc_feature (1773)..(1773): n is a, c, g, or t
  misc_feature (1779)..(1779): n is a, c, g, or t
  misc_feature (1783)..(1784): n is a, c, g, or t
  misc_feature (1796)..(1796): n is a, c, g, or t
  misc_feature (1808)..(1823): n is a, c, g, or t
  misc_feature (1828)..(1835): n is a, c, g, or t
  misc_feature (1840)..(1843): n is a, c, g, or t
  Probeset Number=SeqID_13559
ncgcgcaaagcgatatgcgcagagtacgacgcgcacgcgtaccgaccctaacgtgtcatgccggataattaccgacattntgctacgtcgtcgtctcatgccgacatagtattacaacgtgtaggtcgttgtgtgtcgtagcgtaccttcatatatnagctaactcgcgtgtgtgtgctgtacaactgcgtcgcgtcctcatagcgtgtantctctacttgagaatcctgtacacttgtggtngctctncagttcnggatatnattatagcctcttcgctgtgcgtgagtgtgtgcgtgcttacatcaacgacagtccgtctcagacgtttcagtgtgcgagtagattgtatcgtcgtntngtnggggagcagagatgggtgcagatagngtctctgattcttagcattatctctagggagtgtgtgacgggtcgcggatacgcgacgcnatatacaggatcataacttacaagagaacgtngtgtggacatgcntcgctncatgtattatacacacatcaatacagacgtacacgcatcatgactcccgtgatacaaatacacatattatagactatcgagtgtgtgatcgctacattcgtgggtatcggtgttatcggtacaaccaaacgatgagcgtcacggtgcgagacgtgataaggcgtcttgagtcgacgtcgtaatattcatancgatcacccatcgactaatataaatacgctcctcacgccatatatgcgagagcgtatggaggcgtataatataataatacgcagtgcatcgagttacaattatcgaatcagctaatacgtatcgtatagtcaactcatccatctcatctaccggacgcactagacaattctaatctatgtcgtcgttcacatttagcatactctcncactcagctatgttgcacacgtgtgtagtatttagctaatatcatcacgtcagatacaatatgtgacgctaagtagatttcgagtttgcgtcactcacaagtgtgtgtcanatatagctgcgcggtcgcttcggcctgatagtgcctcataactcacgaggcgcggcagaaagagtatggtataggtcctaaccagccgtcacagatctagagtgcggtggagatcatagagcggttctattgatgagcgttatgttcgtggggttaacactccagataaaatcaaccatcctagtatacaataccttctgtcacgaggactatgtgcatcttgccattatgactcgctgtcgnacgatagacatacacagtgctacatctaagtcatagaggcgtaggcgtacgcaccgatttagcggtacgcaagattctacgaccaaagcccgtaagcgctcatcatctcgtagcaatgtagtgtattcatcacacctactatacaacatgcgcgattgacactatgtcactctcgcatcaacagtccncgaactctcactcacaanacaaacaacccacaccgcagcacaccacatatcactcaagaccacgctcatgctctactcctatataccgcagcacatctcnntccgccgcccancccacacactcgtcgctcctttcctgcgtccctgtgcngggagacacaggcgtcggtgcgtanttgtaatntaanaacatatgagagtattacgtccagtgatgatagatatcaaacaactagtaatcnanaaaacacagacaataaaaannaaaaaacaanataaannnagtaaaaaaacntanggnnanaagtanactgccnnngcnananntcaatnagtaantatnnataatattttanttacaaactttnnnnnnnnnnnnnnnnaaaannnnnnnnaaaannnn

SEQ ID NO: 3781 - DNA, 444 bp, Glycine max
  Peptide Sequence Number=SeqID_7992
  Probeset Number=SeqID_13560
atgcctcagctcgcaaaaaggaagaccggtgcacagttgaacattttaggatatacaacaacgagaacgcttgaacgacgcgcacaggtgtgcacggccacagctaccttgtacgatcgaagcggatccatccagcacagtgcagccgtgcagtatgcatgtgagaccgccgtgctccacgagtccacgtccacggctgcctcgctctcggctcgcaggacacatgcactaatcacccgagcccgcgcgcggcggcaagcaaggggacaacgacgacgcattattgcttgttggcagcccgtgaccccgggctggcacacatgcatgctgccttttttctttttcgcgtccgtgctgcatgctcgtcagtttggccggactcgctcggcgccgcgggcgagagggatcgagagggaggtaccgagccaagggaacagaacaggg

SEQ ID NO: 3782 - DNA, 409 bp, Glycine max
  misc_feature (385)..(385): n is a, c, g, or t
  Probeset Number=SeqID_13561
gaaatcccaagggctgctccggtcatctccatggcctcgtcaggccgccgccttagccgtgcgaccatgccacacggccgaccggatggagggagcgtcgcgcctcgcgttggagggcgcggaggtgtcgccgggagagcttgtgcgccgtggtggcgctccgtcggcgagaggagcggcgtatcacgcgcctgaggggtcggagggccatcgccggcctgcgcggttgcgagccgagggccgcggcatcgcctcggtcttccacgccgcgtcgcggagcaccgaggctgccgtctgcgacttgcgcagtgggagggcgtgtagccaagcacaacgccagggccgatggccacggcacgccgagaggagcaccgtcgggccgagngctgctgcatgctcctcgctggga

SEQ ID NO: 3783 - DNA, 2120 bp, Glycine max
  misc_feature (1)..(2): n is a, c, g, or t
  misc_feature (11)..(11): n is a, c, g, or t
  misc_feature (13)..(13): n is a, c, g, or t
  misc_feature (19)..(19): n is a, c, g, or t
  misc_feature (24)..(24): n is a, c, g, or t
  misc_feature (28)..(30): n is a, c, g, or t
  misc_feature (32)..(32): n is a, c, g, or t
  misc_feature (34)..(43): n is a, c, g, or t
  misc_feature (52)..(52): n is a, c, g, or t
  misc_feature (60)..(60): n is a, c, g, or t
  misc_feature (62)..(62): n is a, c, g, or t
  misc_feature (70)..(71): n is a, c, g, or t
  misc_feature (78)..(78): n is a, c, g, or t
  misc_feature (80)..(80): n is a, c, g, or t
  misc_feature (84)..(84): n is a, c, g, or t
  misc_feature (88)..(88): n is a, c, g, or t
  misc_feature (92)..(92): n is a, c, g, or t
  misc_feature (98)..(98): n is a, c, g, or t
  misc_feature (108)..(115): n is a, c, g, or t
  misc_feature (146)..(146): n is a, c, g, or t
  misc_feature (155)..(155): n is a, c, g, or t
  misc_feature (258)..(258): n is a, c, g, or t
  misc_feature (323)..(323): n is a, c, g, or t
  misc_feature (368)..(368): n is a, c, g, or t
  misc_feature (385)..(385): n is a, c, g, or t
  misc_feature (533)..(533): n is a, c, g, or t
  misc_feature (541)..(541): n is a, c, g, or t
  misc_feature (554)..(554): n is a, c, g, or t
  misc_feature (592)..(592): n is a, c, g, or t
  misc_feature (634)..(634): n is a, c, g, or t
  misc_feature (863)..(863): n is a, c, g, or t
  misc_feature (919)..(919): n is a, c, g, or t
  misc_feature (951)..(951): n is a, c, g, or t
  misc_feature (968)..(968): n is a, c, g, or t
  misc_feature (1061)..(1061): n is a, c, g, or t
  misc_feature (1103)..(1103): n is a, c, g, or t
  misc_feature (1162)..(1162): n is a, c, g, or t
  misc_feature (1194)..(1194): n is a, c, g, or t
  misc_feature (1272)..(1272): n is a, c, g, or t
  misc_feature (1303)..(1303): n is a, c, g, or t
  misc_feature (1330)..(1330): n is a, c, g, or t
  misc_feature (1426)..(1426): n is a, c, g, or t
  misc_feature (1447)..(1447): n is a, c, g, or t
  misc_feature (1557)..(1557): n is a, c, g, or t
  misc_feature (1627)..(1627): n is a, c, g, or t
  misc_feature (1638)..(1638): n is a, c, g, or t
  misc_feature (1651)..(1651): n is a, c, g, or t
  misc_feature (1714)..(1714): n is a, c, g, or t
  misc_feature (1717)..(1717): n is a, c, g, or t
  misc_feature (1735)..(1735): n is a, c, g, or t
  misc_feature (1785)..(1785): n is a, c, g, or t
  misc_feature (1808)..(1808): n is a, c, g, or t
  misc_feature (1892)..(1892): n is a, c, g, or t
  misc_feature (1948)..(1948): n is a, c, g, or t
  misc_feature (1972)..(1972): n is a, c, g, or t
  misc_feature (1993)..(1993): n is a, c, g, or t
  misc_feature (2004)..(2004): n is a, c, g, or t
  misc_feature (2032)..(2032): n is a, c, g, or t
  misc_feature (2054)..(2054): n is a, c, g, or t
  misc_feature (2070)..(2070): n is a, c, g, or t
  misc_feature (2095)..(2095): n is a, c, g, or t
  misc_feature (2109)..(2109): n is a, c, g, or t
  misc_feature (2120)..(2120): n is a, c, g, or t
  Peptide Sequence Number=SeqID_7993
  Probeset Number=SeqID_13562
nnggttggttngntttttnttggntttnnntntnnnnnnnnnngtcgtgcgngtcgctgngngtgcgctnngccgcgngncgcngcgntctngctgcntctctctccnnnnnnnngcgcacttgtgcgatatatgtatgttataantgctctgtnagactgagctagcagagagctagactactactctacagaggacgatatgagtatgatatattctatctatcgtgcacaggcattagctcgtctgcggctgtgntgtcacatctgtgtgcgtggatggtgacggaagctatcgtactacgactcggctcacgcgtgatngagcatctactcgacgcgtgcactcatcatgttctcttgtcgcancagtcctcactctctcnccacgcgtcgctgctgcgcgtctcgccttcgcgtcgagcatcgaccgcataagattattgtcatatatctgccacgacacgagtctacacgagagtgacacagaacgccatatcaggcacgtattctagaacgccatatagtattatnatcttctnattactcgagctnactcatacactatgatatctatcgctcattctatctcnatgcgacgcacgtactatctactctctcacatgatcgtacantatcgactgattctattgctctctatatactccacgtaatgactcgttcatatcatacgccgcagctacgtgccgtctcgacgtgagcgtgacgccggcctgtcgcatctgatcatgtctctccacgctcgcgcgctagaactctcacgacgtccgaccgtctacgtccgcatcaacgtgtaggtcgacgacgggtgcgtcgttgcgtcagtctccgagacttgtgacngtgtgcgcacgcttgttgtatgttcgagacagagaacgcacacgcgagcacacgancagactgcggagatcagataagccgcaatctncgacgtcactgcacgcncatcgtggctgacgcgcattcgcggtcatctcgatcatactccgcagacacaacggcgatcaaacatctatcacacaccattcgacgactcantgtctcatactgtatgcgtcgcgccgccgcgtactcgccgtncaccacgcaccagatgatccgactcgcctcactacttattgcgcatacacgggcatcgngcactatgtagcgaacagacgacacagtgatnggagaacgcgcgaatctagtaaaaagtaactacgatgactataccacgagaatagtctacctgatatctagacgaacntgctctctgatcagcacagcgagcacgtgtncatgggatggtaatcactatctatatntcataatagatagaggtataatactgacgaggtgtactggcagtcagcaacgcccatcacttgtgtcgaccctgtctatgagccacatcgcagagnataacagaaacatatacgcgncagacgcgcacacgtgctaccctctacacctacgagcacagagaggccgctacacacaccacacggcggcagcggctgcacagtagagtgttggtctgattgtcacttcntcgtcatcatctctaacatctaaacagcatgtaatgaactacgatagtagatatatcagacatcgagtancactatctacncatcgcccgtcgnatgctcatctgacgtctcgtacagatcgctgcacagcaggcactagagacgcgcaagcatgcngtngcacgtcccgacgagatntatggcgtcgatcgatagtcaacgatgaactgaatatgtatagtagaganatgtgacgatatcgataaggaangacgtagcgcacagcacatcagatgcagtctatatcgacatagcgactcacacgacacatcgacgtactcacatcgcactccgncagcgtgtcgtgctagcacactaccacggctgtacatacgtcaactggcacgcgcngcgcacgctatccacaccccacgncatacgccatacgttacccanatctcaataanacataaaacgcgcgacgaggactagtcncgacacgatgacaagcatactnagttgcttaaatagtnaaacagtatgtagtgagtactcgcnggcaggcgccgcgnactgtcagtcn

SEQ ID NO: 3784 - DNA, 1454 bp, Glycine max
  misc_feature (100)..(100): n is a, c, g, or t
  misc_feature (127)..(127): n is a, c, g, or t
  misc_feature (1352)..(1353): n is a, c, g, or t
  misc_feature (1367)..(1367): n is a, c, g, or t
  Probeset Number=SeqID_13563
agactcgtagtgtcaggtgctataaatagtatatatcatcgtatagaggcatgtcagtatcacattacatgtcacatcacgaggtgtctaacgatgtgtntggcgcatatcacacttattcatcgcnccactttgacgcttgatgtacgtcatcagacattctatgtcgtgtcgcaccaacacgagtgcacatcgatgtagtagatacaaatctgcgtatggagtgtgtatagtcgtcatatatacatgctgtgcgatcgatagtcttctatcgttatctgtcactatctgtatgtagcgtcttgtccatatattcatgtatatacatcgtggttcttctcttctctctgtatgtatcgctcgtattatttatagtgtttagctatcgagagcccatcttgtctctgagttgtgaatagtgtgatcgatgatgcaatttctatgataacgatcagtcgtggtcgttgaaacgtcgtccgccctatcagtccgagacttgctagtggcactggtttgctgtctctcataatctactaatatacatctgtacgtgacatagcgtgtcctataacgaataacactcgccccgacacgagtgcgaattgatgatatttacatattcatacagcgccgagctagtactccttcatatcatacagtattatgttgcctcgtagatatatgcgccgtacgtttttacgggtgtgtaatggccgtgacatttatatgatttgtgagattcgtatatccacggggtgaggtatgaatatactataatgagaatgataacagagtgtaatgtataatatgtagtttatagtgtttatagttaggagtaggaggatacgcgcaaaaataataagacggcgtggctgtaactgtatcctgcacagcgtatactcaggtctgcttttatcttcgtttgttacgttatagtcggcggggcgtctctgttctcttccgtcctctatcattatgcgtgaggtatagaaataaggtatttttatatttaatgtaatttcttttatataatatactctgtttgcgggttatagattaatgagaggggatatatcacaatgaaagatattggagaggcggtcgcggcggagaaagcgtacgatgagtaaaggaagatgtatgtagatagctaacaataattcttctcgcgcggtaacggtcgaccaaacttcacatcatgtatatgaagagataataagagatgtatatacaacacaataaaaagaaaagcgaacaacatcgcctgtcgtgggaacaacgttgggtgtaccgtggcgtggtgccctcttcgtgggcgtcgttattagtgctatttgaccagatagaacatnntaaggggggggaanaaaacaaaaagattgtattgtgtgtgtaaccaatatgagggggatgatcatacgatcacacaccaacaccaacccaccccaaaaaaa

SEQ ID NO: 3785 - DNA, 488 bp, Glycine max
  Peptide Sequence Number=SeqID_7994
  Probeset Number=SeqID_13564
aattctgcaatagcggcgaatctctctcaggacttgatcgtggtttctagcttttcgggagaatctgattaaaagtaagatgtctgctactcaggaagaagacaagaagcccggagaacaaggaggagttcacatcaatctcaaagtcaagggccaggatggaaatgaagtcttctttaagatcaagaggagcactcagctgaagaagctgatgaacgcttactgcgaccgtcaatctgtggatttgaacgcaattgctttcttgtttgatgggcgtcgtctccgtgctgaacagactccagacgagcttgatatggaagatggagatgagatcgacgcaatgctccatcagaccggtggtgttgcaaatggcatgtatctgttctgcttctaatgatgttttatggcttttcgctaagacggtgtgacataaatatattaatggacagtttcttccgataagacgttgtgatatcaaatatattaat

SEQ ID NO: 3786 - DNA, 593 bp, Glycine max
  Peptide Sequence Number=SeqID_7995
  Probeset Number=SeqID_13565
tatgctacagagagagaggtgctgtgaactgcctctctctctctctctctctcctgctggaaatggcaactctgcactctcttgcattgtcctctccactctccaactcacttcagaagccacgctcatgtgcaggtaacatcactttttcctatttttctatgaaatgtgcaaagactactctgagattattttagaagtaaagtaagggtgatgaaattaagttgggcaatgtatgtatgttctcctattgaatttgataatatttgtgttaagttagaaaaaaaagtttatttttcttctcttcagcatgcttggggactcaacttaaagggttcatctaaagttctacacctgaaatttcataattacattggaattatttttgtgaggttaagggctttgaatcattttcaactcaatatggtttgcctctgttacgagacactaggcattccaggaggccaaataagattaacaaaaggaggtggcattgttttctttttctatgtttttgccctcttttttgcttgacaacataaaattcctggtatgatgcttcatttttcattataccatcataatcattacag

SEQ ID NO: 3787 - DNA, 1850 bp, Glycine max
  misc_feature (1)..(1): n is a, c, g, or t
  misc_feature (42)..(42): n is a, c, g, or t
  misc_feature (53)..(53): n is a, c, g, or t
  misc_feature (64)..(64): n is a, c, g, or t
  misc_feature (112)..(112): n is a, c, g, or t
  misc_feature (157)..(157): n is a, c, g, or t
  misc_feature (185)..(185): n is a, c, g, or t
  misc_feature (204)..(204): n is a, c, g, or t
  misc_feature (206)..(206): n is a, c, g, or t
  misc_feature (255)..(255): n is a, c, g, or t
  misc_feature (260)..(260): n is a, c, g, or t
  misc_feature (296)..(296): n is a, c, g, or t
  misc_feature (304)..(304): n is a, c, g, or t
  misc_feature (320)..(320): n is a, c, g, or t
  misc_feature (391)..(391): n is a, c, g, or t
  misc_feature (393)..(393): n is a, c, g, or t
  misc_feature (427)..(427): n is a, c, g, or t
  misc_feature (553)..(553): n is a, c, g, or t
  misc_feature (593)..(593): n is a, c, g, or t
  misc_feature (612)..(612): n is a, c, g, or t
  misc_feature (638)..(638): n is a, c, g, or t
  misc_feature (641)..(641): n is a, c, g, or t
  misc_feature (710)..(710): n is a, c, g, or t
  misc_feature (776)..(776): n is a, c, g, or t
  misc_feature (839)..(839): n is a, c, g, or t
  misc_feature (846)..(846): n is a, c, g, or t
  misc_feature (1067)..(1067): n is a, c, g, or t
  misc_feature (1171)..(1171): n is a, c, g, or t
  misc_feature (1218)..(1218): n is a, c, g, or t
  misc_feature (1466)..(1466): n is a, c, g, or t
  misc_feature (1643)..(1643): n is a, c, g, or t
  misc_feature (1664)..(1664): n is a, c, g, or t
  misc_feature (1725)..(1725): n is a, c, g, or t
  Probeset Number=SeqID_13566
ncgcgcggtctgacgcgtggtgatctcatattcgtgtcgcgngtatgtgatgntccacctacgnttagtatttctctgtgtgtgggtgctcatgggcagtccacaccagacnactttttcggcgtcgctgtcactctgctcgacgccgcgtagtgtngtggcgtcgctcacttttatcacctcgntcgcgggatctgtggatantnacttgcgggtcgtgtgtgcgcgtccgttttgcgtattttatcctgtgtncgatnatatacgacgcttgtgccgttccgcttgtgtacatnttctgtcnccctctactcgtcgtnggggtgattcacgttatcgcgcagcgtacggggctgatcgtctcgcggtgtcggcatttcttctgttacgngncgtccgcttcgtcatctatgtatgatatactccnggcgtgtctctgctgcctcacggcgcgctctgcgtgcgcggctgttttacttcgcgacatttcgtgtcgttctgtttgcgtgtcacctatatattatatttagcgcgcgtgcgtgcgtgagtgatnatgatctacgcgcgctacgacactcgcggcttgtatctangtatagtcgtgagactgcncgcagtcgcgtgcgcgcgcccctcgncgnggcggcaacatatttgtgagaatcttgtatgatgtggtgtcgacgtctatagtgttacatgttcagganttttatatatttcgcgccgctgcactgcgttgtccgcgtcgcgttgtggtctcttagtatgcgtgngacgtcgatgatatatatcgtgacagcgcacgtgggcggttagtcgtatctttatcttatatnttatatnttagctgagttgcggagtgagtgcgggagttgtgtcgcgcctctgcgtgcctgcgtctagtcgctttatactcgtcggtgtgcgcgcgctctcgccgtacggtgttatgttaatcgccggcgcgcgcgcgccactcttaacgtattctatttactccgcgctgctgttcggcgtacttcggcggatacttcggcgtccttcttcagcgtctcttttgtgtngctgcgcgcgggggcgcgggcgctagcctatgatagttggccccatcgcgttccgtcgcctgtctctgtgcgcgccgcttccggtccttcctagtttcttctcnggcgagggcgcttgcgcgtctcgtcgttgtgtcgtgtggcgtgttancatcctttgtgcgtctcccgcggccgcctcttactggcggctgtgttgctgtgtggtttgtgtcgttcgccttgtacgccgctgctcccacgcggcgctcgcgcttccctcggttcgtgcttctccgctcgcgttaggcgcgcggctccctctctagtaggccgtgccttggcgaactgcgagtagatgtaattacgagcttgctctctggtggcattcgcccgggccgtccctggcgtcgacacgtnttgttggatggttttatgtctgagccttctcgatctctctgtgggggcgctgttcctctccgccgtctcccccctctgggaggtagtgctgatctctcgcgtcgctctcctttgtttatcttctctcatcgcttccgcgcggccggctctccgcttttctcctcccggctttctgtncggtggcgaacaactccttcncccccgtcgcgttgggcgcctctctttgttttttggggattttccgcttcggccccgcgtngtctcccctgcctccccctctcttcccctcgttcccgacggggtggggccgggcccctcaattttctgtcctgttggtctgtggctctcctcatccccgggcctgtctgggtgtggtggcctctc

SEQ ID NO: 3788 - DNA, 1998 bp, Glycine max
  misc_feature (1)..(1): n is a, c, g, or t
  misc_feature (42)..(42): n is a, c, g, or t
  misc_feature (70)..(70): n is a, c, g, or t
  misc_feature (77)..(77): n is a, c, g, or t
  misc_feature (84)..(84): n is a, c, g, or t
  misc_feature (127)..(127): n is a, c, g, or t
  misc_feature (147)..(147): n is a, c, g, or t
  misc_feature (159)..(159): n is a, c, g, or t
  misc_feature (191)..(191): n is a, c, g, or t
  misc_feature (212)..(212): n is a, c, g, or t
  misc_feature (214)..(214): n is a, c, g, or t
  misc_feature (244)..(244): n is a, c, g, or t
  misc_feature (249)..(249): n is a, c, g, or t
  misc_feature (252)..(252): n is a, c, g, or t
  misc_feature (295)..(295): n is a, c, g, or t
  misc_feature (297)..(297): n is a, c, g, or t
  misc_feature (316)..(316): n is a, c, g, or t
  misc_feature (326)..(326): n is a, c, g, or t
  misc_feature (328)..(328): n is a, c, g, or t
  misc_feature (333)..(333): n is a, c, g, or t
  misc_feature (337)..(337): n is a, c, g, or t
  misc_feature (340)..(340): n is a, c, g, or t
  misc_feature (353)..(353): n is a, c, g, or t
  misc_feature (416)..(416): n is a, c, g, or t
  misc_feature (430)..(430): n is a, c, g, or t
  misc_feature (432)..(432): n is a, c, g, or t
  misc_feature (435)..(435): n is a, c, g, or t
  misc_feature (453)..(453): n is a, c, g, or t
  misc_feature (457)..(457): n is a, c, g, or t
  misc_feature (460)..(460): n is a, c, g, or t
  misc_feature (490)..(490): n is a, c, g, or t
  misc_feature (547)..(547): n is a, c, g, or t
  misc_feature (551)..(551): n is a, c, g, or t
  misc_feature (603)..(603): n is a, c, g, or t
  misc_feature (608)..(608): n is a, c, g, or t
  misc_feature (616)..(616): n is a, c, g, or t
  misc_feature (637)..(637): n is a, c, g, or t
  misc_feature (688)..(688): n is a, c, g, or t
  misc_feature (715)..(715): n is a, c, g, or t
  misc_feature (783)..(783): n is a, c, g, or t
  misc_feature (800)..(800): n is a, c, g, or t
  misc_feature (810)..(810): n is a, c, g, or t
  misc_feature (826)..(826): n is a, c, g, or t
  misc_feature (850)..(850): n is a, c, g, or t
  misc_feature (916)..(916): n is a, c, g, or t
  misc_feature (978)..(978): n is a, c, g, or t
  misc_feature (981)..(981): n is a, c, g, or t
  misc_feature (1011)..(1011): n is a, c, g, or t
  misc_feature (1036)..(1036): n is a, c, g, or t
  misc_feature (1182)..(1182): n is a, c, g, or t
  misc_feature (1297)..(1297): n is a, c, g, or t
  misc_feature (1363)..(1363): n is a, c, g, or t
  misc_feature (1422)..(1422): n is a, c, g, or t
  misc_feature (1476)..(1476): n is a, c, g, or t
  misc_feature (1479)..(1479): n is a, c, g, or t
  misc_feature (1540)..(1540): n is a, c, g, or t
  misc_feature (1550)..(1550): n is a, c, g, or t
  misc_feature (1604)..(1604): n is a, c, g, or t
  misc_feature (1608)..(1608): n is a, c, g, or t
  misc_feature (1624)..(1624): n is a, c, g, or t
  misc_feature (1632)..(1632): n is a, c, g, or t
  misc_feature (1711)..(1711): n is a, c, g, or t
  misc_feature (1801)..(1801): n is a, c, g, or t
  misc_feature (1819)..(1819): n is a, c, g, or t
  misc_feature (1894)..(1894): n is a, c, g, or t
  misc_feature (1912)..(1912): n is a, c, g, or t
  misc_feature (1914)..(1914): n is a, c, g, or t
  misc_feature (1922)..(1922): n is a, c, g, or t
  misc_feature (1935)..(1935): n is a, c, g, or t
  misc_feature (1938)..(1938): n is a, c, g, or t
  misc_feature (1940)..(1940): n is a, c, g, or t
  misc_feature (1942)..(1942): n is a, c, g, or t
  misc_feature (1944)..(1944): n is a, c, g, or t
  misc_feature (1951)..(1951): n is a, c, g, or t
  misc_feature (1961)..(1962): n is a, c, g, or t
  misc_feature (1980)..(1980): n is a, c, g, or t
  misc_feature (1997)..(1998): n is a, c, g, or t
  Peptide Sequence Number=SeqID_7996
  Probeset Number=SeqID_13567
ncgcgcgacgcagtactatctgcgctgcacgcgacgatgctnagggcacggatacagtatgaggagacgntatacgnagatcgnatgataggacgcaggagttccgctgatcacacgaacagtacgncgcgtagcgcgtagcgtacncgtacgagacgngccgtgtccggagcaagcacgacgtgtcgctnaggaatgctgaggtcacgcgntngcgagcgtcgatactgctcgtcgccggtantgcancgntcactgtcgccacggctgctcatggtaaggagtaatatgcacngncccgcgcacacgctactantccagagatntntcacncacngcncagtccggctagnggaggggacgtcagatagtcgtggaagtcacgtcatgcgctgcagcagtagtcgacagcgcgngtacgagtgatagnantgntaatgtgagtcggacgangcgngantgcacaaatgagaggagcgcggtaaatacnaacgtggaactcaacggctcatgcgccgagagcgtaggctgagcgagtcgcgcgcangggngatatagtgagaggtggtgtcactgacggagagtggtaggggcatggtatangcganctacatcnacatagcaagtgtgcgcgcgnagcgcctgctcgacgagcatcgatagtccaatacggcatgactgctcctgncgcgtgctgggtaagtacgatgtgcgnggatggacggcagcacggcgtagatgtgatgttgatcataacactatctcaccacacgaacgacagtntgtcgatgaagtatatncgactcgctntgatgttgcgcgcgtntagaacagctatatattggtgtangagacgacgtagtcgtgcgcagaggagcgacactatatgtcagcgactgcgtcgcgtgcgtgcagnggcggccgtgtcgtgtatcgtcaagtcatgttgcgcgagacataccaacacatcatcatatntanaaggaacgcggtggattatatacatataangcgaggacgtatcaatcacgcatcncccgatccgtcgatcgattcatacgtacgcggcacgacatgacacgacacaacagcatatcgagaggcgagcgcggcccggcgagcgagtgcattaaccgagtgggagcgcgccgcacgctcgatcatattcaagcgacatacagngctgacagagcgcgcggtctcgcgtacaagaagagggcgagatcattgaagagcgcgcgagcgtatcacgatggcgaggtcgcgacgtacgcctccgcgctgatgcgcgtatagngagagaggatgtagatatacgatgatatgtgttgtcctctctatcatacatacctgtctgtacacnagacactacgctcgcggcgagcgagagaggcacgagcgacgatatatacaacgatctantagtagtgtgcgcagagaagagaaggcagaggcgtgttaggggtggagggcganggnctgctacgtcacacaccgtctcctactccagcccggtaggcgtagagaatgagatagtganagagagtgtntctgtgtgataatgcgtgggagtgtgacattcctactatctctctatcatcacncgcntccttgatgctctatnacatcganagcatcccacgattacacactaacacaccatacaccacacaacgagaaacacacactgaagagaactatgggcgcacanaatcgagaggagaagaggaggagagtgtgctacaagagacactcacctccctcctgcagggtgctcgcggcggagaggtataatcgtggntggggtatgttattcgcnggcgcggcgtgcgccagcgcgcgggtggggggtggcacactacccgcgacagcagcacacaacctctgacacgcnctcctccctgtctccggncnttcaccangacgcgttgggtncgntntnanggggaanaaaagaaaannacaacaccacaaaccacncaaacacaaacaaaaann

SEQ ID NO: 3789 - DNA, 1755 bp, Glycine max
  misc_feature (1)..(1): n is a, c, g, or t
  misc_feature (22)..(22): n is a, c, g, or t
  misc_feature (26)..(26): n is a, c, g, or t
  misc_feature (203)..(203): n is a, c, g, or t
  misc_feature (277)..(278): n is a, c, g, or t
  misc_feature (446)..(446): n is a, c, g, or t
  misc_feature (471)..(471): n is a, c, g, or t
  misc_feature (503)..(503): n is a, c, g, or t
  misc_feature (679)..(679): n is a, c, g, or t
  misc_feature (682)..(682): n is a, c, g, or t
  misc_feature (699)..(699): n is a, c, g, or t
  misc_feature (755)..(755): n is a, c, g, or t
  misc_feature (789)..(789): n is a, c, g, or t
  misc_feature (870)..(870): n is a, c, g, or t
  misc_feature (873)..(873): n is a, c, g, or t
  misc_feature (917)..(917): n is a, c, g, or t
  misc_feature (931)..(931): n is a, c, g, or t
  misc_feature (1044)..(1044): n is a, c, g, or t
  misc_feature (1138)..(1138): n is a, c, g, or t
  misc_feature (1140)..(1140): n is a, c, g, or t
  misc_feature (1150)..(1150): n is a, c, g, or t
  misc_feature (1153)..(1153): n is a, c, g, or t
  misc_feature (1155)..(1155): n is a, c, g, or t
  misc_feature (1169)..(1169): n is a, c, g, or t
  misc_feature (1195)..(1195): n is a, c, g, or t
  misc_feature (1318)..(1318): n is a, c, g, or t
  misc_feature (1330)..(1330): n is a, c, g, or t
  misc_feature (1371)..(1371): n is a, c, g, or t
  misc_feature (1376)..(1376): n is a, c, g, or t
  misc_feature (1410)..(1411): n is a, c, g, or t
  misc_feature (1424)..(1424): n is a, c, g, or t
  misc_feature (1481)..(1481): n is a, c, g, or t
  misc_feature (1485)..(1485): n is a, c, g, or t
  misc_feature (1487)..(1487): n is a, c, g, or t
  misc_feature (1491)..(1491): n is a, c, g, or t
  misc_feature (1544)..(1544): n is a, c, g, or t
  misc_feature (1592)..(1592): n is a, c, g, or t
  misc_feature (1610)..(1610): n is a, c, g, or t
  misc_feature (1636)..(1636): n is a, c, g, or t
  misc_feature (1687)..(1689): n is a, c, g, or t
  misc_feature (1692)..(1693): n is a, c, g, or t
  misc_feature (1698)..(1698): n is a, c, g, or t
  misc_feature (1704)..(1705): n is a, c, g, or t
  misc_feature (1714)..(1717): n is a, c, g, or t
  misc_feature (1720)..(1721): n is a, c, g, or t
  Probeset Number=SeqID_13568
ntagtagtagtgagcagagagncgangtgcagaagaacatatgagaaatgagaagtattacaatatgtgagagacacgagagagatgagaggaagagagggcggtggattgagagacagatagaggtagcgcaagagtacaagacaggggagagagctagcagtgagtgcatacagacggtaagacagccgacgagtgggcgntggtgtgtgcgcgtcggatgagtagaagtagagcagtacgcgacggcaaagtagtgcgccacgcgcgggcgacnncgcacgcggcgacagtgcagagcgcgcgacgagaatcagtgagatgcgagtgtgataagatgacacatatactctccatcaccagagtaaacgagacatagttcacaatgtgaagcgatctcatcggtgatcagactgcgcgatgcaggcgcgagtagagggatgcanatatcgactaacgcaactaaattancagaactcagcaacagagaacagagaagaagnaacgaagtatgagaagcatcacacaggcgcgagcgtgcgcggcgagtagagagtgagatagtgggtgaggacagtgagacagtatagtgtgtaggtatagacgacaatgcgagaacgagcagacacatagatacgagagaggggtgttggtggggcgaagggagtctgcagtacgnatnacctgatacatatagcnggcgcgagatgggcgtccgcggcgctcagcacggtcaccaccacaagcacgcctgntggagtgtatggtggtgagtcgtggttgaccggngtgtgagtcacgggacgcgaggcgcgacgtacacactacatattatggtatgagagtagaagtatatagtattatgttgtntcntttatatatatttatctatgagttatatacgtctatatactatnaacacacaagagangacgtagttgcactgtatggagaaggtatgagcatatcgctcgtgtgcggcattgcttgtggaggtgagtcgttatgaatgttgcttcgagccggtggtgttggtgagtagtnatgtgtagtaaacatcatatataaacacacacgctgacggcacacgcaaccacgatcggaataagcatagagaggtggagctagacgacattgntntctcataganttntnctattatggtggtntgcggcaataatatatgttagaggtngcggagtgcggagtagagcgtctgatgtgtcagaagagaggatgagaacggtctacagacatatctatcacttatcctcggctccggcgacgcggaaccgtctcgtctgtatgtcattgtganctcgctcctacnacgcaagactcacataaagacgataggtgctcttgccgagngatgnggggagtgcatgagtgcaggagcggcgtgcatannagcgtgagcagcntggcggggatggggtatgtggtggtgcagtacactatacagggcaatactcgatganagananaganaggacacaaaggagagcgacgagagcatcctcctcctgctcgccggcgcgcgnggagagggcgatggacacaacaaggattatgtatgaggatgggcgtgncgtcagctcaacaccacnacagggaggaagaagcagacaaacancttattacctgcggcggatagatacggggaaaaccaggaagcacaagcgcnnntcnnacgcngggcgnntaggtaggnnnnggnnggcggcggcgcggccacacgcgagaggaggacaa

SEQ ID NO: 3790 - DNA, 505 bp, Glycine max
  Peptide Sequence Number=SeqID_7997
  Probeset Number=SeqID_13569
agaggagctgctcaagcccatctggcacgccttcactgccctggatgtggataagtgcggcaaagtgtccaaatctcagctcaaagttctgtcccacaatctctgcacattacttaacgtcccgcatgatccggtggccttggaggaacattttggagataatgacttgggtccggtgtccaaccaggggtacatgccttatctcaacaaattcatcctggacaaggttcaagaaggtttcaacaaagtggaatttaataagatgtgctggacgctgtgtgcaaagaaacacctccccaacacccccctgtacatcagtgaagacagcgccttcaaagtgtggaccatattcaattacttgtcagaagaaaaattcccactggttattgtgcccgaggagatcgagtacttgctgaagaagctgactgaagccatgggaggaggttggcagcaggccctgttcgaggactacaaggtggcgctggacaagaagcagaacggcctc

SEQ ID NO: 3791 - DNA, 2017 bp, Glycine max
  misc_feature (16)..(17): n is a, c, g, or t
  misc_feature (20)..(21): n is a, c, g, or t
  misc_feature (25)..(25): n is a, c, g, or t
  misc_feature (28)..(29): n is a, c, g, or t
  misc_feature (33)..(33): n is a, c, g, or t
  misc_feature (54)..(54): n is a, c, g, or t
  misc_feature (64)..(64): n is a, c, g, or t
  misc_feature (69)..(69): n is a, c, g, or t
  misc_feature (73)..(73): n is a, c, g, or t
  misc_feature (136)..(136): n is a, c, g, or t
  misc_feature (139)..(141): n is a, c, g, or t
  misc_feature (145)..(148): n is a, c, g, or t
  misc_feature (152)..(153): n is a, c, g, or t
  misc_feature (216)..(216): n is a, c, g, or t
  misc_feature (383)..(383): n is a, c, g, or t
  misc_feature (491)..(491): n is a, c, g, or t
  misc_feature (507)..(507): n is a, c, g, or t
  misc_feature (529)..(529): n is a, c, g, or t
  misc_feature (537)..(537): n is a, c, g, or t
  misc_feature (540)..(540): n is a, c, g, or t
  misc_feature (559)..(559): n is a, c, g, or t
  misc_feature (579)..(579): n is a, c, g, or t
  misc_feature (632)..(632): n is a, c, g, or t
  misc_feature (671)..(671): n is a, c, g, or t
  misc_feature (775)..(775): n is a, c, g, or t
  misc_feature (838)..(838): n is a, c, g, or t
  misc_feature (885)..(885): n is a, c, g, or t
  misc_feature (1189)..(1189): n is a, c, g, or t
  misc_feature (1191)..(1191): n is a, c, g, or t
  misc_feature (1287)..(1287): n is a, c, g, or t
  misc_feature (1310)..(1310): n is a, c, g, or t
  misc_feature (1331)..(1331): n is a, c, g, or t
  misc_feature (1341)..(1341): n is a, c, g, or t
  misc_feature (1421)..(1421): n is a, c, g, or t
  misc_feature (1481)..(1481): n is a, c, g, or t
  misc_feature (1483)..(1483): n is a, c, g, or t
  misc_feature (1535)..(1535): n is a, c, g, or t
  misc_feature (1581)..(1581): n is a, c, g, or t
  misc_feature (1629)..(1629): n is a, c, g, or t
  misc_feature (1725)..(1725): n is a, c, g, or t
  misc_feature (1796)..(1796): n is a, c, g, or t
  misc_feature (1838)..(1838): n is a, c, g, or t
  misc_feature (1843)..(1843): n is a, c, g, or t
  misc_feature (1850)..(1850): n is a, c, g, or t
  misc_feature (1902)..(1902): n is a, c, g, or t
  misc_feature (1909)..(1909): n is a, c, g, or t
  misc_feature (1912)..(1912): n is a, c, g, or t
  misc_feature (1919)..(1919): n is a, c, g, or t
  misc_feature (2014)..(2014): n is a, c, g, or t
  misc_feature (2017)..(2017): n is a, c, g, or t
  Peptide Sequence Number=SeqID_7998
  Probeset Number=SeqID_13570
tgggggtgggggtagnngtnnttanttnntagngttggttatgatctatagaancagtaggatnaccancttntaggtgttattaaatctagcgtgtaatttcataatcatgttctataataattatccgatgggnttnnntagnnnncacnnttccctctctctgtgatataataatcactaacataacaatcgactggacgatagtatataaanatacacacgacacatatcgcctaggtcgcaacgcgcgtgttacacatcagacctcgcctatgcgatgagcatagtactttagacaataaggagatttatatacatcactctatatatgattggtatatatcctattggctatcactcttattcgtccacctgtatgntttgtgtattataactacgctgatgatagatacataagagaaactacacactatctatctaccagagacattcgctcctatagtagcatacaatatctatctatcatntaatcactttatatangcgacatatatcatagcgtcgnagctgtgnctncgatgatgctcattcatcnatatcgtgatataacgtcgntccggctctcgctatactatattaatactcatctttaactataacgtatattntgagtacatagattaataataatagatcgatcactactnatataatatacgatactcgcttgcagttgctaaatcgatgacgatgaacaacattcattactatatacgctaggctcgtggacacgatatcgatactatctcgnctactgcgcacgacacgtctccttcagtgatgtaccctgtgagagtcattcgacgtggtattnattcagcggtactccacactgcactattatatcgagtataaagatanagtactacaactaactccatgatctagcacacacgacatgtcactgacgcgagcagtcatactactgatagatatgtaacaaccagtcatatgagcaggaacacagtgatatgtgtgataccgcactcactcgtcatacatcgttgacgtaatgcaacatcacactacacacactatatacttatgataaggaccgagacatatataccggaatattacctatgtgtatatatgtattgtacataatgatgtgatacaataagagctccgcgcacacgatatatcataagtgatatcataattngnaagtatatacatatatcaatgcgcacgcacgacgcatctgatacagcacgcatacatgcatgtgagtgaatgtagatacctcaatactacagatangtactgaccattactctcacgcnatcatctacgcacttcatcantagagatgtngtgtatgacagtcatccgactgcgcgctgtgagtgcgtaatgctataacgtacgagacgtgatatgtagtaacgcccaangagatgcgagccatgcacgtactctgtgtacatctgatacactcactcgcccgcagcacncnactcacatactacgttactcactcatatatgcatgacctatacatactatanatctgacattgtgtatctcgtcgtgcgcattatacacttacagctnactccgtgtgatgacgtgaatgatacgtatacactgcgactctgtgcntcatctctgctagtctctgatgctcgtctccgcgacatcgatcatatgctctatattgacggtatatgatcacgtgatattgcctcatgtcataangaccactgaacagtgcggctccttgctcaatgagaaagtcactgatacgtcgcgctgtgctacgctcatgnatgcgcctatgtatgtcgctgcgatcgtctctgctactctcngctgngacactngtatgcgtctgcgcgcacgtagatgatcatatagcataatgacatgctattntcgccgntgntaagctngcctacgaacgactcgtcgtcgctacgacagtgacagcaggttcatcgtatatcagtcatcatctacgtgtctacactactgcgctcgatcacanctn

SEQ ID NO: 3792 - DNA, 657 bp, Glycine max
  misc_feature (19)..(19): n is a, c, g, or t
  misc_feature (88)..(95): n is a, c, g, or t
  misc_feature (391)..(391): n is a, c, g, or t
  misc_feature (396)..(396): n is a, c, g, or t
  misc_feature (410)..(410): n is a, c, g, or t
  misc_feature (413)..(413): n is a, c, g, or t
  misc_feature (420)..(420): n is a, c, g, or t
  misc_feature (453)..(454): n is a, c, g, or t
  misc_feature (464)..(464): n is a, c, g, or t
  misc_feature (472)..(472): n is a, c, g, or t
  misc_feature (478)..(478): n is a, c, g, or t
  Probeset Number=SeqID_13571
ttttgtgggggggggggtnttttttccccccccccccccccccacaaggaggggggcgggtatttttttttttatttttttttttttnnnnnnnntttctcacaaaaaaaaaaaccccccctttttttttttttttttaaggaaaaaagttttttttgcccccccccccccagggttttcaccaaagtttttttattggggggcaggggcgctaaaatttgaaaaaaaaaaacccccgtgggggcgagaatcccctattctctcccaaggttggggaaaaggggttttcttcccaaagtaacggggtttaataaccccggccttctttctggataaacggaacccccttccctttgagccaggaggcccggagccaatggttacctgctcntgacnataaccagttctgncgncgaaagnaagcgcttctcggcagcgatgatgtgatcgtgnnaagtggaatncacgaggnccagancctggagctgcttctgtggttttggaggttactccgacgtcgttcttggtttctcttccgccattataatgaaccttcaaaattgatttgattcgatgatgaaattatgattgcggagcaagcaatagcaaaacaagaaagcttatagacgcggaataaatcaattaaattaaaatgat

SEQ ID NO: 3793 - DNA, 452 bp, Glycine max
  misc_feature (221)..(221): n is a, c, g, or t
  Peptide Sequence Number=SeqID_7999
  Probeset Number=SeqID_13572
atctttttagctgttactcgatcaattttctgataatggcgttgaacaccggaatcagatcgatctcaaagatcatagcttcatccgagtcattagtctccagatctgtgagcagaagcttccactcgactggagctaagaagatgagcggagggcatggccatgacgagccatactacctccacgcaaagcacatgtacaatttggaccgcatgaagtancaaggtctcaagatgtctctcggtgtcttcacagctttcagcatcggtgttggagttcctatctttgctgttgtcttccagcaaaggaagaccgcatctggttgagttgagtctctcttctcagcttgaataatatttgtatgggaattttcaaactctgcctctgcaaggaaagttcttgcttctcttttttgatcttagccccaagtcttatcgttataaaagtatatt

SEQ ID NO: 3794 - DNA, 1695 bp, Glycine max
  misc_feature (63)..(63): n is a, c, g, or t
  misc_feature (272)..(272): n is a, c, g, or t
  misc_feature (464)..(464): n is a, c, g, or t
  misc_feature (724)..(724): n is a, c, g, or t
  misc_feature (763)..(763): n is a, c, g, or t
  misc_feature (846)..(846): n is a, c, g, or t
  misc_feature (865)..(865): n is a, c, g, or t
  misc_feature (1059)..(1059): n is a, c, g, or t
  misc_feature (1395)..(1395): n is a, c, g, or t
  misc_feature (1514)..(1514): n is a, c, g, or t
  misc_feature (1655)..(1655): n is a, c, g, or t
  Peptide Sequence Number=SeqID_8008
  Probeset Number=SeqID_13573
tcctagtagcacagccacggtagtatactccacatagagagtcgtgcgctgctctatatagtnaggcagtcagttagagacttgtagcataactatgtgcgtgcgctcagcgtctctgtacgaggacgtctgtagaggtgtgaatcagcggcggatgaggagagagtgcacagcgtatgttcgacactcatggtagcctgcgtgcgacgcctcgacgacgcatttcacatagtacctagtgcaagatcgatagacatgaagtggtgtacaantacgagatgtcatagtgtgagcgcgtgtcaccgcacgtgttgtcagtatagcgtagtctgtagtctatgtgcattcgtgtcagctgtgcacatgatgcgaagagtaaggcgctctatgagtattcgatatacatgtagtgaggtcgcggataggtatacatatatccgtgcacctaggatcgtatgagactngtctgtacacagtcgcattatatccgtgtaatattcctgtcctcaagcgccaatttccgaatccgatagaatgttgcgtgtgtgcgggaagaattatgctgtgtgtttaccgatctgctgcgacgctatggcatattcaggtatcctaatactcggtgggttttactcgagcgccgtcgagtacagtatgtatagccaatcatgtagggggatatcagatagcgatctcgaatttgtcgcgcgcgtcgcttattagggantcttctgtgtcaatagagagggtagttggtgttatgtanggatgcggcgaacgtgtctacactctgcgggggaggtgctacgaagtcgccacgagaggagaatttatagttgagagcgggtnttgatgttgtaggaatacngacgaggcgcacataatattagatggcgcgtctacacacgcgtaacggtggggtggctgatcaaacactgagagagcggcggcacactcacagttaatactatatcgatgcatatatgacgcgagttgtgaggacgcaacagcatatcacaagtcgtgtgagtgtagtggatatgcctatgtgctgcttgcgtngcggtgtcgcgctctgcgtgatcacggtatatacaggatgtgcttggttcagggtagtagaattaactatagatatactatcatatcctgtagagtgattttgtgatgcatactgcgtgtgtgtatatgagcgatggtgtgcgtgacgtgggatgtgattgaggattctagaatgagcgtgtcagtggtgctggttacgcatggtgagtagctaggtggtgtcagcttatcaatcatatgccgagagtacaacgttgtcagccacggcctagtggatgttatgtcggtatgtgaggcaatgtatcgacgcgagcgcgtgtggtgcgatagtgttangcgtgtgtctcgtaatatactcgtatctgttctcattcgtgtgtatgtgggtgttgatgctatggacagttgtatatataaaatacatatacacacgagcagatcagaatattatatantcttatattctcgtaacacacgaacgttgcatagctctgtctgtaatgtggtgtgagttgtcgacgcggtgtgatgacgcagtatttgcgagaggcagtgtagacactgcgtgttggtgttagtgagtatgattgcagatntgatagagatatgaatctaatattgattataaagaaataa

SEQ ID NO: 3795 - DNA, 454 bp, Glycine max
  misc_feature (305)..(305): n is a, c, g, or t
  Probeset Number=SeqID_13574
aagctagaagacagacagctttatcacaagagagaccaaaccaaactgtgaacttttgtctgaaaaaacaaatgggaagccaaggaggatcgatagtgaggaaaccaaggtttctatgtctccatgggttccgtacgagcgcagagataatgaagatacagctacacaaatggcctaaagctgttatcgacagactcgatctcgtgttcctcgacgcgccttttccttgtcaaggcaaatctgatgtcgatggagtcttcgatcctccttactacgagtggtttcaattcaacgaggagttcatngagtatgagaatttcgagaactgtctggagtatttagaagatcgtatgatcaagcttggtccctttgatggtctcattggcttctctcaggggggaatcttgtctgggggcttaccaggactgcaagccaagggaattgcactccaaaa

SEQ ID NO: 3796 - DNA, 1635 bp, Glycine max
  misc_feature (1)..(1): n is a, c, g, or t
  misc_feature (3)..(3): n is a, c, g, or t
  misc_feature (57)..(57): n is a, c, g, or t
  misc_feature (64)..(64): n is a, c, g, or t
  misc_feature (83)..(83): n is a, c, g, or t
  misc_feature (98)..(98): n is a, c, g, or t
  misc_feature (101)..(101): n is a, c, g, or t
  misc_feature (177)..(177): n is a, c, g, or t
  misc_feature (238)..(238): n is a, c, g, or t
  misc_feature (280)..(280): n is a, c, g, or t
  misc_feature (289)..(289): n is a, c, g, or t
  misc_feature (303)..(303): n is a, c, g, or t
  misc_feature (318)..(318): n is a, c, g, or t
  misc_feature (334)..(334): n is a, c, g, or t
  misc_feature (379)..(379): n is a, c, g, or t
  misc_feature (394)..(394): n is a, c, g, or t
  misc_feature (530)..(530): n is a, c, g, or t
  misc_feature (560)..(560): n is a, c, g, or t
  misc_feature (570)..(570): n is a, c, g, or t
  misc_feature (670)..(670): n is a, c, g, or t
  misc_feature (677)..(677): n is a, c, g, or t
  misc_feature (679)..(679): n is a, c, g, or t
  misc_feature (742)..(742): n is a, c, g, or t
  misc_feature (771)..(771): n is a, c, g, or t
  misc_feature (790)..(790): n is a, c, g, or t
  misc_feature (799)..(799): n is a, c, g, or t
  misc_feature (801)..(801): n is a, c, g, or t
  misc_feature (808)..(808): n is a, c, g, or t
  misc_feature (826)..(826): n is a, c, g, or t
  misc_feature (833)..(833): n is a, c, g, or t
  misc_feature (1031)..(1031): n is a, c, g, or t
  misc_feature (1264)..(1264): n is a, c, g, or t
  misc_feature (1348)..(1348): n is a, c, g, or t
  misc_feature (1405)..(1405): n is a, c, g, or t
  misc_feature (1549)..(1550): n is a, c, g, or t
  misc_feature (1557)..(1557): n is a, c, g, or t
  misc_feature (1561)..(1562): n is a, c, g, or t
  misc_feature (1569)..(1569): n is a, c, g, or t
  misc_feature (1614)..(1614): n is a, c, g, or t
  misc_feature (1625)..(1626): n is a, c, g, or t
  Peptide Sequence Number=SeqID_8009
  Probeset Number=SeqID_13575
ntntcagcgtatatagacgcagctacgaaggatagagcagtacgatgcagatatgtnctctatncatcgtcgtcatagctatnctcaccccgcactgnggncggctcagcagcaacgcgcgcgatctaacgcccctccctcgactcttctacgagaagagtgcagatctatcgtagnagtctctatatgactgtcacacggcaccatatactgactagtagacagatcgtgtctatgnatgcgacgagtctcgattcctgtggatatctcagccgtctcncgtcagtcnctgtgaagcatgantaagtcgattcggtnagactgatgactatgnatcgtaatgaagctctctctcgctcacacctctattctctgttcntgatatctcctcacnctccgtcatgtagagagagagaccttgtactgtccacgcgcgagtgtgcagcttgtaaagccaactcactctattgtgtctataaagatagcgttataagttggagctctatactcagaagcttctgacagaagangtgggggatggtgtggtgagagatgctttncatctctcangttccgtcctacacgagtatatctgacacaagctacagaccctctccgctcacgacatcacgccccacatctcatagcgcacgctgtctcgtacacgcgnctagggnantgtgtggagagaattttaatacacaatccgcgtataatcattatcgtacctcttaggagatanctctgcttacgcggaccacgggagagatncgattgttattcatttacnttatatgtngnttatatnttttttctctcctaatcncccactnatatccacttcacttccttcgtctctcaaagctacaccatcttctcacagacatgtgagcgacgctgttccaagtactaagcagatatgtctcgcagagagggatgttctgtcacacatatctatcgtcaattcctagtgatacgcagagaagctctccgctagatggtgaatgcctggccccgctgggttctcgctngcgctatccttgcatccaggtgacggagaaagctccttaatagaaggctagagtagtgcctcatccaccgctgccgtgggtgtctgaataggctcgtacatgcgtgagcctgcgccatctctctccagtcacagtaacggctatgtttgtcctcttctagcgcgcgtgagcacgcaggagatccatcgactaccccgcgcattccgtcttggcgacttagcgttagtggagtngaccaatccgaacgaagcagccaatcacccgattatgcgactcctttcgctctatctgcgagctagagagcgccgcctgctcangctggaactctctactgacacaacatatgacgatgtaggcatatgctatcctgagangcgtcttgtctcgggctcaccatgcacagacaacatggacgaggacgggggagcggcggtgggcgcgctcgctcattacacctaatcctccacctagagagggggacgcctctcgcgtcctctcccttctagtgttcggcctcnnaaagagnaagnnatattgnttaatatttatcctctctcgtttacgaagtgaaggaatggtgagngaagacgacgnncaccctacc

SEQ ID NO: 3797 - DNA, 834 bp, Glycine max
  misc_feature (834)..(834): n is a, c, g, or t
  Probeset Number=SeqID_13576
caaaggacatcatgatatgtggcgctgtaaacctcagcagtgtagagatagagaaccctctttactcacatccttcaagactggaggcacctgtggttgcaagggcagatgaaacattgggcgagtctccctgcgcttttgtgacactcaagccaggagtggattcgaccaatgagcagcgtataattgaggatacaataacttcagcagtggccaagatgcctgcttatcgggttcctacatcagttgtgtctgaagccctacctaagacagctgatggggcgatacaggcgcatcggaatcaatgtcaggatacttaatgactgcatgagggtactgatttcattggctatacaagtgtgggttttgcatcaaggttaatttgaattgaactcgagtttcgattgctctaatatcaaacttgtgatgactctatctcaagtgcattttgtgtaaacaaaatatgtgcatgactctcttgatcagaacgaaaacaattaaccaactgatgagtaacaacaaagagctacaagcagcaaagcccaatgtgagtaacagcaaggagttgcaaacagcaaggcccaagaggcaaagccacactcctagtcatttgaaggattacgtattagttgcataatcattcacgtgcgcatccaagttagtaggacctgcacttgtatcttctagaagcttagggaataaggaatattattgttgaatctgttagctttctgttaggtcgttagtatcctgtggctcacatgtagtaacagtaatctctataaatgtaagggaagcgcttgtgaaggatattaagaaaagcattatcccaan

SEQ ID NO: 3798 - DNA, 557 bp, Glycine max
  Peptide Sequence Number=SeqID_8010
  Probeset Number=SeqID_13577
ataatttcttatttacatcaccaaatggtacccgtgctttaaatgcagcacacgacttttgggttgtcaggatcaactattgtgtgtagagggagaggcttcatgcaacaggtaacgttgctgctgctgtttctctaaaaaaaaaaagacattttgggggagaaaaatgattgcggataataacgatgatgattgggatggtgaagatgtggtggaagcctatgatgatgatggtgagggatgaaattatcgttatagatgatgatgatgatatagaatcatagattctagaaatgagaggcatcggcaaaatgatgagcatttctcaacgttatgccttatataggaatatatgaagatctaagtaattaactaggatgtcttcgaggaaaatatatatgcaaaataaaacaatttttttagaataaagaaaaggaaaaaaagtgtatcatcttctattaccttaaaatttagatttaaatatgtttaaggtctttaataaatgattgaattttattttgattctctaataaatttttattattattgtgagtctc

SEQ ID NO: 3799 - DNA, 2606 bp, Glycine max
  misc_feature (1)..(1): n is a, c, g, or t
  misc_feature (2603)..(2606): n is a, c, g, or t
  Probeset Number=SeqID_13578
ncacgcgtcgggtggtggcaataatggtaggacaataaaaccccttggggttgacatatcaaagaggcagcataaaggtggacttagcaagggcataattgctattattgctctttcagtttttctagtagttgttttatgctttgttgctgctttggcattgttcaagtacagagatcatgtgagtcaaccaccatcaaccccacgggttttacctcctcttaccaaagcaccaggtgctgctggatcagtagttggaggtgggcttgcttcagcttcgacatcatttcgatctaacattgctgcttacacaggatctgctaagactttcagcatgaatgacattgagaaagccacggataatttccatgcttccagagtacttggagaaggtggttttgggcttgtttatagtggtacacttgaagatgggacaaaagtcgcagtcaaggttctaaaaagagaggatcatcaaggcgaccgtgaattcctatctgaagttgagatgcttagccgccttcaccatagaaacttggttaagttgattggtatatgcgcagaggtcagcttccgctgtctagtttatgaactcattccaaatggcagtgtggaatcccatttacatggagctgacaaggaaaacagcccacttgattggagtgctcggttaaagatagctctcggttctgctcgtggactggcttatctgcatgaagattcaagtccccatgtcatacatagggacttcaagtcgagcaatatcttgctggaaaatgattttacaccaaaagtatcggattttggattggcccgaacagcagctgatgaggggaacagacacatatcaacacgagtgatgggaactttcggttatgtggccccagagtatgcaatgactggacatcttcttgtgaagagcgatgtttacagttatggtgttgtcctccttgagctttcgactggaagaaaaccggtggacatgtcacaacctcctggtcaagaaaatctcgttgcatgggctcgtccactactctcaagcgaagaaggattggaagcaatgatagatccatctctaggacactgatgtgccttctgatagtgtggctaaggttgcagccattgcttcaatgtgtgtacagccagaggtgtcggaccgtcccttcatgggggaggttgttcaggctctaaaacttgtgtgcaatgaatgtgatgaggcaagagaagcaggttctagctctagttctgttgatttaagtcactctagacaaccatcagataatttacaaggccaattctcagccaccaactatgattctggaattgatattgaaaatgggttgttagcatcagagttattcagctcatcggcgagatatggaaggcgagtgtccggatcgtttagaaggcattcttattcaggtcctctgaatactggaagaagcaagcggttgtggcagataattagaaagctttctggcggtagtatcagtgaacatggaactatgtttaagttatgaccaggtttcaattgagccaaattgcaagttttgaactttcttctgtgcatactgctctccctcacattgttaatgtgcagttcacaactctgctagaggcattgcacctctctgcctgagccatttgaagtttgacaagagaatacaagcaagttgtaaataggttttgacatgcttttttctgctaacctgcaagatcatgtgtatgtaactggtactaacactttgaagaggggaagcaatgcaaatctagcttgaaaatagaagatgactgaagatgacctttagtaagacctccaattgcaaatacaaacatacaagatatagtctatgcagttgcagcatcaataatataatgttcaaattgtcaaagccacatgcatttagaggaggaggggatggaatggaatctagttaattagttgtgtagaacaagattatataacgaatacattgctgaatttacacaggccactcatttttgaaaaaatctttatgatgaaaaaaaaaaaaaaaaaaaaaaaaaaaaaaaaaaaaaaaaaaaaaaaaaaaaaaaaaaaaaaaaaaaaaaaaaaaaaaaaaaagggccggcccccaatttagggggctcgccccccgggaaataatttccgccccggtccttgagggttaccccttttcccttatagggggctgttttaaacttgggggaaattagggtcatatctgttccctggggaaaaaggttttcccttcaaaattccacaaaacttccggcccgaaagcaaaaaggtaaaacccgggggtcccaaaggagggacttacctctcttaattggggtagccttacttgccatttttctaaacgaaaaccctttcgtcccacgggaattaataaacccctcaccccccggggaaagggttctttccttctggcacccaggggcattttttttttccccagtgaactggccttcagcagttttccttcatcgcccttcccctgaaacattccccccaacgcctccatctttgtattcccaccactcctacatttctttttccatgtggataaacgccgcaatctacaatatccgaatcctccatnnnn

SEQ ID NO: 3800 - DNA, 1528 bp, Glycine max
  misc_feature (10)..(10): n is a, c, g, or t
  misc_feature (17)..(18): n is a, c, g, or t
  misc_feature (85)..(86): n is a, c, g, or t
  misc_feature (111)..(111): n is a, c, g, or t
  misc_feature (121)..(122): n is a, c, g, or t
  misc_feature (172)..(172): n is a, c, g, or t
  misc_feature (336)..(336): n is a, c, g, or t
  misc_feature (340)..(340): n is a, c, g, or t
  misc_feature (668)..(668): n is a, c, g, or t
  misc_feature (721)..(721): n is a, c, g, or t
  misc_feature (798)..(798): n is a, c, g, or t
  misc_feature (1313)..(1313): n is a, c, g, or t
  misc_feature (1348)..(1348): n is a, c, g, or t
  misc_feature (1463)..(1463): n is a, c, g, or t
  Peptide Sequence Number=SeqID_8011
  Probeset Number=SeqID_13579
gttggttttnttcttannttatttcatttttttttttaataaataactcgacaacatacaaaaattataataattattatactannattattcatctgccccttttaaatntttttatttnnaaacgcactgcacgaaatataactacaaacactccaataccacaacagangttaacccaagtccacgccttcttcaattgtattattattttagtttctccactccacgcgtctgtgacgcgagaaagaggaccaccaaacgaccaagtattaacctatctccctccccctaatatcacttcaccccactctatcttcgaacgacatctcaacncaanatctcctggatattctcgttgagttagtgctacctttctcacctccctgatctctcacttttatctcctccagactgcactcacgagatatatatccccactccaagcccgcacgacgaattaagattaattatatataaataaacatcccaaacataataaaataactaatcaaacgatatcaccaaccaacatatacaccaattataactatcaaacatttaatcataaacgtactaatccatatcattctcagacgaactataactcacaaacattagttatatatactccgcccagatctgcgcaattcatccctactcttatntttgtaggttttgtcctctctctgttctgctgttgatgtgtttctcgcttttntcctaattataacacacacactattttattactctcctaattattcaccctctcaacctgacccacatatctaatanatacatatatttctcatgtgagtaatatagacgattctgttcttatcaccaacctcaccacctattatcatgacactgttagagcactatgtgttgaccacaaccgcacatttaaatacataacacaccactccaattatcacgaaatactcctactagataaacagttagcgaatacgaatatatacatcacacactcatacttcttgatatttaacttcataataatcttcaccatatatgtaaaaatcatcacctcaccctacacctcctcaaaccacactaaaccgcgtaccactatgtgagttccaccccaaccgtatactcccaaggctcacaacccgctactcatcacatccatcctcatctctttgcgcccagatccacacccaccccctacagcattacactccaccactctaccgcagtcaccactaaatacatacacacatactcacacctcaaatacatgtaactcttcacaccacaaatatccatatacataatccgccccntcttctctcaattctcgtcgtgttccttccgaccnctgctgcgctatgctctctataaccttcatcacaacacctcaccctctggctatatcaccatctatcgtactctcttaactactacagcccaccatgccaacccactcccgccgncttactacccacatcactaacacaacccgttccgctagacgcgccactctcatctcccaatggcc

SEQ ID NO: 3801 - DNA, 2221 bp, Glycine max
  misc_feature (27)..(27): n is a, c, g, or t
  misc_feature (30)..(30): n is a, c, g, or t
  misc_feature (48)..(48): n is a, c, g, or t
  misc_feature (58)..(58): n is a, c, g, or t
  misc_feature (65)..(65): n is a, c, g, or t
  misc_feature (74)..(74): n is a, c, g, or t
  misc_feature (96)..(96): n is a, c, g, or t
  misc_feature (98)..(98): n is a, c, g, or t
  misc_feature (112)..(112): n is a, c, g, or t
  misc_feature (115)..(115): n is a, c, g, or t
  misc_feature (127)..(127): n is a, c, g, or t
  misc_feature (135)..(135): n is a, c, g, or t
  misc_feature (155)..(155): n is a, c, g, or t
  misc_feature (172)..(172): n is a, c, g, or t
  misc_feature (196)..(196): n is a, c, g, or t
  misc_feature (206)..(206): n is a, c, g, or t
  misc_feature (209)..(209): n is a, c, g, or t
  misc_feature (212)..(212): n is a, c, g, or t
  misc_feature (220)..(220): n is a, c, g, or t
  misc_feature (232)..(232): n is a, c, g, or t
  misc_feature (244)..(244): n is a, c, g, or t
  misc_feature (250)..(250): n is a, c, g, or t
  misc_feature (260)..(260): n is a, c, g, or t
  misc_feature (267)..(267): n is a, c, g, or t
  misc_feature (270)..(270): n is a, c, g, or t
  misc_feature (298)..(298): n is a, c, g, or t
  misc_feature (316)..(316): n is a, c, g, or t
  misc_feature (326)..(326): n is a, c, g, or t
  misc_feature (331)..(331): n is a, c, g, or t
  misc_feature (352)..(352): n is a, c, g, or t
  misc_feature (373)..(373): n is a, c, g, or t
  misc_feature (401)..(401): n is a, c, g, or t
  misc_feature (404)..(404): n is a, c, g, or t
  misc_feature (458)..(458): n is a, c, g, or t
  misc_feature (483)..(484): n is a, c, g, or t
  misc_feature (503)..(504): n is a, c, g, or t
  misc_feature (508)..(508): n is a, c, g, or t
  misc_feature (519)..(519): n is a, c, g, or t
  misc_feature (526)..(526): n is a, c, g, or t
  misc_feature (534)..(535): n is a, c, g, or t
  misc_feature (538)..(538): n is a, c, g, or t
  misc_feature (549)..(549): n is a, c, g, or t
  misc_feature (563)..(563): n is a, c, g, or t
  misc_feature (570)..(570): n is a, c, g, or t
  misc_feature (589)..(589): n is a, c, g, or t
  misc_feature (614)..(614): n is a, c, g, or t
  misc_feature (628)..(628): n is a, c, g, or t
  misc_feature (663)..(663): n is a, c, g, or t
  misc_feature (735)..(735): n is a, c, g, or t
  misc_feature (739)..(739): n is a, c, g, or t
  misc_feature (761)..(761): n is a, c, g, or t
  misc_feature (783)..(783): n is a, c, g, or t
  misc_feature (789)..(789): n is a, c, g, or t
  misc_feature (798)..(798): n is a, c, g, or t
  misc_feature (823)..(823): n is a, c, g, or t
  misc_feature (840)..(840): n is a, c, g, or t
  misc_feature (850)..(850): n is a, c, g, or t
  misc_feature (881)..(881): n is a, c, g, or t
  misc_feature (898)..(898): n is a, c, g, or t
  misc_feature (918)..(918): n is a, c, g, or t
  misc_feature (932)..(932): n is a, c, g, or t
  misc_feature (940)..(940): n is a, c, g, or t
  misc_feature (967)..(967): n is a, c, g, or t
  misc_feature (1017)..(1017): n is a, c, g, or t
  misc_feature (1031)..(1031): n is a, c, g, or t
  misc_feature (1038)..(1038): n is a, c, g, or t
  misc_feature (1084)..(1084): n is a, c, g, or t
  misc_feature (1214)..(1214): n is a, c, g, or t
  misc_feature (1302)..(1302): n is a, c, g, or t
  misc_feature (1439)..(1439): n is a, c, g, or t
  misc_feature (1464)..(1464): n is a, c, g, or t
  misc_feature (1477)..(1477): n is a, c, g, or t
  misc_feature (1495)..(1495): n is a, c, g, or t
  misc_feature (1593)..(1593): n is a, c, g, or t
  misc_feature (1618)..(1618): n is a, c, g, or t
  misc_feature (1654)..(1654): n is a, c, g, or t
  misc_feature (1665)..(1665): n is a, c, g, or t
  misc_feature (1680)..(1680): n is a, c, g, or t
  misc_feature (1682)..(1682): n is a, c, g, or t
  misc_feature (1698)..(1698): n is a, c, g, or t
  misc_feature (1721)..(1721): n is a, c, g, or t
  misc_feature (1738)..(1738): n is a, c, g, or t
  misc_feature (1779)..(1779): n is a, c, g, or t
  misc_feature (1786)..(1786): n is a, c, g, or t
  misc_feature (1905)..(1905): n is a, c, g, or t
  misc_feature (1944)..(1944): n is a, c, g, or t
  misc_feature (1955)..(1955): n is a, c, g, or t
  misc_feature (2048)..(2048): n is a, c, g, or t
  misc_feature (2067)..(2067): n is a, c, g, or t
  misc_feature (2094)..(2094): n is a, c, g, or t
  misc_feature (2107)..(2107): n is a, c, g, or t
  misc_feature (2143)..(2143): n is a, c, g, or t
  misc_feature (2171)..(2171): n is a, c, g, or t
  misc_feature (2173)..(2173): n is a, c, g, or t
  Probeset Number=SeqID_13580
cgacatgctgatgcagatgatgcatantangcatgatgacatgtgtanctatggtcgngtcggtnatatccagntagttgatacagtgcttctcgntnactcatctgcacgntcntgactgcgacgntgacgtcngtcgaagtgctgacgacagncgatgatcagcagtcgncgtaatcagtgatacgtatacgtncgtacgtacngancgntgcgactnactatgcgatcntcgtccatcgtngtcgtnctcatacgtngcagggntgnacgatgcatactctgactctcatgctantaactgatcatatcgcangtcacgttcncggcnttctaccagcctcggcagtgngcagtagcgatctcgctactncggccgctagtacagcgacacagctagntgnatgcgtcaagctagacactacgacgctgctacatcagtcaatgatcgtagacgnatcatcgtcgcttggtagtacgatnngcagctgctgtgtcgtgtnntgtntgtgtagtatntcgactntgtattcnnttncgtcattcatnctagtaagcactantatcgtntgcatctctgacgtcatcncatagtagtagattagtcgtcgtcngtgatgcctgatgntcagcagtcgtcacagtgtctactgagtagcacgncggcacaggtctcgtctatatgtctctagatacgtagatcatgatctttcgctgatgtcatacgtgacatgntgtnagcatgagacatatccctagtnatagtcgatttgtggacgtctntcgcangtcgtacgntagcagtgtatcgacgacatacgtngactgctagagtcgaanggcgtactgntgtagtgcatgcagtgagagcgcttacagcnagctactcgactaaganagcgcaggctacgttgcgtncccgcgatattcgntgcagtanagtctcacatgctatcatacactctcngttgatctatcgtatggctttcgatatgactcaataagcctccgtcgctntcgcagatgactanctagtcntgatctctagtgactagttgacgtgtgatgtgtacgtacagatggngagtgcgaagtcaatttagtgctgactgtagtacatgagtactcgttgtacgtactatgcgtcttagatcgctgctatgtctcacgagtacagttcgacgtagtcgacactctgtgagagccaatcctanttgtacatactgagctgcgcgcgccggttgcatatcggtgtatcatcagcagcgtgcaaagtacatcacttcgtagatgatgagttantcgcttgatctgatagatatcgtcggcatgtacgatagctattgtatagtcgcagatagtctgctcgctgacgtcagcgtcagatatcatcgtgcatcgatacagcagtgaatcatatctgtatatagagagatgcntagatatgactggctgtatcatgcnagtgttagagcantattcagatcgacgagcncacgtcacagatagtgaggtgcgtgcgtgtcagtcagtcactagattgatgatagtcagtacgcgtgcatgtgacaataatgataaatagtgcagtgnatgctaggatgtggagtgtatatgntcgacgtcgagtgtgtagtcatgcgcgacgtcgtcnttcgcaatacntcatatcgtagtcangntgtgcgctagcgggtngagcagtaaagaacagcatatgnagtgatctatgtatacnataatcataggtgggggggggagattctttcatgattgatngtgatantaatcgagaatgagtcacatgataagaagcatgaatagagatatgagagatcgctcgtcatcgatcagcatgtataaattatctatcgatgatgagtgaaaatcacacatctactctcntgatacaatatgtaaattgtagtgatgtatgatatgtanagatgataagnttatgtgagttgtaacgaatctgccctcctctctctctgcatacagggtagatcagaacgtagtatcagtctactgctagtgagttggatctntgtagtacgtgcgtcgtgncatatgtaatgtatcacaggtgagtanatatatggtcttnctctatttgccgtgctgtgaatctagtatgataganacgataactgccgcgttctttcctactncncctcccaccactcccgcacccccccagcgcatctagcattacacacta

SEQ ID NO: 3802 - DNA, 2018 bp, Glycine max
  misc_feature (1)..(1): n is a, c, g, or t
  misc_feature (62)..(62): n is a, c, g, or t
  misc_feature (89)..(89): n is a, c, g, or t
  misc_feature (154)..(154): n is a, c, g, or t
  misc_feature (174)..(174): n is a, c, g, or t
  misc_feature (192)..(192): n is a, c, g, or t
  misc_feature (218)..(218): n is a, c, g, or t
  misc_feature (227)..(227): n is a, c, g, or t
  misc_feature (250)..(250): n is a, c, g, or t
  misc_feature (331)..(331): n is a, c, g, or t
  misc_feature (382)..(382): n is a, c, g, or t
  misc_feature (388)..(388): n is a, c, g, or t
  misc_feature (443)..(443): n is a, c, g, or t
  misc_feature (462)..(462): n is a, c, g, or t
  misc_feature (469)..(469): n is a, c, g, or t
  misc_feature (474)..(474): n is a, c, g, or t
  misc_feature (481)..(481): n is a, c, g, or t
  misc_feature (492)..(492): n is a, c, g, or t
  misc_feature (494)..(495): n is a, c, g, or t
  misc_feature (518)..(518): n is a, c, g, or t
  misc_feature (531)..(531): n is a, c, g, or t
  misc_feature (568)..(568): n is a, c, g, or t
  misc_feature (587)..(587): n is a, c, g, or t
  misc_feature (594)..(594): n is a, c, g, or t
  misc_feature (756)..(756): n is a, c, g, or t
  misc_feature (964)..(964): n is a, c, g, or t
  misc_feature (1060)..(1060): n is a, c, g, or t
  misc_feature (1088)..(1088): n is a, c, g, or t
  misc_feature (1095)..(1095): n is a, c, g, or t
  misc_feature (1120)..(1120): n is a, c, g, or t
  misc_feature (1144)..(1144): n is a, c, g, or t
  misc_feature (1176)..(1176): n is a, c, g, or t
  misc_feature (1181)..(1181): n is a, c, g, or t
  misc_feature (1190)..(1190): n is a, c, g, or t
  misc_feature (1224)..(1224): n is a, c, g, or t
  misc_feature (1258)..(1258): n is a, c, g, or t
  misc_feature (1261)..(1261): n is a, c, g, or t
  misc_feature (1290)..(1290): n is a, c, g, or t
  misc_feature (1312)..(1312): n is a, c, g, or t
  misc_feature (1358)..(1358): n is a, c, g, or t
  misc_feature (1375)..(1375): n is a, c, g, or t
  misc_feature (1386)..(1386): n is a, c, g, or t
  misc_feature (1403)..(1403): n is a, c, g, or t
  misc_feature (1459)..(1459): n is a, c, g, or t
  misc_feature (1463)..(1463): n is a, c, g, or t
  misc_feature (1499)..(1499): n is a, c, g, or t
  misc_feature (1506)..(1506): n is a, c, g, or t
  misc_feature (1513)..(1513): n is a, c, g, or t
  misc_feature (1517)..(1517): n is a, c, g, or t
  misc_feature (1534)..(1534): n is a, c, g, or t
  misc_feature (1543)..(1543): n is a, c, g, or t
  misc_feature (1548)..(1548): n is a, c, g, or t
  misc_feature (1574)..(1574): n is a, c, g, or t
  misc_feature (1619)..(1619): n is a, c, g, or t
  misc_feature (1627)..(1627): n is a, c, g, or t
  misc_feature (1716)..(1716): n is a, c, g, or t
  misc_feature (1734)..(1735): n is a, c, g, or t
  misc_feature (1737)..(1737): n is a, c, g, or t
  misc_feature (1743)..(1743): n is a, c, g, or t
  misc_feature (1761)..(1761): n is a, c, g, or t
  misc_feature (1774)..(1774): n is a, c, g, or t
  misc_feature (1858)..(1858): n is a, c, g, or t
  misc_feature (1869)..(1869): n is a, c, g, or t
  misc_feature (1883)..(1883): n is a, c, g, or t
  misc_feature (1906)..(1906): n is a, c, g, or t
  misc_feature (1924)..(1925): n is a, c, g, or t
  misc_feature (1928)..(1928): n is a, c, g, or t
  misc_feature (1943)..(1943): n is a, c, g, or t
  misc_feature (1949)..(1949): n is a, c, g, or t
  misc_feature (1954)..(1954): n is a, c, g, or t
  misc_feature (1973)..(1975): n is a, c, g, or t
  misc_feature (1977)..(1977): n is a, c, g, or t
  misc_feature (1984)..(1985): n is a, c, g, or t
  misc_feature (1991)..(1992): n is a, c, g, or t
  misc_feature (1994)..(1996): n is a, c, g, or t
  misc_feature (2001)..(2002): n is a, c, g, or t
  misc_feature (2016)..(2018): n is a, c, g, or t
  Peptide Sequence Number=SeqID_8012
  Probeset Number=SeqID_13581
nccgtcgatcgatagcgctcgtgctgcacacagcgattcaaccaccgcgcagcgatggtatngagtgtcagctggatacacggacatgntaggatgcagcgggtactgcgcgactagatgactagacgcgacaatcagtagcctaggaatttancagacgcgacgtgtcagcgncagtagacgacgtatcgnacaatcaatgcgtcgtaggtagtgantgatgacgnaggacgacgtgcaagagtcgcancacgacgtccgtcggtctaatattagcatggacgtactacacgatgtgctgcatacgttgatgtagcagtagctgagaaanactcatcgcatagagctcatggcgctgggcgctgattgtcatagtcaccancttcgntgcgtcagtgctcatgatatggggcagctagagtagtatctacatacagcatacntagagcactcaatacatgntgtgagngggcnagagatntagcgacgatngnntgagcgatattcgtggctgtgtncaaatctagcagncatacgtatcgacatcttggatgtgaagacagtactntgacgtagatgtacggtanggtcgcntgatacggaacagcatagatgtcatgatgtgagcatatacatacatcactaatatatcatatcagagcgcgccatctctagcgatatagcagactgcacgacacggagtctcacgcacagtatgtgagacgatcgcgtatcacaagagcacgatgcacgaantcaagcaagagacgctgcgatgtcgtcagcacaaatcaagcaacagcagtgaagatagtctcgattactcgcgagtagtcgctgacagatacatgagacgtcacggcggtgacgacgcgcaccatacaacatcgagcgagtcgctcacactcaacagacgtatgcatcacactaacacgcgtgccatcgcacacaaccagaacacacncaacatagatacacacatagacgacgtgatatagaggtattaagcatgaagtctgagagatgtaatattgatgtgtaaagagaagatggctgcatntcgatgtgatggtgtatagagatgacangcgtcgntcatcacgtcgtgcgcgtagcgagncaacgacatgccaggacggagtcngctgccgcgcgcgaacacacaacgcgccagcnaccanacgaacagncatatgcacgtcaacgcgagatagcggagatcgncacacgtcatcgctctgcgcgtcgagtgctgtgntgngacgacttgggagtatatatgtattatantggtgatgtgactatatagagnaatatcgtagctgcatgatacatgtaacgcaatcagtgactatgtncacatcatatgcacacngctgcatcagnaactaatcatcatacancgtaatatcacgtgatacagatagcagtgagagggaccagcgcgtgtgagtcaatnacgntgagacgacatgatctccatcctcactgtgtatgtncgtgttngtatatntatntgctagtcatagtagtntgttgtagngtacnccctgctcactcatccgagcactacngtagtgtcaaggcaggagacgtcggcgagtgcgcgttacttcgcngcgtcttngagagcacgcggtccagtctgctgcgctagtgagcagtgtgatctggacagttgtcgcacatacaccgtcgatacataatctactgtcntgcgtcatcatcgcacannanacgcancacacaccacactacaancaaaaccacaccncctacacagatatagtagtatacacttcacgctctgtgcgcgctgcttagtattggtagtagtcgatgtggtatgggcacaacntacactatcancacatatactactncacttcaggccagttcaccatcnccacacaccgccactgcnnttngttgaatgagcctangtgcgnggtgngtcccggtgtagagatagnnnangcatggnnggagannannngcccnncacccacaaccccnnn

SEQ ID NO: 3803 - DNA, 187 bp, Glycine max
  Probeset Number=SeqID_13582
gaaagactcagatcctttctttgtttatctccgcctggatctcgaagaccaaaccatgtccgccgccgacggaatattccgctgcatcttcgaaggctgcatctccggcctcgactccgccatcgagcggcgtccctaccacaaaaactgcgactgcgcgcttcacgacggcgccaagaagagtcag

SEQ ID NO: 3804 - DNA, 1501 bp, Glycine max
  misc_feature (1)..(1): n is a, c, g, or t
  misc_feature (95)..(95): n is a, c, g, or t
  misc_feature (305)..(305): n is a, c, g, or t
  misc_feature (1172)..(1172): n is a, c, g, or t
  misc_feature (1392)..(1392): n is a, c, g, or t
  misc_feature (1459)..(1459): n is a, c, g, or t
  misc_feature (1477)..(1501): n is a, c, g, or t
  Peptide Sequence Number=SeqID_8013
  Probeset Number=SeqID_13583
ntactacttagagtcttaacgcaccactctatattcaatatatgacactaatatgatatcgtatctcatgctatttgatatatatctactatgtntgtaagtaagccgggcagtcacatcatacacacacactgcaccgcagacatctagtactcatagtattacaatcaacatactaccggcgcgcacaacaagtactactccacattttcgcccttctctctgtcgtccgtactatcatcttataacaattatataatatgtctgactagtatgctacacccccaccgactcgcgccacacanctacagcacttcttccacttcctcctccatgtcccacccgaatgatcagccgccatatgcgcatattcacttgagcaccaaactgcacaccgttattgaacacatacatcactagtggtcgaacacacacgagtacccagacattgttcttacgcctctccgtcacatcctcacactatcgcaacgtcagtaaacagacatacaccttctcgtaaaatgtctcgctcatccgctacgctctcattattctgtatctgtagcttatgtgttgtgttcccattgtcccattcttattctgtagattgttgctacattttctacacggcgcggcgtggcctctataaattcccctcgtatagtgctactccaatctcacatacttctcgatctccagggtattgcatgccaaaacggggagtcgcgacccgcagcccgctgatacctctaagctcctccatactcttcagtcagcttgctagctctccgcgtcctagtaatcaaagtggtatcccacactctctacccactacgctacgtgttactcgccagtctagagacacgacaacgacgccaatctaaccccaccaaccgtagacataccacaccccatcaaattcttctcttcctattgttatagtccacccaaatgacactcacatccacacgctctctcctcatctagcatatcacatcgatattatagttatttatcatgatgtgttataagttgcgcacaatgacccacgactcctatctcattcctacaatctctaactgacactcgagcagaagatgatctttgccacatgaacatacataaactacatacaccatagttatgtcatgatccttatcataagccagagnacccactaccatctactacactatcgcttcttcgacttcttctcatcaatctttattgtcgcatcactctcatttttatctatgtgggcggtaaaaaatacatagttacgcgaatcttctcgtcaactaccacacatgacacaaatagcaacgactcgtcgcctacgggggcgaacaacccaaaacaagacactcacatcaacctcccgcgcgacacccntcctctcctctgaaatctgctgtgatagaataatggccaccgctccgctccgcgccccagcccgcgnccccggcaagggaatttnnnnnnnnnnnnnnnnnnnnnnnnn

SEQ ID NO: 3805 - DNA, 1001 bp, Glycine max
  misc_feature (691)..(1001): n is a, c, g, or t
  Peptide Sequence Number=SeqID_8014
  Probeset Number=SeqID_13584
gtttaataaataaatttaaacaaactttttttaactcatagataagctaaatttagtttttagaaagttattttctttttctataagtatttatggataaatttatccaaaaagggcttaaggttttaagctttttatctttctctcatatatatgctgattatgtcttcgaagcgaggatttgcgagtcccatcttccccttattttcctgcatatgcacaaggacatgaaccaccaccaatggtgcaggagcggttccagagtgttattagatagctttttcaatatctaggccctgtttttcttcctctagggttgagtgtgcaccttctatttagtctttgtctttcaactactaacaatatgttttggtatttagagaataatacgttgtgggggagccgtagatgatgatatgtctaacatcttagtcgcccagcttctttaccttgatgtcctaacaaggatattgtcatgtacgtaagttctccgggaggatcagttacagctggcatggcaatatttgatacaatgaggcatattcgacctgatgtgtccactgtttgcattggactggcagctagtaagggtgcttttctgctcagtgcagggactaaaggtaatgattcttttaccatgagcagtaagggtgcttttctgctcagtgcagggactaaaggaaagagatannnnnnnnnnnnnnnnnnnnnnnnnnnnnnnnnnnnnnnnnnnnnnnnnnnnnnnnnnnnnnnnnnnnnnnnnnnnnnnnnnnnnnnnnnnnnnnnnnnnnnnnnnnnnnnnnnnnnnnnnnnnnnnnnnnnnnnnnnnnnnnnnnnnnnnnnnnnnnnnnnnnnnnnnnnnnnnnnnnnnnnnnnnnnnnnnnnnnnnnnnnnnnnnnnnnnnnnnnnnnnnnnnnnnnnnnnnnnnnnnnnnnnnnnnnnnnnnnnnnnnnnnnnnnnnnnnnnnnnnnnnnnnnnnnnnnnnnnnnnnnnnnnnnnnn

SEQ ID NO: 3806 - DNA, 460 bp, Glycine max
  Peptide Sequence Number=SeqID_8015
  Probeset Number=SeqID_13585
agggttctcactccaaaagcgatcgatctatctgaatcggtgaatcatcatctcgtttccgtttcaattggtatgtatacagcttcaatttcgtctccaaaatttccacaagagccttgatctgttgtgtacgtgtacgtacaggcacgtcgtgcttcctcctgacaccgctaagcttctcccgaagaatcgtcttctctccgaaaatgagtggcgtgcgataggagtgcagcagagccgtggatgggtccattacgccattcatcgtcctgagccacacatcatgctcttcaggaggactctcaattaccagcagcagcagcaggagaaccatgctcaaaacgtcctcgctaagtgattctgagttgttgtgcttgttatgtttcttgtaaacatggtttgtgaaccacctctaataactttgtgttcatgtcatcttggttggagaaaaacatgcgag

SEQ ID NO: 3807 - DNA, 1183 bp, Glycine max
  Peptide Sequence Number=SeqID_8016
  Probeset Number=SeqID_13586
cttcctctcctcagatcgttcctcttcgtctccttcaatcactcgtaagactcttccgagacggtgtgttcgctctttgattgaatggaaagtgaagacatgcattcgaaacctgacggtgggaatcagatcgtttcagagtcggttcatcatcactccataaatagtttaaacccttggcaacgtgctgctgctgcctgcaatgcaagttctttagtggaggaagctggagataagtctatagctttggagaaccaaaacaattgggaatcaactaatggttccaagtcaccatctcataaagatgaaaatggtaacaaggaatcaccacaagtcacatcctctccccaacaatcagctggagattacagtgaaaaaagtcaagaacttgtgcatgttggcgtcacaggacctcctcaccctcaacttgttagccacacaggatgggcatcctcaaatccataccaggatccttattatgctggaatgatgggagcctatcccatggcttatgttccatatggtgggatgcctcattcaagaatgccactgcctcctgaggtggcacaggaaccagtttatgtgaatgctaaacagtaccaggcgatacttaggcgaaggcaggcacgcgccaaggcagagcttgaaatgaagctaatcaaatccagaaagccttatctccatgaatctcggcatcagcatgctatgaggaggcctaggggcactggaggccggtttgcaaagaaaacaaacaccgaagtttcacagccgaaacctggagaaaagaacaatgctactcagtccccgacgtcatctcactctgaccaacctgaagcctggaatgatgagtgtagaaaacagtctgaagagatgcaaagctcagcttctaagagaagggaagaagcagactgttcagggcaacaatggaacagcatttcctcaaaccatacttctgaagctcgtctagccatcaaatgacatctccactggcaactcattcttggctctctctttgttggcttatttggtagcagccattgaagagtcccctgtacaaatacttctgtgtttttcttcttttgtgatatgtcaaatgttactgctttcttttgtcaactctctttagcacatttttgaatcaaaaactatgtgtttaaaattaaattccaaagtgtgcaaactg

SEQ ID NO: 3808 - DNA, 1439 bp, Glycine max
  misc_feature (64)..(64): n is a, c, g, or t
  misc_feature (155)..(155): n is a, c, g, or t
  misc_feature (1038)..(1038): n is a, c, g, or t
  misc_feature (1095)..(1095): n is a, c, g, or t
  misc_feature (1129)..(1129): n is a, c, g, or t
  misc_feature (1180)..(1180): n is a, c, g, or t
  misc_feature (1198)..(1198): n is a, c, g, or t
  misc_feature (1292)..(1292): n is a, c, g, or t
  misc_feature (1331)..(1331): n is a, c, g, or t
  misc_feature (1339)..(1339): n is a, c, g, or t
  misc_feature (1368)..(1368): n is a, c, g, or t
  misc_feature (1395)..(1395): n is a, c, g, or t
  misc_feature (1417)..(1417): n is a, c, g, or t
  misc_feature (1439)..(1439): n is a, c, g, or t
  Peptide Sequence Number=SeqID_8017
  Probeset Number=SeqID_13587
gcggtagggtgcgtgtcttcggtgactaccaaggctgtttgcgatgcgcgtggggaagaagccntaaatacgttacaacatgtcccctcggagaaaaagaaatagaggcatcatcgcctcacggtacactggcagggcgaaccatgaggtgcgangggacgagtgggtggggatggttgtcggcttgttcttgaggatggctattctgcgccctcctcgtacttgctgtgattctctgtctactatgcgtacgtgtttctgtgcctccttcagtgatcttcctcgtacgtccgtctagcgctacacgcgagttgtatgtcagcttcggtgtcacgatagtgtgggtgtggtgggagggtgccgtggcgagaaacgcggcgcgcggccacgaatcgctcctctagtatttatactaactacatatataggaggcgcggcggacgtcggatgctgggttgtgtgtggtggtgttgcgtgcgcgggtgggcgtgggggatagatgctgtcgcgcagcgagagacgtgtccgggactccacctattaaatttatatacaattagtctggttatgtactatatatctatacagaatcgtctcactaatatgagatgtgaggttatgcgtgtatttgttcgtatgtcagacaatggaggcgcgttgctgtttgcgatgtggtgggtaaggccggaggacgttggtgcgctcgcctttcgtgcgtggcatgtcgtgtatgacggagagagcgcgccggatacagtatttgcggtgcaattgtggcgatcacgtgcgtaataaccagcccggcgacgtggttgctgattgtatgagggtaccgttgctgctatggtgcgctgtggtcgtgaagtgctcgaggctgtgttgtgtttggtcgcgattagatatgactgactagagaggtggtgtgatgtagcgcgtaagacgccggaggagacgacgtgccagcgtgcgcacagtatacacacgagctgagcagcggcagtcgatagtagtggagccacgctgacatcgagcgtctcntgacagctgctgatcgtagttgtgtggtgctgtgtcgactctgcgatcgaccacgcngtctgatgcatactttgtggagaccgtggagtgncgtggacggatacgatgacactaaacttacgcacgagtatgcgatcagcgncgcagctactagcgtaangtttgagattgtcagcgcgactgcaatatggcctagtatgtcatagtgctatgcacgatggcacatctattactctactattgtgacgagtcantacgcccttatctctcgcgtgcaatatcgtttcgtcgtngcgctcgngatttttcgtgcttagacggactgtgcgnagtctgtccgacgacagctatacggtnctgtgtgagatgatcgtgcgtnagcgcgctccgcactgctctcn

SEQ ID NO: 3809 - DNA, 636 bp, Glycine max
  misc_feature (341)..(341): n is a, c, g, or t
  misc_feature (444)..(444): n is a, c, g, or t
  misc_feature (464)..(465): n is a, c, g, or t
  misc_feature (469)..(469): n is a, c, g, or t
  misc_feature (474)..(475): n is a, c, g, or t
  misc_feature (527)..(527): n is a, c, g, or t
  Probeset Number=SeqID_13588
aactcctttcccccctcccgttccaactttattgtgtttaaacacaaccaaggccaccgccacggcgaggagcagtgccctcaccatcccactcctgctccggtccctggcgaagccgtacgcctgccggccggcagacgccggctggcgtgcgccttccccgtcgtcgctggcgtagtcgtcctcgtcacccgcacgacgcttcctagcgtcctcctccatctcctcgtggcgcttcttctcttctgcggcagcggcgtgccgcgcagcttccgcctcgtggtctgccgctgactttgaggcgtcctcgaggggcgtgagcctgggcatgatgacgtggnagacgcccgtcttctccgacctggcgcggatgccgccggcgttgcagcccctcgggaactggacttccttgcggagcgggttcactggccgccctcgagcggncggtcgccgctgaccctcannccgncgtanntgccgatctgcacctcaggtgctccttcttgaacccggggagggtgacgacnaaggtctgctttgcggcgtccttccacgagtcctgcgacggccgaaatccaagtaagtccgtggggcggccatggcttaactgcaaaaggtggccgagctgttctaaaa

SEQ ID NO: 3810 - DNA, 1959 bp, Glycine max
  misc_feature (1)..(7): n is a, c, g, or t
  misc_feature (12)..(16): n is a, c, g, or t
  misc_feature (20)..(25): n is a, c, g, or t
  misc_feature (30)..(39): n is a, c, g, or t
  misc_feature (73)..(73): n is a, c, g, or t
  misc_feature (144)..(145): n is a, c, g, or t
  misc_feature (241)..(241): n is a, c, g, or t
  misc_feature (397)..(397): n is a, c, g, or t
  misc_feature (437)..(437): n is a, c, g, or t
  misc_feature (471)..(471): n is a, c, g, or t
  misc_feature (616)..(616): n is a, c, g, or t
  misc_feature (639)..(639): n is a, c, g, or t
  misc_feature (730)..(730): n is a, c, g, or t
  misc_feature (742)..(742): n is a, c, g, or t
  misc_feature (1008)..(1008): n is a, c, g, or t
  misc_feature (1182)..(1182): n is a, c, g, or t
  misc_feature (1271)..(1271): n is a, c, g, or t
  misc_feature (1444)..(1444): n is a, c, g, or t
  misc_feature (1590)..(1590): n is a, c, g, or t
  misc_feature (1713)..(1713): n is a, c, g, or t
  misc_feature (1811)..(1811): n is a, c, g, or t
  misc_feature (1836)..(1836): n is a, c, g, or t
  misc_feature (1864)..(1864): n is a, c, g, or t
  misc_feature (1896)..(1896): n is a, c, g, or t
  misc_feature (1909)..(1909): n is a, c, g, or t
  misc_feature (1935)..(1935): n is a, c, g, or t
  misc_feature (1957)..(1957): n is a, c, g, or t
  misc_feature (1959)..(1959): n is a, c, g, or t
  Peptide Sequence Number=SeqID_8018
  Probeset Number=SeqID_13589
nnnnnnnaaaannnnntttnnnnnnaaaannnnnnnnnnaaccgatacgcatgaatagctatgccatcttttntataagagtaacgtgtattataaatatggatgtgtggtcatatctacttcaaatatacatatcccgatganntatttctctccctcctcgatgcaaagagatgatatgaatgcgagcgcgaagtattttcttttcacatagtcgttataataacacggtcggctgatnttataatataaagtcacgcaggccgcacacgaactaccctgccgagtgcaccgtgagccacagagtctttctcctccccacgccgcgacaagagcaacgcccgagacgccccgcggcgccagtaataaaggtacagataggcagatactactcagnttcaataactatttatgaatattagccataatactgtaantgattactcaaactataagatatatatgacatanagaaccgcaaacctataccaactctcaacgcagactttgaaatcgcgcgatttaggtctctgcgctgcgctgcgcgccagccgagacaacaaataaagcgaaccaccgaccctcacgtcttctgcgtgtctccgaccacacctcntaatagattatatattgtataanagagttgttacattatatttgttacatctacagctctcaatatattccttaatatatctatatcttgcaatgtgatatccgcatcagcatnctgccgcgcccnttgtacttgccctcgtgtctactcttatactctcattctgcttaccgcctccacacacgacacgacctactccatgcaaattatacacatcactcacactcactatatctacatatgaagatagcacacacaacagcagatcacgacagcaaacacagtgcgaataacaaatacacagcatcctgtatggagttagcagtccaggctgacatgcccttacttaatatatcttatactcactcactgctactcttgccgttactaanatgacggcgcgattcttgtagcgctatgcgagccgttcctgtcgcgcacgcagcacatatgatgacacaccgtagcacgcacacgaaatagttagctcagcgcgataccatgtcgtgatatctccgaatagctataacatagtacgaccgacaccatgacgactgatataacanacgcaagagagacgaagaatgtgtgaattcataactgacaagcaacacgcacgattatatatatgagtatatatacaagcgatagcacnaccacggcggtatattataccttctctgtctgtcccgtcgacaccctcgctcaagctcgtactgctgtcgcatagcatgtatatctcgcatataataatagtaatcattatgtgtaggctagcgcacgactgcgtcgctagcccatcgacgcatcaacatatctactacagcntgactcagcatatctcgcgtcgcagtatatgtcggtacgtgtgcggcgcacgcagtcgcgtgcactactgtcgatcgatatcatcttttactatatctttcacactacatatacctcagtgcactggcatagcaaagtatatatangatcgaaatacgatgaacatacactcacacatatcccaaacatatattacacactcctcactagattatacatcataacacatcacacactagatatatatatacgactcgatcacagactanatccgatctcgatcatatctattaatatgacgatatcgacgtacatgatcttacgatcagtctgtcacacccacccggtacgtgacacgttgacgcgncgcgccgtcgaccagcacacactcntttactatgctgataatgacgcgcagangcctggctgtcagactatataccgtgtgtagngatagcggcacanttggtattctggcgggtgcacatcgngctcgatggcgggtcctcgtgngn

SEQ ID NO: 3811 - DNA, 451 bp, Glycine max
  Probeset Number=SeqID_13590
aaaaatatgatcttacaattgtaaagaacaaaccttgctctgcgccaacaagatcagaaacgatttgtagaaccgatgcggcttggaacaaacaatcaaagcaagccggtctcgcctggatattcacaggagaaggaatcaactccaagctggaaggatcaagtacgcaagcgttcgtcaactcccccgatagccgaagctctcgcgatgcgactcgccctcatcaaggcagcgaccccaaagatcttttttctcatcaggatgtcctccgataatcataaaagcaattaacaatgacatgcaggtgaaagaaattcatagaatcgtttgtgatatctaggcaatctgctctgtgttcatagttctcatgatttcaacaaaaatgccgacgcgttagctaagctctctcttagatctgcttctgtatttgacccttcaatgagctgattgg

SEQ ID NO: 3812 - DNA, 600 bp, Glycine max
  Peptide Sequence Number=SeqID_8019
  Probeset Number=SeqID_13591
gttgattccacaaaactatgagatatcttatagtggctccatataaggaatattattatcttcactcgggtaggcatgatcattcgtacaaacctcaatcattctcattctctccctgttaatttgtcttggaacgtttttttacaaggacctgttcatataatcccctcaaacaacgatcaatgatttgttctaccccccatgaaagcaaaatcccgctccccctaataaatcaaccttgtgaatctcttaactcgggcctaatgaacccataaaataaacggttctataaactataatcccgcctcccctgttagtttagagtaaatccccccctgagggtttttcttcacgggggggggtttatcctttatcttaaaaaaattgttaattcctattaagagtaaagaaactatatcctccgagataaattgatgctaaaaaggagctacccctaattatctgttttttaatttattttttagaaaaaaggatttaagaaaactcttttaccaacaaaatatatatttaaactaatttaaacccacattttttaatcgctgggcttcatctcttctgaaacaattacggccccggttt

SEQ ID NO: 3813 - DNA, 1969 bp, Glycine max
  misc_feature (37)..(37): n is a, c, g, or t
  misc_feature (198)..(198): n is a, c, g, or t
  misc_feature (227)..(227): n is a, c, g, or t
  misc_feature (229)..(229): n is a, c, g, or t
  misc_feature (237)..(237): n is a, c, g, or t
  misc_feature (832)..(832): n is a, c, g, or t
  misc_feature (938)..(938): n is a, c, g, or t
  misc_feature (1153)..(1153): n is a, c, g, or t
  misc_feature (1222)..(1222): n is a, c, g, or t
  misc_feature (1225)..(1225): n is a, c, g, or t
  misc_feature (1265)..(1265): n is a, c, g, or t
  misc_feature (1317)..(1317): n is a, c, g, or t
  misc_feature (1364)..(1364): n is a, c, g, or t
  misc_feature (1366)..(1366): n is a, c, g, or t
  misc_feature (1368)..(1368): n is a, c, g, or t
  misc_feature (1428)..(1428): n is a, c, g, or t
  misc_feature (1440)..(1440): n is a, c, g, or t
  misc_feature (1465)..(1465): n is a, c, g, or t
  misc_feature (1471)..(1471): n is a, c, g, or t
  misc_feature (1473)..(1473): n is a, c, g, or t
  misc_feature (1475)..(1475): n is a, c, g, or t
  misc_feature (1552)..(1552): n is a, c, g, or t
  misc_feature (1699)..(1699): n is a, c, g, or t
  misc_feature (1701)..(1701): n is a, c, g, or t
  misc_feature (1739)..(1739): n is a, c, g, or t
  misc_feature (1772)..(1772): n is a, c, g, or t
  misc_feature (1784)..(1784): n is a, c, g, or t
  misc_feature (1797)..(1797): n is a, c, g, or t
  misc_feature (1969)..(1969): n is a, c, g, or t
  Probeset Number=SeqID_13592
ccatccctctactcgctctctcctctctcacatgcgnacgcagatgaagagtccatccactcccacacaaaccaccacaatacgggtcgcacacgtggcctctacaccaccagctcggcactccgtacgcggtagttcgccctcctctccctctcttatctcgtctggtctgttgatgactgatgctctgattagtgntgcgactcgtctgaccgctggagtgtccnanagtacctncctaccccatcacccctgccactacgcgtcgcgatgctcgtgtgcgcgtaggatcggcgtgatgcgcactacacgtacacaacttcgctcctatttctcttcgttgctcggggcttcgggggctactcggtgcgcgagcctcgtgacaacgagtatgtgtcactaagacaaccggtacgatcagatgggagtgtgcgagtgacgttgcggcattggtctgtaggtcatatctgcatcacttccgtgctcacatgtcgagctgtcgtctctatactgagtcatgaacatcaccagcgtctatgctcttcttgaaagagcatagacttgacaaccaactcgcttgacaacatactcgacaatagatatcataacataatgtgacacgcactctgtgagtcgaagggaggtggacagcgtagggaatagccagccgcactcgctccggcgtctcgctcctcgcgcccctcgcatgttcctcctcccactctacgacgattgctgaggtggcggaccaccacaagcgaagacgcgcactagcatagggaacgcacaatgatgtcgactgccatgcgcctcttcttacgtcgtacactcncctccacaccacttaccttgtgttgtatccatgagtgttcttcttagctatcgcgtctcaccaatcgtgacgagtgcagactctacgactgcacatactttctctnctcacggacacttcctgcacgctgctctatacctgctcggcgcgatattgtcggtgcagtacaatatagtatcaatatgtcaggatgtgtattgtaatgtctagatcacactcacagtgcttggtatggtgatatctcggcggtgatgctcacgatgcatacctatttatctgcggtaccaccttccgatttgagctgcatgtgcactaccgttngagcactccccgtacgtgatcagcgcgtgttgcactcgctcagcgtggtacatcagcacagtgacgcanatnagacaggagtcggtgatagacgtatgtgtatacacacttngtgctgtcggcgctagctatacttccgtatgcactcgcagcggtgtatgacntctgaacgcgttattgaacaacattccagtacttcatgtcgacacantncncgtatttctgtcgtcattgtgcaatatatgtagcatcagtgccgcatgcgctgagatgcngttgtcagcaantcccgactcgtgtcagtatccgcgnctgctngntnctgtcaatgctacactctcgattacctgcgagatgcatttcctcaggtacatgatgtgcgtgtgacgccatctctantatctctgacctgttatcgtcgtctcacgatagcgcctatgacactctctgcgtcaatcctatatctctcatctgtactgcacgcctctcgttcgcatactatacactcgtgctcgtgggtcgcgactttcgtgtcgcgaatgcttncngcgatgtggcacgacgcatactggctcgaccgcgatcntcgccacatcgtctactcgctcacacgcctgancgcgcgctcgancgctcatcgcgangcgcgcggaccgcgtgcaatcactcgctaacttgagtgaacagcgtgactgctgctgcaggcgcgatgtctacgtcgatacgacagactcgcgagcatctggtcgcgcacaaactgcatgatgacgatgggatcacagatattcgacttagcgtgaatgtcgacatcgacgn

SEQ ID NO: 3814 - DNA, 1443 bp, Glycine max
  misc_feature (62)..(62): n is a, c, g, or t
  misc_feature (68)..(68): n is a, c, g, or t
  misc_feature (77)..(77): n is a, c, g, or t
  misc_feature (80)..(80): n is a, c, g, or t
  misc_feature (82)..(82): n is a, c, g, or t
  misc_feature (186)..(186): n is a, c, g, or t
  misc_feature (201)..(201): n is a, c, g, or t
  misc_feature (207)..(207): n is a, c, g, or t
  misc_feature (216)..(216): n is a, c, g, or t
  misc_feature (229)..(229): n is a, c, g, or t
  misc_feature (241)..(241): n is a, c, g, or t
  misc_feature (258)..(258): n is a, c, g, or t
  misc_feature (269)..(269): n is a, c, g, or t
  misc_feature (279)..(280): n is a, c, g, or t
  misc_feature (282)..(282): n is a, c, g, or t
  misc_feature (300)..(300): n is a, c, g, or t
  misc_feature (337)..(337): n is a, c, g, or t
  misc_feature (358)..(358): n is a, c, g, or t
  misc_feature (360)..(360): n is a, c, g, or t
  misc_feature (387)..(387): n is a, c, g, or t
  misc_feature (398)..(398): n is a, c, g, or t
  misc_feature (401)..(401): n is a, c, g, or t
  misc_feature (413)..(413): n is a, c, g, or t
  misc_feature (428)..(428): n is a, c, g, or t
  misc_feature (457)..(457): n is a, c, g, or t
  misc_feature (466)..(468): n is a, c, g, or t
  misc_feature (477)..(477): n is a, c, g, or t
  misc_feature (481)..(481): n is a, c, g, or t
  misc_feature (483)..(483): n is a, c, g, or t
  misc_feature (485)..(485): n is a, c, g, or t
  misc_feature (491)..(491): n is a, c, g, or t
  misc_feature (517)..(517): n is a, c, g, or t
  misc_feature (520)..(520): n is a, c, g, or t
  misc_feature (545)..(545): n is a, c, g, or t
  misc_feature (547)..(547): n is a, c, g, or t
  misc_feature (551)..(551): n is a, c, g, or t
  misc_feature (555)..(555): n is a, c, g, or t
  misc_feature (560)..(562): n is a, c, g, or t
  misc_feature (567)..(567): n is a, c, g, or t
  misc_feature (573)..(576): n is a, c, g, or t
  misc_feature (579)..(579): n is a, c, g, or t
  misc_feature (584)..(584): n is a, c, g, or t
  misc_feature (608)..(608): n is a, c, g, or t
  misc_feature (629)..(629): n is a, c, g, or t
  misc_feature (672)..(672): n is a, c, g, or t
  misc_feature (674)..(676): n is a, c, g, or t
  misc_feature (702)..(702): n is a, c, g, or t
  misc_feature (773)..(773): n is a, c, g, or t
  misc_feature (813)..(813): n is a, c, g, or t
  misc_feature (829)..(829): n is a, c, g, or t
  misc_feature (866)..(866): n is a, c, g, or t
  misc_feature (868)..(868): n is a, c, g, or t
  misc_feature (946)..(946): n is a, c, g, or t
  misc_feature (1295)..(1295): n is a, c, g, or t
  misc_feature (1314)..(1314): n is a, c, g, or t
  misc_feature (1357)..(1357): n is a, c, g, or t
  misc_feature (1380)..(1380): n is a, c, g, or t
  misc_feature (1386)..(1386): n is a, c, g, or t
  misc_feature (1398)..(1398): n is a, c, g, or t
  misc_feature (1410)..(1410): n is a, c, g, or t
  misc_feature (1414)..(1414): n is a, c, g, or t
  misc_feature (1420)..(1421): n is a, c, g, or t
  Peptide Sequence Number=SeqID_8020
  Probeset Number=SeqID_13593
gctgcgcgcgagtagagcacgaagagtggaatgacatcgaaggcgataacagggtggtggangagcgnacaccgcgntgngngcctgtgtgttgcgcaggactgcgagaccgcgcgacgaagcatcgatgcgtcgtcaacaggatgtgggcctcagctgattcgctcagatcatagaacaagtcanttactatacagacanatcacngccagcgancgttagtgtatcncgtaacgaatcntcatgcgcatcgtaatnaacaaagatantcataccgcnnanatattacgctataacatnatatagtagtaattgtgccatgtcacgaataccgatnatagtcgagatagtatgacancncgaccgagatgagatcgaacgccctantccggtatatnaanttgatctgaccntatcttgtgtgacgnagaagagtgtatgtgtcgtataggtctgntagcgatgnnngagaaagtnattnananggatgngttaatggctcttcacagttagaganttnaacaagcaaataactcacggcggantnttgntgtnggggnnnacacnaggggnnnnttngtgtnttttcataacctctactactacancaatcaccaacaacccaccanccaccacctcacccggcgttgtggcgggggcgtgtcggttttntnnnttgctgtgattctcttcattatcatntcatcatatatctatcaattactacccttctcctaattctcgctcgtctcgtatcatattaaatccctaantattctagcatttcgatctcacgccgcgacggaccgcagngtatgacacaacatancgaaacatatacaagacggtaggatgactattgcganantatagtcaccaggtgcgatctatatacctaaggctgtgtcgacgcgcacgctgccgccaggcgcgtgtattaccttantaaatactataacccactagcatctatatatacaatccgatataacatatatttatctcatagaggtaactatgtgtcggtgtgtcttatttattaaattaatcgccacaagccaaagtgtaacatagtaatcgccgccacagggatattattataaataagatacaactcccaggggatgacttacatttgtcctacgcataacgacgtactatcatactgtggtgtgtggtgacaagaagtagatgcccaccacacgtacccccgtgcgtagtgcgagcgcggagacgagaagattgtgctacaacatagcagataatattataatagcgcggaccgcgggcctctnatgatatagataaggcccnggtgagggaggaggcgccctctggtgcacacaaagttcgtggntttatataaatatactaagatgnatatgnccttcacgaacntcgtgagaggtngggncggcgnngggcggcggcgacacacacaac

SEQ ID NO: 3815 - DNA, 262 bp, Glycine max
  Probeset Number=SeqID_13594
ggaagggagcactcgcagagactacggattcaacccattcgaactagagaagcccgccgagtacctgcagttctagttggactcgctggatcacaacctagctaagaacgtggctggggacatcatcttcaccagtaccgaactcgcgtacgtgaagtccacgccgttccagccctacagcgaggcgttcagactgcacaggctccgcgagtgcgagctcattcacggcacgtcggccctgctcgccactataggagctcta

SEQ ID NO: 3816 - DNA, 1353 bp, Glycine max
  misc_feature (1)..(1): n is a, c, g, or t
  misc_feature (200)..(200): n is a, c, g, or t
  misc_feature (320)..(320): n is a, c, g, or t
  misc_feature (1333)..(1333): n is a, c, g, or t
  misc_feature (1353)..(1353): n is a, c, g, or t
  Peptide Sequence Number=SeqID_8021
  Probeset Number=SeqID_13595
ngacgagacgtgcagcgtggccgatatgatatctcctattttttgtgagattctggagcgtgtgtagtaccatgacagaagccaccacagcgacgcaatatctgcgatatctatctctgcgtcagatgtgtcgtgtgtcgtgtgagagagtacttcacgagtcggtacagtgcattagtggcgtaggactctcgggtagngattagatatgtggataggccgatccgtcgccgctctgcgcttgttgctacaggtgtttgtgtatttgtagttatgcgtctctttactcagtcaataatcctgagtctgctgattctcgntagttgagattcgcgagattcgactttgacgtggacacttcgagcagcaaggtcagcgtctgtacatgtgatggcgcgttcggggcgcgatatatttgtcgagcgggcactcctgccgtcatactacatggccgcggccgctagggtctctcctcggtaagcgatgttcggtcgtaggtaggatagtcactcgtgttgctgttattcgagacggtgatagggtacgctcagaggctcaccccttgtaactcagtgtacgactgttgctgctttatgttacgctccataccagtatatgccggtggcataccacgcggcggcatgttgggtggtgcgttggcgtcggcgtaatcggtggacagcgcgattatattaatctacgaaccatggagcgggcatgtgaagagtacagtgttgatagctgggctggtgtcgcggggcttctttccgttcgcgctggtcttgatgtagtctctggtttacatctctggttttatagggtcgtgtcacgggttcgtaggtcgtcaatcgacgataactttccggctgcgctatgctttctcttctgcatcccggcttcagtcagtggatgtgaatgcttactcagaggtggcgcacaattagcaaaaagtgtatgtttttatttttctttttttatattatctattggagtaaaaagcggtcgatgacatgttagtgcctaatgaagtttctcgtaggatgaggggtaccgagatagagggcgggtagatagtgcgtgtggagaggacgggggaggaggacgtgttacagagggccgcgaggtcaggcgcgaaggtcacttatcgagtcgacgtgctgtctgattgagtcgtcgcatcgctgtgtcaaacacttgtgctttcatcgagtaacaatgctggcgaggtggcgagatactgtgcgcgagtcctactctcttgtgctcagctcttcgacacatatatatacgttcggttgcgacaggttcaaacgcgcacggcgacttagtaagnattagaaggaaaaaaagggn

SEQ ID NO: 3817 - DNA, 1411 bp, Glycine max
  misc_feature (9)..(9): n is a, c, g, or t
  misc_feature (16)..(16): n is a, c, g, or t
  misc_feature (25)..(25): n is a, c, g, or t
  misc_feature (48)..(49): n is a, c, g, or t
  misc_feature (52)..(53): n is a, c, g, or t
  misc_feature (67)..(67): n is a, c, g, or t
  misc_feature (71)..(71): n is a, c, g, or t
  misc_feature (74)..(74): n is a, c, g, or t
  misc_feature (84)..(84): n is a, c, g, or t
  misc_feature (118)..(118): n is a, c, g, or t
  misc_feature (208)..(208): n is a, c, g, or t
  misc_feature (228)..(228): n is a, c, g, or t
  misc_feature (230)..(230): n is a, c, g, or t
  misc_feature (250)..(250): n is a, c, g, or t
  misc_feature (279)..(279): n is a, c, g, or t
  misc_feature (395)..(395): n is a, c, g, or t
  misc_feature (601)..(601): n is a, c, g, or t
  misc_feature (863)..(863): n is a, c, g, or t
  misc_feature (1127)..(1127): n is a, c, g, or t
  misc_feature (1411)..(1411): n is a, c, g, or t
  Peptide Sequence Number=SeqID_8022
  Probeset Number=SeqID_13596
ggtggggtnggggttncgtctcttnctctcttttttttctagggtgtnntcnngcgggggggggggntgantgngcaccgcggntgctctacccaattcaattaatattctagtcacnactgacagctacaacatgcacacttatatcacaatataatatagaagaaactaaaccggcacatacacgacagcgagaggacacgaccgnagaatatatgtctctgtccntntctctcctccatcttctatntggtcatcatcacacaagcctgccgggcncaccaacttatctatgacccatgtgatcataatctagctattattagatatgatataaagaagtagttttcaatcacataactatagtagatttactaaaaataaaatatttctanattttctctctccttagttattatgaaagttttttgaagagatttgaatacaataatccaaatgctagtctttgtgtcttttatatatttttccttgggtgtattctctcctctcagccgcgttcatgatcgcaatgcacctgctctataaatattactgagcttttgtgcgtctacactctaggatgtagattgtgatactcaanagattaccacgatgcgggagggctaattctttgtagattggtgtgggtgagaggaagagagaaagatgaagacaaactattaagaatcaaattattacaaacccacaagacacaccctagagccccacaacaaatacgtatactgagctgtgacgcatacactaacaacatgcctgttcattaatagtgttgttggggagaaaagcaatagtcgcatccgctatgtgccgtacactccccagactatcctagcacatcaccncccctcacttccctctcaccaaacagtccgagtctatgatatactaaagatgaaaacggatatggagaaatatgaacgtgtgaagccgtgtccgtcctacactcaatacatgttggatgatagtccactatctcccacgccagtgtctagatcacaattatatccattatatcacattagtacacaagatgccactccctcaccctctcctacttcctaatatcgtccttgtcagcgtacgacaattaataacctaggatgagngatcacattatatactatcgatttctctatcgtccgcgcatttgatattttaagtatgctattgctattggtattatgatgtgacttccctctttcttcgttgatacgcgttcttcatcccaatgtagagcatctacggttctttatatatcatatctcaccattcgctaatatcatacttaactactaatacgacattctcatatgatatacttctgtgacttctctcactttcattatgcatgtccactaccctatatagtcgctcctatgaatcgttcacn

SEQ ID NO: 3818 - DNA, 556 bp, Glycine max
  misc_feature (229)..(229): n is a, c, g, or t
  misc_feature (359)..(359): n is a, c, g, or t
  misc_feature (361)..(361): n is a, c, g, or t
  misc_feature (365)..(365): n is a, c, g, or t
  misc_feature (379)..(379): n is a, c, g, or t
  misc_feature (382)..(382): n is a, c, g, or t
  misc_feature (411)..(411): n is a, c, g, or t
  misc_feature (445)..(445): n is a, c, g, or t
  misc_feature (449)..(449): n is a, c, g, or t
  misc_feature (474)..(474): n is a, c, g, or t
  misc_feature (494)..(495): n is a, c, g, or t
  misc_feature (528)..(528): n is a, c, g, or t
  misc_feature (535)..(535): n is a, c, g, or t
  Probeset Number=SeqID_13597
ttttttttttttttttggagaaaaacatcaaattttttaaaaaaggcacatgaaatcaaattacagtttcagcaaacaattgtgaacaaatatctctttcctcccgtctgtttccatttaataattcattaaataaacagggcacatatcatggtatcattgtcttccttgattgaccaatgttctaaattccaaaagccaaagttccattttttttttctttctccanagcttgtaagcaattttccttcaccttctaaacaaaaacaaacagacatctcccgctgattttaatacatataattaaaataatatcatccttttcaagcaaggcaaatcatccttttgtcacgttcaananaaanatttgactcccgcnaanatacttatggtatctaaaaaaaaaaaaanaaaaaacttgctcaccaaatgatcatctaaatcncggnggtcacatatatggcaacaatcacntaaacaaaagaagcaagctnntaaaaaagagagaggagataaagggtaaatganatatgtntatggaaaatagtgtgattat

SEQ ID NO: 3819 - DNA, 399 bp, Glycine max
  misc_feature (2)..(2): n is a, c, g, or t
  misc_feature (94)..(94): n is a, c, g, or t
  misc_feature (139)..(139): n is a, c, g, or t
  misc_feature (146)..(146): n is a, c, g, or t
  misc_feature (150)..(150): n is a, c, g, or t
  misc_feature (361)..(361): n is a, c, g, or t
  Peptide Sequence Number=SeqID_8023
  Probeset Number=SeqID_13598
gntcatttttcctctcaacacgttatcagcacgctctttcctgagcgactcgcccggtggccggcgcggacggcaacatctctgcagcggcagngatgacaaccagatcgggaacgcagccctacaggagcatgtgcangtggagntggntcgattgctgccagatcagggcaaaaccaatggatttccatcgattcaaggattgaaggcaaattaacaaacccaacgatgcaaagggaagaaggtacaattgttttctatttgccttgcgcggaataatgcggccgttgcatccatcaggcacagccctcggcctatcttctcgtgaattccaattcgactcgacaaggcgatgttatgnggagcagcccgcgcgtgcagcggcgttctcgggccaca

SEQ ID NO: 3820 - DNA, 1513 bp, Glycine max
  misc_feature (24)..(33): n is a, c, g, or t
  misc_feature (44)..(44): n is a, c, g, or t
  misc_feature (47)..(49): n is a, c, g, or t
  misc_feature (53)..(53): n is a, c, g, or t
  misc_feature (58)..(59): n is a, c, g, or t
  misc_feature (64)..(64): n is a, c, g, or t
  misc_feature (68)..(68): n is a, c, g, or t
  misc_feature (74)..(76): n is a, c, g, or t
  misc_feature (82)..(82): n is a, c, g, or t
  misc_feature (84)..(84): n is a, c, g, or t
  misc_feature (158)..(158): n is a, c, g, or t
  misc_feature (296)..(296): n is a, c, g, or t
  misc_feature (343)..(343): n is a, c, g, or t
  misc_feature (354)..(354): n is a, c, g, or t
  misc_feature (922)..(922): n is a, c, g, or t
  misc_feature (983)..(983): n is a, c, g, or t
  misc_feature (991)..(992): n is a, c, g, or t
  misc_feature (1002)..(1003): n is a, c, g, or t
  misc_feature (1112)..(1112): n is a, c, g, or t
  misc_feature (1254)..(1254): n is a, c, g, or t
  misc_feature (1318)..(1318): n is a, c, g, or t
  misc_feature (1340)..(1340): n is a, c, g, or t
  misc_feature (1391)..(1391): n is a, c, g, or t
  misc_feature (1440)..(1440): n is a, c, g, or t
  misc_feature (1477)..(1477): n is a, c, g, or t
  Probeset Number=SeqID_13599
gggggggggggggttggtgtgttnnnnnnnnnngggttggtctncannncganaaaannggttnttcnttttannngttagnantcaatcttgcattcttactccgatgtgctctctctttaatccacctgcccggcccgccgcaacatttctacaanggaacctcttctctccgaaagaggacgtccgcgcttgttttttagagacaatataagtctacctggggtgaggaaccaacgcaaccccactaatcactctggtcgcgcaccgtctcttctctcccacaacccgggacnatccctcctccatcttctctcattccttgtttcttactcttttctcnctccaacgctntgtcctggcttgccgccccgcacctattcgactactctgtggcgcttctctcttgctactccagcccgctcacctctaggaaactatagtgaatgcgaagatcggtctccacaacctcccacaccctccatactttactttatccaatacgcagatctccccctctccttctcccctacacgtttccccctcctgccttattggcgtgtcaccaccatacccccacacccgctcaacaacgacccgcccgccgtaacgtgtctggcgcggtgtttctctaacctcgacactcacccacaaagagttacgaccatcgattttcatctctagttttctttagtgttatatatattaattcatatcattgcgaatgacaatgacgcgagacgcggttttaaattatagcgccgcatcataacagcggtagatggttgtgtattattatctccaaacgcgcgccctgccctcaccaccaatcactgtttcattgaaatatcgcacactatatatttgctctcgcaactcacccacatacaaacatgactgtttagtgaggatcaagaacccncgccagatagtgtttgttgtggttgatgtagaaccccgcccccctctggtcgcccccatanataagaannaaaaaaaaannggggtgagaagaggtggtgctcacatccacacgtgcgctttgtgattcttctacacactagcttaagtttatcaactattatgtatctttatctgacacgtctccttantgtattatatctccttcctccttctacaccatataagtgatatgtccttctcacttgataaacagcttcctttcgcatactattatattgcttctctcactctatactggtcgtgctgcgctctctaccacccgactcttgnatctgacctgagaatatatgttgtcgatcgatgagtatctatattattagattttgagtgtggntgcctctgcgacctaaaacaanctacgcttatctcgcgccttttactaattattgtatatactctcactctgncagatgtgactgagagacgacatgatcaatactactctgtctgtatgcnatctaaacacaatactctacacatcacgcggtactanatactataatgactcagactcagtcttatatcgagg

SEQ ID NO: 3821 - DNA, 500 bp, Glycine max
  Peptide Sequence Number=SeqID_8024
  Probeset Number=SeqID_13600
atcaattgaaaaccaaaagtcaaatacttgttaggtcttcccccacatcttcagagagaatccaaagagagctttccaagtttacatggttgagctagacatccaggtaccattagcatatgaccctttcgcagaagctcaagacacagatgcaccagggacaaaagagtatatccacgtccgtattcagcagaggaatggtaaaaagagtttgacgacggtccaaggtctgaagaaagagtacagctacgagaagattctcaaggatcttaagaaagacttttgctgcaacgggaacgttgtgcaggacaaggtgctaggcaagatcattcagcttcagggtgatcagaggaagaaagtttctcactttttggttcagactgggattgctaagaaggatcagatcaaggatccacgggttctagaattcggatcgttcggttttatctttctcttttatatgcgaataatattgtgtgatcgatcatcattagaggttt

SEQ ID NO: 3822 - DNA, 356 bp, Glycine max
  Peptide Sequence Number=SeqID_8025
  Probeset Number=SeqID_13601
tcggtacccctagagatgctcactgggaggatcggcatctgctgagatcaggagctgttagaggtacagatgttcagactgaattcgacgatgatgaccaacacaaagttgttcttcttgttcatgatacagagcctactttccttgatggcagatttgtttttactaaacaggcaaaccctattatgccatgaacagatccaacctctgacctggatattatctctcatacaggatctactcttgttagagaaatccatgagaagcttactatcaaccagtctcgccaacgcttgagggaacttgctggctcataactagacgatatcttgggtgtagaaaaaacagcagagcat

SEQ ID NO: 3823 - DNA, 1547 bp, Glycine max
  misc_feature (122)..(122): n is a, c, g, or t
  misc_feature (562)..(562): n is a, c, g, or t
  misc_feature (611)..(611): n is a, c, g, or t
  misc_feature (745)..(745): n is a, c, g, or t
  misc_feature (748)..(748): n is a, c, g, or t
  misc_feature (781)..(781): n is a, c, g, or t
  misc_feature (853)..(853): n is a, c, g, or t
  misc_feature (1088)..(1088): n is a, c, g, or t
  misc_feature (1183)..(1183): n is a, c, g, or t
  misc_feature (1211)..(1211): n is a, c, g, or t
  misc_feature (1355)..(1355): n is a, c, g, or t
  misc_feature (1357)..(1357): n is a, c, g, or t
  misc_feature (1367)..(1367): n is a, c, g, or t
  misc_feature (1510)..(1511): n is a, c, g, or t
  misc_feature (1524)..(1524): n is a, c, g, or t
  misc_feature (1526)..(1526): n is a, c, g, or t
  Peptide Sequence Number=SeqID_8026
  Probeset Number=SeqID_13602
ctgtgtgatatcgataggagtcggtgttctgtacaggcgcgagtataggtgttgtcgcctccctcaagtgatcctcctcatatgttggagtggtgtgccgcacgatgtactgatatatagangatgataattatagagagcagacatcgagagtagagtgtgacataaatagagtgatatgacgcggtcatgtatatgagggatgtcgtatcgttcccagtaggctaccatagaactagttatggttgttgagagtgtagagctgcgccatagacagagaagatgatgtacgtgcaacacgaagtatatgattttggaatgagagagaggctcacgtgtgtaggcgtagtgtgatattatatctcatgtgtatatgtgattgttgtgtcaggggtgtacgcatcgcagagaatcaacgtgtgtaagtggagtaaggagtgggtgagtggttagatattatgttttgtaggttcatggaggtgttgtcgtgtggggtgaggatgaatatagtatgagcggagacatgtgagtagagaggaggacgtgagatttgagtagaccncgttatatttgtggcgtatatcacggccagattgtggtgtcccgatcantacagagtgatgctgtgtggaggggtggcgggaggcagaccaggtagtcacacatagttacttgtctgagatctatgtttgcctccgtctgtattgtggagggttttgttatatctatttattattttgttatnacnttaattaatatcttttctttttttctttctatnttataatagttgtctcggctctccatatgaccaattattatagtatagtataaggcggcgctgttctaatcnggagagtaatttggatgtagagagtggtactagagtagtgtatggatgttaatcggcggaagcgatgaggaactggactacatatagtggagtatgggatggtgggttagagggacgaaactaggaacggtgacgcgagccggaggagggtgtgtgtatgatgtatacgatgtgcgagatgatatgatgcacggagtattcgctcgacctaggtcagctcgtgattttgctcgcngccagcatgacttgtgtgtatgaccacggcgagcaggacggcgtgaggaaagtacgcggtctaatctattagctatggggagtggagtatagggngaggagggtatgcgagagagtatgagangtggggtgagtggagaacgagacagagaattgaggtgggggagagagtgaagcatatggtccacactcccgtgatagggagatactctggtgagtaggttgagtaacaagatattaattaagcagttatccactccttgtactncngtctggcacncgcggggaggagatacccaagtatatgttcaatgagggcgccctcgcctcacgccccgcgttgcgaggggagacacacgtgtatatttaggtgggtgggggtgatatcgcacgtacggacgacacgctgtacaagagggtagnngcgcgtgatgtgngngtaattcccagaatgcttttc

SEQ ID NO: 3824 - DNA, 530 bp, Glycine max
  Probeset Number=SeqID_13603
aggaactccagtgaaagtggctgctttggctttggcattcaggagcatatcgatttgggagccaagtaggatccttcacctggtatatatggaagggacttctttgttgttttggggcgtcctggctatcgtgtgggaagtccccaaaggtgcaagtcccgtgttggaatccagcaccgtgtcccaaaggaggatggtatcaagtggttccaggtgaaaaatgagggagtgatcctcaacaagtcccagcccattgtttagttagactgagttcatttcaggggggggtttttatcagttttgtcaactatttttttgggaaagtatcttaattttgagccaggttaggaaacaatgtttttcatttcagttttgtgatgaagcccatgtattaccaatagcccttttaaacgccccttttattgcaacaagaacatgtgagacccttttaaaggcattctctttattgaggatttattgaaaatgatcaaaatttgtgggttttgggaaaagaaaagaagaaaaagaaa

SEQ ID NO: 3825 - DNA, 1712 bp, Glycine max
  misc_feature (41)..(41): n is a, c, g, or t
  misc_feature (118)..(118): n is a, c, g, or t
  misc_feature (166)..(166): n is a, c, g, or t
  misc_feature (189)..(189): n is a, c, g, or t
  misc_feature (222)..(222): n is a, c, g, or t
  misc_feature (385)..(385): n is a, c, g, or t
  misc_feature (392)..(392): n is a, c, g, or t
  misc_feature (406)..(406): n is a, c, g, or t
  misc_feature (437)..(437): n is a, c, g, or t
  misc_feature (483)..(483): n is a, c, g, or t
  misc_feature (490)..(490): n is a, c, g, or t
  misc_feature (542)..(542): n is a, c, g, or t
  misc_feature (677)..(677): n is a, c, g, or t
  misc_feature (932)..(932): n is a, c, g, or t
  misc_feature (956)..(956): n is a, c, g, or t
  misc_feature (1249)..(1249): n is a, c, g, or t
  Peptide Sequence Number=SeqID_8027
  Probeset Number=SeqID_13604
ccgcgcacgggcggatacgattgattctccgcgcgctcgcntcatgacatcacgccatcggttcgtgcgcttgtcgtgccgtcgatgttcatggtctcactactgcgcggcagcgcgngtgcatcgattctacttaacatccacaccgttatctcgcgcgcgtgcnagtcagcgatcgttcgatgccgnactagcacgcatagtactcgcgcgctgcacgancttcttatccctggcgcgttagagcagtagacgccgcgccgcttccttcaattccccgctcatacgtcttcacacgtgtgtgcgtcgacaatcagcaggcatgcttctcgctccgtctctcatattcgctgcgtgcggtctgtcgcggtgtatacagatctanatactantagtattatctccntgtcatcccgccgcgaccctctgagtcgcgncattacactgtgagcgtcatacgcgcacgggtgtgcggcagagatntgtggtngtttcttctatatatctctctctacacgtgtcgcgcgggccgcctcggagantattcagcctcgagctatcgtcgagtgatgtctgtatatctcaatacgtggtagtcactcgatgactcatcttactccgagctcgcacatcctctccgctcacagctgtgcatttcatcctgccgagacagacanacgatatacacatatactacttcgctcgtgcggcgtcgctcttcgagatactgtgctgcccagttgttgatccacgtgcggcgtgctccatactaatcatcaacacacgtacagacgtgacataatagatatactcacatctgtctctcctcgtctctcggcgtaatgtagctccgccgatcagtatatacctctcactcgcgggcgagtacatatgccggcgccgcgctgaggacagggggccggcgtcctagntcgtctgtgaaggtacgcatcaanagcatcatcattagatctagacgaggaatcacaacatacgcgtcgcccgcgtcctcgcgtgcccctctccctcctttgcactctttctatatatataatgataatcaacatattagattgcgctggtcgtcggctactttgccatatgctctcgcaccgcgcactatctcactcaatctgtagctccacgaccgccccttgtccgcacgttatgtatcctgctctcatcactctcagacgcctatctgtgactcggagtgtgttgtttgcctgcatatcaatactatataatngtctgcggtattacggaggtgtgtcacctgtgggagcgtgggtggtgatgacactcgcggcggtgcgtgagttctcttctcccgccgctctttcattctcctcctaaataataatacccggttcgcgcgctcatcgtcgtctcccgccatcaacaaactctgcttcgtctttcggctcctgggccagcgcgcaacactgtccacacacgccctcaccgctaccgcgcggggggcggaccacacgcaaacatcgatcaaacgccggcacaggctcgtttaattttctatcacttagtggcgccattatgcgggcaaacacctgcggtggtggcctcctcctctttttggtgtattctctttgggtgtgtgctccccgcgtttgcgcactatttatcatggaaccccctgcggagcgggtccgatgactagatgcttatagtgcgccggacaacccccgtccaca

SEQ ID NO: 3826 - DNA, 687 bp, Glycine max
  Probeset Number=SeqID_13605
cttttttttcaattcggatgacccttcttctcttttcgaccgatgaaacgaaacgaaatcgccgccacatccacatccccatctgctctgccaccgccggcgctccacctccgatggcctctccctacctcctccagctccagcttcctcgcccaagccccagcccctcccctcccctcccctccttccgctcgccgcttcctcctcttccgtctcctcctccggattcatggggtgcgcagcacaaggaggctattgcagccgccgccgggagaaacaacgggctgcggcgacaacggcaagcgcaaggtgggagggaggccttcagccctattttcatcatcctgctggaagggaccgtttaatgcatgaatacagagcgagctctggcaatgaatcgaagccagagattaccttgatggcgcagcatgagtcgaagtgtagtatgtactttatttcgtattgaagaacctgacgatgtagtgtagctacgtggaaactatgtttwaacgccccctatcaattagttggtgcagactgaagaatttgcaacacacctgagaatgtaacmctgcaaatagtgcggccagagactaacatgatgctgcagcaggaattggagttgaatgttttyttaagtttggtcatgtgtytattaggcaaagacmagtactattattacgtagt

SEQ ID NO: 3827 - DNA, 1614 bp, Glycine max
  misc_feature (42)..(44): n is a, c, g, or t
  misc_feature (55)..(55): n is a, c, g, or t
  misc_feature (57)..(58): n is a, c, g, or t
  misc_feature (60)..(61): n is a, c, g, or t
  misc_feature (66)..(68): n is a, c, g, or t
  misc_feature (70)..(70): n is a, c, g, or t
  misc_feature (75)..(75): n is a, c, g, or t
  misc_feature (86)..(90): n is a, c, g, or t
  misc_feature (93)..(93): n is a, c, g, or t
  misc_feature (128)..(128): n is a, c, g, or t
  misc_feature (152)..(152): n is a, c, g, or t
  misc_feature (183)..(183): n is a, c, g, or t
  misc_feature (229)..(229): n is a, c, g, or t
  misc_feature (232)..(232): n is a, c, g, or t
  misc_feature (246)..(246): n is a, c, g, or t
  misc_feature (374)..(374): n is a, c, g, or t
  misc_feature (415)..(415): n is a, c, g, or t
  misc_feature (885)..(885): n is a, c, g, or t
  misc_feature (970)..(970): n is a, c, g, or t
  misc_feature (992)..(992): n is a, c, g, or t
  misc_feature (1006)..(1006): n is a, c, g, or t
  misc_feature (1015)..(1015): n is a, c, g, or t
  misc_feature (1229)..(1229): n is a, c, g, or t
  misc_feature (1240)..(1240): n is a, c, g, or t
  misc_feature (1355)..(1355): n is a, c, g, or t
  misc_feature (1368)..(1368): n is a, c, g, or t
  misc_feature (1395)..(1395): n is a, c, g, or t
  misc_feature (1419)..(1419): n is a, c, g, or t
  misc_feature (1427)..(1427): n is a, c, g, or t
  misc_feature (1435)..(1435): n is a, c, g, or t
  misc_feature (1472)..(1472): n is a, c, g, or t
  misc_feature (1509)..(1509): n is a, c, g, or t
  Peptide Sequence Number=SeqID_8028
  Probeset Number=SeqID_13606
ggttttgtgatgtttgttgtttgttggtgttgttgttgtgtnnnatatatggagngnncnnttttnnnanacgantattattgtgnnnnntgngggagagagagagaacgaaagcacaagagccttgnctacatctcctcacccgcacgccnctcgggccgcgcctcgctcctccatatagtnaactcaccgtggtctattacacccacccgccgtgacttcgcccggnganagcagttccctctntctccatctgtctactctctcactcactcactacatctcgacactacagcttctctatctactcacatcacacacacactcatacccactcgctactcataacacaccctgactctcgcctagacgtntatcgccgcaccgactaactatacaattatccatacatcanactgttattatacgacccactattacgcaccatcacagtctccaatgcgactctcataccaccactagtcaaacaccactactcacacactcacaacacaacacaccacgacccataccccacacgtccacatactcacactgatctaccccaccacatcacacacaccacactcttataacacagataacatagcataaatcaaaaactctgcagagaaacgcatactcgactcacacactagcacaacaacaccctagcacacatctctatatacacatttacaactacatatattactgatactataataaactacgccaacataaatggtgaccaaatacacaaatatcatggcattacgacaaacgatagactacacgacgaggaaatatcatagatagatatgatacagtaatatcatgcagatataaccactagcaacacacgcaagagaccgcgctacttcntatacagtagatagtaagtacgcaggtatctgatactgtgatcagtatatacactcatatatgacagatgtatattatgtctcgnagtgagattgtagtatcgtatntacatgcacgattnatagctcgntgtactctatgatattcatacatatgttcagatgcactcacgtcatatcatcaatgatcacagactcacacatctcactactagcagtctagtatatatacgactagacatataccgcgcactacgtgatcgtcaagctgcgtcatacctgacactacgtatcctccttcacatatagtgtagtatagactgacaagcaacgatacctaactcntctatactaangacaccactcataacataaaatacgtctcacccatctctactctctctctcatcacacccacatgccactcacaccactctctctctagattgtctctctcttaatatacacgcncatagtaagtacncatacgactctcgcacatccagcaggnctatcgggcatctgcgacatcatngcgatcanggcacaangagacaaggaatgtgacagtagaggcgacgcagatanatgacgagagatagaagtgctatcacagatacacacnagaggaacagcctaccagacaggcggccgtatcaaggtcgcacgcgtgcgagacacacggcactggacacacacacccgggcatgcaaccgtggacgtcccccgg

SEQ ID NO: 3828 - DNA, 253 bp, Glycine max
  Probeset Number=SeqID_13607
cttcacagagagagagcagtcgagagacagtgagagaaaaaaaactcatcaaagagaaatggctacctccgccgcacgtcctctcgtcaccatccaaggcctaggcggcgacatgaccaccgaccaatcctccaccatcgtcctccccgacgtcatgacggcccccgtccgccccgacatcgtcagcttcgtccacgctcaaatctccaacaacagccgccagccctacgccgtctccaagaaggccggtcac

SEQ ID NO: 3829 - DNA, 711 bp, Glycine max
  misc_feature (353)..(353): n is a, c, g, or t
  misc_feature (410)..(410): n is a, c, g, or t
  misc_feature (502)..(502): n is a, c, g, or t
  misc_feature (524)..(524): n is a, c, g, or t
  misc_feature (594)..(594): n is a, c, g, or t
  misc_feature (601)..(711): n is a, c, g, or t
  Peptide Sequence Number=SeqID_8029
  Probeset Number=SeqID_13608
aggattttcctttcatcagttcatgatttctctctgatccttttgtctataaactgaactgaattgagtctcaacaacccagttgagtaactaagagggcgcaagtgaggaacaagcaagtgcttctaaaggactatgttaccggttttcccaagaatccgacatgaatattgtcaaaagtaccataacattgaagcttccacaaggttccaatgatgtcttgctcaaaaatttgtatttgtccttgtgatccgtatatgaggaatctcatgaacagggcccgaacgcccctcccaataggccgggcttacactccttgggctctccattaatagggatatggtggtgtccanaagccctggaaattctggcgcccccatattaataaaggaagggtgaatttaaggggncggcctttacccaatggggaagaagtataggctttggttacccctccagctcaaaatactctttcaaaattggagcacacctggatggttcncacttaacctacctacacgggnaatttccttgtaacgccaggaatgaactggatatgcagggcctattttgaagaaagaaccccttacaaanaggaaannnnnnnnnnnnnnnnnnnnnnnnnnnnnnnnnnnnnnnnnnnnnnnnnnnnnnnnnnnnnnnnnnnnnnnnnnnnnnnnnnnnnnnnnnnnnnnnnnnnnnnnnnnnnnn

SEQ ID NO: 3830 - DNA, 558 bp, Glycine max
  Probeset Number=SeqID_13609
agtttggaatcgaattccaagtgatcaataaacaacaatttacgtgtaaaaagtgtcaagtaagctaaaaaatcttgaacaaaatgtccgaaagccacttcgacgaatacgagcactacaacttcagccacgacaagcacattttcaccggccacagcggcaaacaaaggaccaaaaaagaggtcagcgcccactcgaaccaccacgacccgagcggacacacgaggaagatcgtcaccaagatggtcaacaccgagagcaaccgtaaatcgaagcactaaattcaattttgagctcataaaggattgccgtgtcctgttttaaggacgaagacgactggttttgtttatcaaggactgtgatttcggtttagacgagtcaccttggccgcgcacgcgatcgatcccgcaggattttgcaaggtgacttacacgctttatgttttacgattaactgtttaagtttaattaaaacggatttgttttgggtttgattgattttcaaacaactgtacgattattaattattgtaaactgataataaattatttatggatgc

SEQ ID NO: 3831 - DNA, 594 bp, Glycine max
  Peptide Sequence Number=SeqID_8030
  Probeset Number=SeqID_13610
gttctctccttctcttacagagcacacgccgcttgcaaaaccgattcttgacgctactcacgacttttgacagaagatggcttcaagattctgcactcacgccggaagtgattcctacgaggacgacagtgattatgctgaggcagatgaacactcgccgtgtgaacaagctccgtatcaagacgtgactagcaagtactttgtggacaatggcagtgacagggatgattccgatggccaaaaccgcgttggagggcacgcaaaatataagccattctagggagatgtatccactggttggccaaatgtagaatgccatcaaaaaccatgggactggttgagttttctaaaaaactttgaaaggaataacaaaccctctgtgaaaggccaggcaggtcccccaatttaaaaaggtcccaaaaatgacccccggggggttaggggggggaaaaatttcttcgccccctttttgaaaaaaagggcccccaaaaaaaaaaaaaaatttttatttaccccccccccctggggggggcccccccccccaatttcccaaaaagaggggttttataccgccccccgggccgcaaaaataaa

SEQ ID NO: 3832 - DNA, 457 bp, Glycine max
  Probeset Number=SeqID_13611
gaatgactgcaagcttcttttcttcatccatgaagtgtttacaagtcccaacatgattgagcttcccattatcggatcaatgcacactttcttccacgaccttctcaacgacacgcacgcctgcacccacaccaacacctgtaaccctcccagccccgatttcttccacactcacacgagctaccatgtccacaccaaaatcgtgcccgcccctgaggaggaccatgtcgccacctatgacaccgccaactccgccgaaaacaattcgtcgtcatccaacaagcggtctctgctgaacaaataggccgtcctgaaataccgtgagaataataaggcgcgtgctgcgtgactagaagacgatgttgtgaatttgatggctctgaaccagcacttgatgaacaagctgaaagggcatgccgctttcgaagccgaaatcgcgaagctcaaatgtttgttg

SEQ ID NO: 3833 - DNA, 493 bp, Glycine max
  misc_feature (119)..(119): n is a, c, g, or t
  misc_feature (204)..(204): n is a, c, g, or t
  misc_feature (273)..(273): n is a, c, g, or t
  misc_feature (298)..(298): n is a, c, g, or t
  misc_feature (318)..(318): n is a, c, g, or t
  misc_feature (381)..(381): n is a, c, g, or t
  misc_feature (384)..(384): n is a, c, g, or t
  misc_feature (387)..(387): n is a, c, g, or t
  misc_feature (434)..(434): n is a, c, g, or t
  misc_feature (441)..(441): n is a, c, g, or t
  misc_feature (457)..(457): n is a, c, g, or t
  misc_feature (467)..(467): n is a, c, g, or t
  misc_feature (470)..(470): n is a, c, g, or t
  misc_feature (473)..(473): n is a, c, g, or t
  misc_feature (475)..(475): n is a, c, g, or t
  misc_feature (482)..(483): n is a, c, g, or t
  misc_feature (485)..(485): n is a, c, g, or t
  misc_feature (487)..(487): n is a, c, g, or t
  Peptide Sequence Number=SeqID_8031
  Probeset Number=SeqID_13612
ataaagataagatgagatggtagtgctatcttcttcttctcataccacgattccacatccgacatctcatagcttttctttttagacatggccaaatcacttttcttttccttcttagncgtctctcttctgcttcttcttgcagcggcttcggcaactgcagctgcagggaacgccacaagtgggttgagatatggcggatgngctctcagagacaccattggagaatgcataacggcggagattgaggaggatgggagttgaggatgtggngcggcggattctgcgacaacagggngaggaacttaggctactcanctctgcaggggcagaaggcagcttataaatgtaagattgctgggagttgcatcgggaaaaagntantcngaaaaacgcagcttgcacttacttcaccagatgcaaacgcggccacnagcctanaatggtgggggtattnttcccccctnaantangncgcgttnngngnacttcc

SEQ ID NO: 3834 - DNA, 1336 bp, Glycine max
  misc_feature (11)..(11): n is a, c, g, or t
  misc_feature (581)..(581): n is a, c, g, or t
  misc_feature (661)..(661): n is a, c, g, or t
  misc_feature (671)..(671): n is a, c, g, or t
  misc_feature (674)..(675): n is a, c, g, or t
  misc_feature (689)..(689): n is a, c, g, or t
  misc_feature (710)..(710): n is a, c, g, or t
  misc_feature (1215)..(1215): n is a, c, g, or t
  Probeset Number=SeqID_13613
ggagggagggngggatcggaacagtaaaaaaccgcaaacgcgacctcgcgcctactaccagcgacacagcaccaccacaatggtgctcacggtccgcccgccctcagatcagtatgagagataagacgccttcccccgccttaacctagcacacaccgcggcgtccctcctcatctaatacgcatagatctcttccctagatatggatgtatatctatggggtctgacagtgatcctatatatcgaacgaaaccctccccgcccgctcacaccacactcaaccccctatcaaacaacgcactactcagacgcgttcgtgatctgcctctgccccttgattatctatagctcccgtcctgtgggaccagtcagtgcgcacggtgtgacgccccttattccatcacctcaccccactctctccatacaatacatacctccccatttacctcacttctccctcactcatcactagatgtgcacttacatttcactaataaaaatatcatatatactgacctagtaacaaccacattactatccaaatatatgtcgccgcggtacaatagtgtcgcgcgcctctncgatgtctcgtttctctctgatatagtctttgatcctcttctccctcttccttcccgatcctcgcccgctgcgtccacanatcttaaagntannaataattgaaatanaaagagaagaaacaaggaaanacaataactacattcctccgcctgtatgatttagataagtgaataccccactactaacaccctcacaaaatatgaagtatatatataaatatcttagacacccacaccacctacttctcgaccctctctcccatgacagactactgctcaaacgtacacggtctcttatacacctctccctgacgccgtattctccacctccactcactcattctctagacgattctcccgcctcttattcactcctcgctcttctaggaatatggcgacacacatcccacgcctaagcgtagctagcttattgtagcctaccgcttactctctcctcatctctgctcttcagttaccatgcggcctcactttctatcctacacgacctcagtagcatcagctggcagcgcatcaacgacactaccaccgcttctgcctctccttcctatcgtgcatggcttctaatgcacgcgggtctcattacatcttatatatctatatattttgtcaccanctcagaactatcactccttctggagcaaacacactgcagaacgcccataacttatcacggtacccatcgaagctcacactaatctccatctatctctacgtataacaacgtccgccaccct

SEQ ID NO: 3835 - DNA, 433 bp, Glycine max
  misc_feature (312)..(312): n is a, c, g, or t
  Peptide Sequence Number=SeqID_8032
  Probeset Number=SeqID_13614
aattagtcctggctgagtttagcagactagacagtatagctaagctagggtcgacgacactggtcatggccatggagtacacctcaaggcgctggctggccgcggtggcggccatcgtcctgctctcgtgcgccccggccctggcggcgacggccggccggaagctgctgcagatccagatcagccaggcgcagcagtacgtggtgccgcagaaccacatgcgcgcgatccacgagcagcgcccgctcaagtggagcagcgggctggcggaccaggcggagcgctgggcggcgcggttcaagggcaactgcncggccgcgtcggcggcgatgccgggcggcgtcaatgtgtttcgcggcttcggcgaggccgggaaggcgtggcagcccagcgacgcggtggcggcgtgggcggagcaggccaactacttcga

SEQ ID NO: 3836 - DNA, 522 bp, Glycine max
  Peptide Sequence Number=SeqID_8033
  Probeset Number=SeqID_13615
ccccccttctaagccccccgcattcctcgcgattcctctccccccgcctcctcgtcctccccctcctcggggggcgccgcagaggagtcgcgacgagggcttcttcctctcagttatatcaaagacatggagcacaaggagaccgcctgccagtctcgggaggggccccctccttttcggcaacaattgtggcttcttctgcggcggggcgaccatgaacaagttgtccaagtggcgccaggagaaggcggcgaagcaggagcaggcgaagctggccgcctcctccttcgacaacatcgtccacggtggtggtgccgcggaaaaacaacctgttgctggcggcacggcggtggcggttgctccccttgaggcggagacgcttattaccgccccgcctgctgataatgccgggccccccgggggggcggtggtggagccccaaagggccccaccgcggcggaacctgcggaaagaggggggcgggctgcggatttcactggccgggccggcacctggacggcg

SEQ ID NO: 3837 - DNA, 1515 bp, Glycine max
  misc_feature (20)..(21): n is a, c, g, or t
  misc_feature (29)..(29): n is a, c, g, or t
  misc_feature (31)..(31): n is a, c, g, or t
  misc_feature (33)..(34): n is a, c, g, or t
  misc_feature (48)..(48): n is a, c, g, or t
  misc_feature (57)..(57): n is a, c, g, or t
  misc_feature (104)..(104): n is a, c, g, or t
  misc_feature (117)..(118): n is a, c, g, or t
  misc_feature (125)..(125): n is a, c, g, or t
  misc_feature (1477)..(1477): n is a, c, g, or t
  misc_feature (1515)..(1515): n is a, c, g, or t
  Probeset Number=SeqID_13616
ggggggtttgcccctctccnncccctttntntnntttgtttgtgtagngctgggaantggaagagggcagggacggatagactggcggcacgactcacacaccncctagaccaatanncaccgcntcccatctactgttatataataatgattagagatgacatgcagaacctagtctaggaaataagctggagagatagagtgaaactcgtggtgcgctcagatatctgtaagttttggtattcggctggctatagcttcactgcttttaactcctccataattaatgtacgtattcttttacaatgtatagtgtatgctactaggctcttcgtgtaattaggggaattgactgtggtcagcaagatatgagagacgtagcacagccaacacccccagtgtcttgacaatggagtttcccttgccgctcttcccgtctatcccctcgccgcttagtggtgctctattgttgagtgtcgcgtgggttgagtgtgtggggcgtctgtggccgggtgctgttgtaggaggcgccgagactggccgcgggacggcggaatacgacgcagccacggccgaatcaacacatatcggcgactagtccagctcgcgaccctattattaagtgtagggtgagaacggagcaagtaatagtgggaggagtgagcggtcggtaaaagaagaatcatgcgcgaatatagtatacaagggcacggatgatgccggaattgaaaagtctctcagcgccgcgagagatgcttgaattctcggactagcgcgccatgtgtgcgcagagagtacgatatgagagcacaaggaacccacgatacgatactactatggaatatatgaaagcagctgatggacacatagagaacaaacgatatatcgagaacacatcatagatgcgctgcatcatggcgccgcgcccttatggtcaggcgtgggagtgtgttgtcggttgctcatatcgcttatgttatcgcatggctgggtttgactgtctgtgtagtcgtgtgatcccggtagactagtaatactagaggaaagatatagtgttgagagatggaaagcggcagcgggagggggcgaacgggggtcgcacgtgggctggcgccgatcctgactggacgacggctgactacacacacacacgcacgaaaggaacggaagaaatagaagaacgcagcaacagaaggaggcgcagaaagcaggagggcgtagcggagcttggatgcgttcgctacgcatcgctcccacggatggtcttttgtctgcaacactggattgaggtgatggtgagggtgggcgtgaggggatgcgcttgactctgctatgcagtgtccgcatctgccacaggtggtgcacgccaacggcggaagcctcaggcactcgtgagctgatggtgacggagtgtgtaacgtagagtgttgagcgactgacggctgagaccagcgccggggggacgtagcggttaagnagtgagtgccacacgtgtgcacatcacgcgtcagttgn

SEQ ID NO: 3838 - DNA, 1614 bp, Glycine max
  misc_feature (8)..(8): n is a, c, g, or t
  misc_feature (82)..(82): n is a, c, g, or t
  misc_feature (143)..(143): n is a, c, g, or t
  misc_feature (366)..(366): n is a, c, g, or t
  misc_feature (399)..(399): n is a, c, g, or t
  misc_feature (487)..(487): n is a, c, g, or t
  misc_feature (555)..(555): n is a, c, g, or t
  misc_feature (724)..(724): n is a, c, g, or t
  misc_feature (736)..(736): n is a, c, g, or t
  misc_feature (803)..(803): n is a, c, g, or t
  misc_feature (839)..(839): n is a, c, g, or t
  misc_feature (970)..(970): n is a, c, g, or t
  misc_feature (1019)..(1019): n is a, c, g, or t
  misc_feature (1054)..(1054): n is a, c, g, or t
  misc_feature (1064)..(1064): n is a, c, g, or t
  misc_feature (1113)..(1114): n is a, c, g, or t
  misc_feature (1123)..(1123): n is a, c, g, or t
  misc_feature (1132)..(1132): n is a, c, g, or t
  misc_feature (1149)..(1149): n is a, c, g, or t
  misc_feature (1445)..(1445): n is a, c, g, or t
  misc_feature (1480)..(1480): n is a, c, g, or t
  misc_feature (1499)..(1499): n is a, c, g, or t
  misc_feature (1531)..(1531): n is a, c, g, or t
  misc_feature (1570)..(1570): n is a, c, g, or t
  misc_feature (1580)..(1581): n is a, c, g, or t
  Peptide Sequence Number=SeqID_8034
  Probeset Number=SeqID_13617
cgtgtagntctcacgatacagtgatgataagatgtacgacatatatacatcatattatataatatatatagagactagtgtngacacaagacaataacgactgatcataggagtacaggcacagagagacagtgagtgctagnactatttgaggtaggacgcgtcagagatggatacacgcatcattgtgttggggaacgtcgaagcgtagagatgagatgagaagacaattaattagcgcgcgacacaacatctgtaggtagtcgtcaggcgcgacgtcgtgtgtctactaagcagatgcggtcatcaccacagacttaagcgaggcgacatccacgcgcatcgggacatcttatgtgtcggacntctagcttcagtcatcttcaagagacatctccntctccaagagctgtggcacaaccacatatggcgctcacgtggcgcggagcgaaacgatcttcatttcgctatctcgctcggcgctacnccgactttctcccgttatatcttacaagcatatcacgaccaatgcacctgtgccagcgacagtcggcngactgagagtgaatgagaaaatgagaagaacaagactatgacaccgccacgtatctgtcgtgtggtagaaactcacacagatacacgagagagcgagcggaatgtgccagaccatatactcatcactcgtcgcgtttatagacgagtagtgagatgagtgtggtgtttntaatcagacatnatatacatatatactatacacactgtcctgtcactggactagatatgcaatgatcgcagtaatgctnctctgtgtgagccgaacacacatatactactagaangagtatatgacttgcatcgctatcatcatcgccaccacaaacgcaggacgggtctggagtgacgccagacacagaatcacgagccgctgcacactgagcgacgtacggcgcgtacgatgtgaagatgctgnggcgttgtttgtggcgtgcgattcagaactcgcgcgacacaagcccagntcataatagagatgtgcctggctgttcctcactcntctctactcngcatctctctcttttcctttcttatttaatagtactatacggtcatttnntctctattnttattagtntattacaatgtgcagtnagaggcgctagatgatagggcagacacgtcacacgcacccaccgcgtcgcgcgcgaggcgaggagcgagaggataacacacaagaggggcgagaatccagggagagagaggacgggatgaagaacatagcatgacagctcaccagccacgacagtctcatactcgcacatcacccatccgatcgtcaactagagtgtgtgtgcggctgccgtggctcagcctcggctgtccctctggcgtgcgcgtctgggttcccccatccccaccacacaccaccgagagtgcgcgcagtgctnacggcggggtggcctacaactctacaactctctanacactcaaacgtcgtctcnccatacagagtatatcacttctccatactctnatgtagcgattgtgttgtggtgtgtggtgtagaagtaanaatataaaannaacacaccacacacacccggggagcacaccacc

SEQ ID NO: 3839 - DNA, 549 bp, Glycine max
  Probeset Number=SeqID_13618
ttgcgtgctcttaataccattccacacccattcacacattcctaaccgcccaccccttccattcattcattgcctttcgccgccctctatctaacatacacacatatactatttaatcatcatatatagaagacccctttattcttcttaatttctacactaagtatctattttgttttttccagtttttgtgcattctctaccaagtggagtggaaagtgttctttggcctaacagtacaaatccacaagaataaaaaggcaaagatggtgatgctgggtttggaaaggctggaggtgactcaaaaatccaaaatagggttttgaaaccggaagaaccctaaggttaagatggagaagattaaaagcatggaattggaaaaaagaagaaggaaggccagaaggttttttaaagagaccctcaaaattgctgattcacctaagtccaaaaccttcaccttatgatgattccgctcgccaccctatgtttaattgtatgtattggtaaaacccttcaataataaaggttctgctcttcatacaaaaaaaa

SEQ ID NO: 3840 - DNA, 1421 bp, Glycine max
  misc_feature (1)..(1): n is a, c, g, or t
  misc_feature (250)..(250): n is a, c, g, or t
  misc_feature (759)..(759): n is a, c, g, or t
  misc_feature (915)..(915): n is a, c, g, or t
  misc_feature (920)..(920): n is a, c, g, or t
  misc_feature (1010)..(1010): n is a, c, g, or t
  misc_feature (1131)..(1131): n is a, c, g, or t
  misc_feature (1149)..(1149): n is a, c, g, or t
  misc_feature (1154)..(1154): n is a, c, g, or t
  misc_feature (1194)..(1194): n is a, c, g, or t
  misc_feature (1209)..(1209): n is a, c, g, or t
  misc_feature (1219)..(1219): n is a, c, g, or t
  misc_feature (1222)..(1222): n is a, c, g, or t
  misc_feature (1330)..(1330): n is a, c, g, or t
  Peptide Sequence Number=SeqID_8035
  Probeset Number=SeqID_13619
ntattatccaggcactcgaggagagttcacacgaggagattatatgcacgagattaaaatataaacgccgacccacagagcgacaccgcacttattatatttaccatagtattatatacaacgactcatcctcacactattatttctctattattaatatatcttctgacggccaccaatattgtatatatatccaccccccgaaatatagccacatcacagatgtgtgttgcaatgtattagtaatatnaacatgtcacccaccccacagtatacatgtataacacacattatgtataagaaccaacgaattataagagacaaatagttattatagagcgaagtgatgacaatcgcagcatgaatttacaccacaacacacatattttatatgcgccacacgcgcacacatattgtgtgacaaacaacaacacaactatgtatgctgtgttaaaacaccacagtgatatgtaagagcggatataaagaagatagagtgatgacaaagaaaaaagtaggaggaggagagagtttcagcgggagaagtaacaatataggagcacagacgaaaatataattagaatggaaccgcgcggtagatagtatgttcgcacaaagtagccagcgaagtgtagtaatgtgatatatataaccgcatatagatagaacaagagcagaatattatacacacgcacagattaatatattatccaaacacccacacaatatatgttgcagccaccacacacatataatatnatattttaataataatattaatataacacaaatataatcaaaaaacacatattaattattaaaccaactccgggttaatactcacgacggatggtgaggtctcgattagaatggcgcccgagtaaacatacgtttgtgacaacaaaagttattggnggtgngtgaggatgcgagagcagtatggtctcatggtgtagtattgacatttggatgttaagggtgtagtggtagtggtctgagccacattttgnttataactgttagtgtaagggtctatctatacacacctctaagaaataataagtctacgaggttaggtgaggaataacgcgacggcgtagtatgcgcatagtttatatatacgatgaatantcctccgccttttgtttnttgtnggaggtggatccgcgccggcgcggggtcgacgctatatgnttttgttggtcgcgngtgtgcattnttnggggaggtgaggtgggtgacccggtaggatgtcccgctaccaacaacaggattcatttttaatatctcttttattatcctccataattctaaattgttgtagggattngagtatgtatgtttatatgtgtatactcgcattgtatagtatcatatactctacccaccctccttgtttgtccttcttcttgtctctctca

SEQ ID NO: 3841 - DNA, 557 bp, Glycine max
  Peptide Sequence Number=SeqID_8044
  Probeset Number=SeqID_13620
tgcactcgtacgtacgcttacaattgcgctcgtgcgagctcgagagttaacttcctcacggaacgtgcctgggatatagataatgaagggcatgcagggtacatggatgcgacgaacatggttcttagtgctcattttcgtgcttatgtaccagcattggagactctacgattgcatatagcaccatatcatgactgacctgggcgttgagacttttagcattcggcctattcataagaccgcgggaaccactgaacaatcgatctgctgcattagctcttggggataggattaatatattgcaggatattgctgaacctgcattacttcctcatatagctcaagcccgctcccatagacatccatatgaggtcctattcacgagcttgcagaagctgctgatggatactgctacttcagaatgtgacccctgccatgatttctttggacaagaatctatatcttctgaactttgtccaggtccatttcgtgtcattgatgagcacttcaagtctatacttccaaattgatatgatgctatatgtctcatgcttatg

SEQ ID NO: 3842 - DNA, 1684 bp, Glycine max
  misc_feature (1)..(1): n is a, c, g, or t
  misc_feature (20)..(20): n is a, c, g, or t
  misc_feature (30)..(30): n is a, c, g, or t
  misc_feature (32)..(32): n is a, c, g, or t
  misc_feature (34)..(37): n is a, c, g, or t
  misc_feature (51)..(51): n is a, c, g, or t
  misc_feature (74)..(74): n is a, c, g, or t
  misc_feature (82)..(82): n is a, c, g, or t
  misc_feature (105)..(105): n is a, c, g, or t
  misc_feature (136)..(136): n is a, c, g, or t
  misc_feature (280)..(280): n is a, c, g, or t
  misc_feature (294)..(294): n is a, c, g, or t
  misc_feature (367)..(367): n is a, c, g, or t
  misc_feature (455)..(455): n is a, c, g, or t
  misc_feature (517)..(517): n is a, c, g, or t
  misc_feature (522)..(522): n is a, c, g, or t
  misc_feature (528)..(528): n is a, c, g, or t
  misc_feature (564)..(564): n is a, c, g, or t
  misc_feature (573)..(573): n is a, c, g, or t
  misc_feature (610)..(610): n is a, c, g, or t
  misc_feature (648)..(648): n is a, c, g, or t
  misc_feature (676)..(676): n is a, c, g, or t
  misc_feature (697)..(697): n is a, c, g, or t
  misc_feature (711)..(711): n is a, c, g, or t
  misc_feature (805)..(805): n is a, c, g, or t
  misc_feature (834)..(834): n is a, c, g, or t
  misc_feature (847)..(848): n is a, c, g, or t
  misc_feature (852)..(853): n is a, c, g, or t
  misc_feature (856)..(856): n is a, c, g, or t
  misc_feature (858)..(859): n is a, c, g, or t
  misc_feature (863)..(866): n is a, c, g, or t
  misc_feature (871)..(871): n is a, c, g, or t
  misc_feature (896)..(897): n is a, c, g, or t
  misc_feature (948)..(948): n is a, c, g, or t
  misc_feature (990)..(990): n is a, c, g, or t
  misc_feature (995)..(995): n is a, c, g, or t
  misc_feature (1011)..(1011): n is a, c, g, or t
  misc_feature (1050)..(1050): n is a, c, g, or t
  misc_feature (1192)..(1192): n is a, c, g, or t
  misc_feature (1379)..(1379): n is a, c, g, or t
  misc_feature (1401)..(1401): n is a, c, g, or t
  misc_feature (1596)..(1596): n is a, c, g, or t
  misc_feature (1598)..(1598): n is a, c, g, or t
  misc_feature (1600)..(1600): n is a, c, g, or t
  misc_feature (1602)..(1602): n is a, c, g, or t
  misc_feature (1619)..(1619): n is a, c, g, or t
  misc_feature (1664)..(1664): n is a, c, g, or t
  Peptide Sequence Number=SeqID_8045
  Probeset Number=SeqID_13621
ncgggattagtcgcgccgcnagagcgacancnannnngtagagagcatatnatggacgtcgatcacgtcgacgncggctcangtcagtagtactgcaaagagtcngtatactggcactgaatgtgtatatacgtangtgcactaagaaaagggactgcgactggcagcgcgcagtctacgggctcgcatgtggtgtgatgcgaagatatgcgtgtatcgcgagtgaacagcatatgtcacatatcatacgtgcgtatgatatgacgacagtatcatgtangtcactgatcgcanacactgcaataacgagacacgcgttcggcgtgagctatggaggttatgcgctatctaagttcgcggcacgagnatgagttagaagtctgaggtctacataaggacacgctcgaactgtagaggctccgagtgactgtgtggcagacgcgacaagcacacancaggcctcgtgcgagtcagctgatgtgagtgagatctgactgtacggtgcagttgctctatntgtgntcaatnatacggcacgagataggacgaggagtgaccatatcngctacagangagtgcgcgtgacgtgaaagtgacaagtcaataaganaagagagacgcgtgcgaggagatatcacagtcatgtgnatcgtgcgcagatggatggactggcagnatgacgacgttggcgctgtgngttccgtttactcnactctcccatctacatcctcacacactctcacacacgcatcactacgctatgcggcggctggtgatagtctagtcagaatcaccctcactacancgcggaggggtgtggtcgggtgtgctcgntcttcccaccctnnctcnnttntnnatgnnnnataanatatcaaaatctaatacccactcgnntaattctccgtcgcaacacaatctcacactattattcttccagtgacaggngacacgggcatgcagagctactcctacctcattctgtctgtnctccntctatctctgtgcacnctcagacgccgaatacagggcgcggttacacattccgtngtgcttcttgcgaacactgcacaagaggaccgatcactacgtaaagggcacgcggatgtgcgtgatcgacaatgacactagggacaagggtagcgaggcaccaccctgcgcaatcagactagaggagagagcgacacggganagcgcgcagctgcgactcgcctcggggactgccgcgtatagaccatacgtacaagatgtatcgccgtacacctccctagatgattctatttattcttctagtccacgaactgcgccgttatgtaacgatgcgcggcgcattcgataggcagacataacactactacattgatataacaaagtaatgntggagcgacggcgcgggccacnctgccatatcgcatcgttcaccagagatactacacgataaagcaaacaatataatgaatagtagcaattgatgaatatgatatactccgattctgactcgtgggggtgagtgagtagaatctatcttatctctatccctacctctactcgatgtgcgagcggcctctcaccgacataatcatgatgctgtaagantnananacctcactccctcccgngcgaggtatgagccggtagatgatgagaaaagagaagatagaagngcgccgaacgcacaacaaca

SEQ ID NO: 3843 - DNA, 1951 bp, Glycine max
  misc_feature (1)..(1): n is a, c, g, or t
  misc_feature (7)..(7): n is a, c, g, or t
  misc_feature (76)..(76): n is a, c, g, or t
  misc_feature (79)..(79): n is a, c, g, or t
  misc_feature (85)..(85): n is a, c, g, or t
  misc_feature (126)..(126): n is a, c, g, or t
  misc_feature (143)..(143): n is a, c, g, or t
  misc_feature (198)..(198): n is a, c, g, or t
  misc_feature (246)..(246): n is a, c, g, or t
  misc_feature (249)..(249): n is a, c, g, or t
  misc_feature (321)..(321): n is a, c, g, or t
  misc_feature (362)..(362): n is a, c, g, or t
  misc_feature (379)..(379): n is a, c, g, or t
  misc_feature (440)..(440): n is a, c, g, or t
  misc_feature (474)..(474): n is a, c, g, or t
  misc_feature (705)..(705): n is a, c, g, or t
  misc_feature (860)..(860): n is a, c, g, or t
  misc_feature (903)..(903): n is a, c, g, or t
  misc_feature (942)..(942): n is a, c, g, or t
  misc_feature (968)..(968): n is a, c, g, or t
  misc_feature (1034)..(1034): n is a, c, g, or t
  misc_feature (1072)..(1072): n is a, c, g, or t
  misc_feature (1138)..(1138): n is a, c, g, or t
  misc_feature (1181)..(1181): n is a, c, g, or t
  misc_feature (1205)..(1205): n is a, c, g, or t
  misc_feature (1345)..(1345): n is a, c, g, or t
  misc_feature (1411)..(1411): n is a, c, g, or t
  misc_feature (1502)..(1504): n is a, c, g, or t
  misc_feature (1522)..(1522): n is a, c, g, or t
  misc_feature (1566)..(1566): n is a, c, g, or t
  misc_feature (1659)..(1659): n is a, c, g, or t
  misc_feature (1686)..(1686): n is a, c, g, or t
  misc_feature (1722)..(1722): n is a, c, g, or t
  misc_feature (1756)..(1756): n is a, c, g, or t
  misc_feature (1767)..(1767): n is a, c, g, or t
  misc_feature (1809)..(1809): n is a, c, g, or t
  misc_feature (1825)..(1825): n is a, c, g, or t
  misc_feature (1890)..(1890): n is a, c, g, or t
  misc_feature (1915)..(1915): n is a, c, g, or t
  misc_feature (1917)..(1919): n is a, c, g, or t
  misc_feature (1923)..(1923): n is a, c, g, or t
  misc_feature (1930)..(1930): n is a, c, g, or t
  misc_feature (1936)..(1936): n is a, c, g, or t
  misc_feature (1941)..(1942): n is a, c, g, or t
  misc_feature (1951)..(1951): n is a, c, g, or t
  Probeset Number=SeqID_13622
nctctantagtgatgagatcagatagtaatcgccggacgccaaacgccgtgataactgctcgatgtgcgtctcgcncanagatcncggtaccgaccatcattattagccgtgtgttgtgagtgacnccagtgcgatgtcgagncgctgtcagcggtagggtatacaatgtgtacggtatgtgtatgtgctcgtgtcgnttcgtgctgtgtgcgtcgtcagtgtcgtgtcgtagtataatcgcctangancgtcgcgggcgaacagagagagagagcaagcagagagattcagagcacgtgttacaatatagaagatcgcgntgtgtgcatcatatcattatcgtagatgatgtctctcatcngtcattgcagtatatanctcatgtcgcatattgcgacgtcacatgcactacgaacagcagaatatcgagcgtgagganggagtcgcggacgatgcagagtggagtggtgtgnagcgagcatgcattcgtattcgcgtcgtgattaattgttaaccgtacgtttactctcgagagagtaagtcaaaggcagagaggtagagacggagaaactattaggtaaggagagtagatgtgaggacatagtacaaatctaggtatatattagagtgaaaagagaaggagtgaggagaagagagtagtgatatgaagtcttgtggactgtgtatagtgggacggatgatgnattagagtagttgatttgaataatagtacagtctatagtattgtcgtgtgcgtttaggaataatagtgatgtagagagatatgagatcgttatagtatgatataactcaatcagcgacacatattatcacgaattacgtgcatcgcggttagtgngagcatgcagtcgtgggaggatgcgtcgagcggatgcgagcgnatcgcgtgatgagagcagagatgatcgctatgctaccgncgtgctatcgcaacccgctctctgcntatatgtacacgtccacccgccgacgccgcgtcgtgcgtgcgatgcgcgttgtctcgtgtgtgtgngggtctgcgtgtgaggttgcgtacatagtatatgttangtgtagtgtggagtgtgagcgcgctactacagtgtgagcgcacgccgacagtcgcacaccgattgncgatgcgcggcgagacgtgtagcgcacgctcgcgatcgttagnatgtgtacgtagacatgattacanccatcatattgcatacgtcacaatgtcgttgctcgttctcggtgtgcgcgtcaccacacatcattccgccatacatgaagatggatgtagtagtcaagagatacgtcagcgattctcgtcgtgtagtgtcggaagagagnggtggagtggtgacgacgcgagcggagtgggggtcgtgcacccctaacgcagtagcggccttgcgncgcggaggtacgattcttatctgattaggtgagattatgttaggatattgtgagaatgtagtgggtaagctattatgaagcgatagcaagnnnaacacagacaaattctcnaacatcatcacgactcataacgatatagtattatctactctctncacacattacattcataatcactctctcacatagcatctacaccacatcgtagaatacgagttacgacattatgttgatatctttaattgaangatataaatatagtatacatataacantgacactaagctgggggaaccacacacgaccacaancaccacaaatctgtgtctgttttctatttaatancaaccatctgnttatgctgagaaggagatatccacgcagccgccgataaattngtggcaacctgcaccnggctcacggaggagctggagtagtcacacagcgcgcggggagattagtatcgtgataatgaatcnggagagattgcagtagtttaggtgntnnnattntaaaggnctctcncggcnnccccactcn

SEQ ID NO: 3844 - DNA, 1660 bp, Glycine max
  misc_feature (13)..(13): n is a, c, g, or t
  misc_feature (16)..(17): n is a, c, g, or t
  misc_feature (21)..(22): n is a, c, g, or t
  misc_feature (26)..(26): n is a, c, g, or t
  misc_feature (28)..(28): n is a, c, g, or t
  misc_feature (33)..(37): n is a, c, g, or t
  misc_feature (39)..(40): n is a, c, g, or t
  misc_feature (42)..(42): n is a, c, g, or t
  misc_feature (151)..(151): n is a, c, g, or t
  misc_feature (256)..(256): n is a, c, g, or t
  misc_feature (299)..(299): n is a, c, g, or t
  misc_feature (301)..(301): n is a, c, g, or t
  misc_feature (314)..(314): n is a, c, g, or t
  misc_feature (316)..(316): n is a, c, g, or t
  misc_feature (537)..(537): n is a, c, g, or t
  misc_feature (546)..(546): n is a, c, g, or t
  misc_feature (591)..(592): n is a, c, g, or t
  misc_feature (713)..(713): n is a, c, g, or t
  misc_feature (724)..(724): n is a, c, g, or t
  misc_feature (737)..(737): n is a, c, g, or t
  misc_feature (744)..(744): n is a, c, g, or t
  misc_feature (789)..(789): n is a, c, g, or t
  misc_feature (796)..(796): n is a, c, g, or t
  misc_feature (808)..(808): n is a, c, g, or t
  misc_feature (851)..(851): n is a, c, g, or t
  misc_feature (863)..(863): n is a, c, g, or t
  misc_feature (869)..(869): n is a, c, g, or t
  misc_feature (871)..(871): n is a, c, g, or t
  misc_feature (880)..(880): n is a, c, g, or t
  misc_feature (884)..(884): n is a, c, g, or t
  misc_feature (900)..(900): n is a, c, g, or t
  misc_feature (905)..(905): n is a, c, g, or t
  misc_feature (909)..(909): n is a, c, g, or t
  misc_feature (1055)..(1055): n is a, c, g, or t
  misc_feature (1139)..(1139): n is a, c, g, or t
  misc_feature (1192)..(1192): n is a, c, g, or t
  misc_feature (1320)..(1320): n is a, c, g, or t
  misc_feature (1340)..(1340): n is a, c, g, or t
  misc_feature (1381)..(1381): n is a, c, g, or t
  misc_feature (1386)..(1386): n is a, c, g, or t
  misc_feature (1410)..(1410): n is a, c, g, or t
  misc_feature (1425)..(1425): n is a, c, g, or t
  misc_feature (1476)..(1476): n is a, c, g, or t
  misc_feature (1558)..(1558): n is a, c, g, or t
  misc_feature (1583)..(1583): n is a, c, g, or t
  misc_feature (1588)..(1588): n is a, c, g, or t
  misc_feature (1591)..(1591): n is a, c, g, or t
  misc_feature (1608)..(1608): n is a, c, g, or t
  misc_feature (1645)..(1645): n is a, c, g, or t
  Peptide Sequence Number=SeqID_8046
  Probeset Number=SeqID_13623
tttttttcttttngtnntttnnttgntnttttnnnnncnngnaggagacgtcggcgtcccgctcgtcgctttgcccgcgctcgcctcgtagcgccaacacaagtcatacgtcctcgtcgccgcctctctcatcaggaggggagtgaggtgngtcgctcgacctacacgaagcaatatcagagagagctcccacagcacacggcgtagccagggcggggatacggtgctctgtctctctctcttagtctctctgctngtccgcgcgcgagcgcgatggggcgacaacaatacattcaccncntgtcgtaggattngnactctctctctgtgtctgcctgcgtcatacttgtgcttgtgcacacgacgatcacacgggtggcagcaccgcgcggcatcgcgctgaagtcgtgagcgcgcgcccgtctctcctacttggcgcttgttcgattgtacggtcagttatattcattatctataactatccatttacatccatgataaggagagagcgcgaggagcggagggcatgagtgcgangatgcagcnagagtcaccctgcacatttatacattatcgtatggttgtatctanntttttcataattatagtcttcttacgccatctcaccgctttgctctttttatttctacctctgtctcgtacgttcgattctctcgttctgctgtgttctgtcctgttctatctcgcgacgncgtgctgagtnccgctacgctacngtctatngtgtctgcgcctcctctcgctactcctctcgtcatttcgacgttntcttatncttccgcttgtntcttatagtcattttgtaattgtgataatatgtgttgatgatnacgtaactgagngatatntntggataatnaganatggaaggattaattnacatnagtngtgtgttggtgtcggtgtctggctgttgtgtagagattgatgattgataatgtgctgctcgagttgtagccgcttctcgctgtctcgtggtgctgattgtatgtgagttgtcgatcgatggcctgcactcacccaccactatacancttcccacacccacagtgtggcttgtcctctggttagtctacattcggttagaattagtcttatacactctgtctcccccgccncgccctgccatggcatcacagagcgcggagcccgagacctatcgcttacacancatactccccgcggtacacagtgactatgccgatgctcgcctccactctctcctatgttctctgccgcctcgctcttcttacacggacaatcaccggccgcacatgtcgcctatggtatcttgtctangcattgtacgtatatacgtngcctgcgccgcgtcgtgcagagcctatcactgtatgttgcnctatncgctgtcgactgatctcgctacgntcactaggattcgtnacgtacggtgtggtgagctgtagcccagcgtcgttgattcgtcaactgtcncacggtacctcgtataatgatctgttatgcgcaggtcagctaacacgtgatagtcactcagctagacacagagagagagtancttgcgcggtcagctgcaccatgangaaancgncgagatctgtcgacgangtacgcgtatacgagacatcaacacagtcacgctgcnagctgcgctcatgaa

SEQ ID NO: 3845 - DNA, 601 bp, Glycine max
  Probeset Number=SeqID_13624
tgcatggcctgcagcagatgcgtgaagctggcctgtccacgacagtgccgaacagtagtgaccgatagtgagaaacaggccctgctggcccatctcaagagcagtcacggcgacaaggtcgaagagccgcgcaagatcaccttgcagcgcaagaccaccagcaccctgcgcgttgctggtagcaagaccatcagtgttgaagtgcgcaagaagaaaaccttcgtcaagcgcagcccggaagagatcgaagccgagaagcagcgcgagctggaagcgcagcgcgccgctgccgaggctgaacgcctgaaggccgaagaagaagccaagcgcaaggctgacgaagaagccaagcgtcagcctgccgctgctgcgaccgatggcgctgcaccagttgctgcgccgacgcctgtcagcgagccgctggttgccgctccggtcgtcgaagtcgagcgcaagaaagaggaagtgcgtcgccccgagaaggcacgctctgatgaagatgagcgtcgcgatcgcaagcacacccagcatcgccccgcgaccaaggagaaggcgccggctccgcgcgtcgctccgggtaacgtcgatgaagaaagcgacg

SEQ ID NO: 3846 - DNA, 1474 bp, Glycine max
  misc_feature (87)..(87): n is a, c, g, or t
  misc_feature (731)..(731): n is a, c, g, or t
  misc_feature (907)..(907): n is a, c, g, or t
  misc_feature (947)..(947): n is a, c, g, or t
  misc_feature (1177)..(1177): n is a, c, g, or t
  misc_feature (1190)..(1190): n is a, c, g, or t
  misc_feature (1192)..(1192): n is a, c, g, or t
  misc_feature (1205)..(1205): n is a, c, g, or t
  misc_feature (1230)..(1230): n is a, c, g, or t
  misc_feature (1234)..(1234): n is a, c, g, or t
  misc_feature (1238)..(1238): n is a, c, g, or t
  misc_feature (1338)..(1338): n is a, c, g, or t
  misc_feature (1374)..(1374): n is a, c, g, or t
  misc_feature (1378)..(1378): n is a, c, g, or t
  misc_feature (1387)..(1387): n is a, c, g, or t
  misc_feature (1403)..(1404): n is a, c, g, or t
  misc_feature (1406)..(1406): n is a, c, g, or t
  misc_feature (1411)..(1412): n is a, c, g, or t
  misc_feature (1414)..(1414): n is a, c, g, or t
  misc_feature (1421)..(1421): n is a, c, g, or t
  misc_feature (1425)..(1429): n is a, c, g, or t
  misc_feature (1435)..(1437): n is a, c, g, or t
  misc_feature (1439)..(1440): n is a, c, g, or t
  misc_feature (1442)..(1442): n is a, c, g, or t
  misc_feature (1444)..(1444): n is a, c, g, or t
  misc_feature (1448)..(1452): n is a, c, g, or t
  Peptide Sequence Number=SeqID_8047
  Probeset Number=SeqID_13625
acagcacatatataaatatgttgtaaatgtatatatgtcgagaatcaggagataggcatagacaaatgaagtagtgtgtgtagtgtngatagggatctgagaagcgtacgagagagttgtatgtaacggtgagcgaggcagagactcgcgcgtgttcctggagtatgagacattcactgcgcgtgcatatgattgtagataatacgcgagacaccgcactggcacaaggatgaggtgtgggagtatacgacgcataagtccagcatcgtgcgtgttagcgtgtgagctcagcgatagggctcgatcgagtctggcgtacagcacacgagcaagaggtggagttaggatgtgtatgtgtccacgtactctgtatctcataggaaatcgacactacacgaggcgagagacaggacggcgaccgaggagctgcgtatggcatgacggtagtaatcacatgtctatgcaagatacaagcaagaacatggcagaggtaccagatatgcacaagtaacgcgtatatcacaaacaagcatatgatcggagaggcaccaccatatctagaggaggagacacgtactggatgtgcgcggtctgtgtttagagatatcattttcttagatagtgtgaatatctgatatatacaataagacttcaagacgtcagtgcggagcacatcatcgcggacacatgagggagagagcagccgcggttgaatagtgaattaaatagtntgatatgtgtgtttcacgctgtagtgaccaattaccgtcaaaaacgaactgtcttaccctgaccgtaacttcacagcagctacgagatctcgcattacataagacgaatattatcaactttaggagatacttgctcgttcttctgattgtgtatggatttgctatactctcattanaatttatttagaccatacaacaaagatcacgtaggcaagntagaggcggcagaagggtagagaagaagagaagacacagcccccacacacacccggcgcagatggcaacaagagaacggatgagacaacaacacatatatatatggcaggtatactcgtcttgcacaatatattattatctatcgaaattctaatattaatatgtataggacgtagataagtaacatcacatcgcgcctcactctcagatataatataataaactataanactataatgtctntntgttcgggattantggtaagctccactcatccatcatnacantcanccatacacccacccacaacgatctattttgtctattgctcttttcgatgattttttatcccagtctctccgcacgtcatcatcgccgttcatctgggagntttgtatcatctcattcacctatatagagacctacngtcnaacaactcncacgacatgcaagcanngnaattnntnacgccgntgcnnnnnaaaaannnannananagannnnnaaacccaccccaccaaccccac

SEQ ID NO: 3847 - DNA, 1451 bp, Glycine max
  misc_feature (1451)..(1451): n is a, c, g, or t
  Probeset Number=SeqID_13626
agcatgaagatggaatttttcctcactgatcacaccttgtccaacattaaagttaatgacaccggagttgccttgactgctttcggtcctttctctaagctcagagccaccgatgttgatggtgatgtctatgaattcgaagctctccaattccatttccacgctcctgctgaacataccattaatgaaggaagatacgaattggaacttcacattgttcacaagatgactgaagaatctgaaaagagagccaaaactcacagaaacctcgctgtcgtcgcagtcttctttgaacttgataaagaccccagaactacccccaacgctttcatcgatgctcttaagcttgacagatgcggttgcgatcttgacctcaatatgtacgaacttctctctcaagacctcactgaaatgaccagcttctttgcttacaagggtggtttgactacccctccttgcagtgaaactgtcaactggtacttgtttgaaaagcccgttaagatcactcaagctcaattgaaccactttaacctcagatggaaagacaacatgaacttcgcttgtggtgaaggtaacaacagacccattcaagccctcaacaacagaactgttctcaagagtaacaactgctgtgtcatgggtaaatctcaagaatacatgagagaaatgatggctgaagttaaacccagagaagaagtcagtctcaccttgaacagagaaatgatgattggtgaactctctgtcaagagccaccacactagagttgatacccaaagctttattgattcccctaccttcaagaaaaaggctagctactctgaacaagtcggagaaaagagcttccctggcgaaaccccaagcagtatgaaaaagagcgcttactccaagacttcaatccacaaccccgtcaccacttttaccaacgttgtggaatccaaaaactaaaaaagtctaatcactcagaacattttttctccttcatagtcaaggagaaatatgggaaggaataacccatccaaaccacctctaatttaaaatgaaagttggtttcttcagagttgaaaaacttttaaaggcgaaaaacatataaaaataaaaaaagccttttagtcagtcttaagacagctttctatcttacttcaaccattgactagcgcatacaatataaatatccgcggttagtgttcccagtgagctagaatgtattgttttactcccgtctgagatttcagagtcttctgaaactctctttcaaaactttgtctacagcccataaatctatcaattatatattatttgctataaatttatctttttgtttaaactgctggatatcgatcttatatgtttaacgctttttatttgtttaagatgttaagaatattatattctagttggccctttttggtctgacgtttataattcaatcatcagaattaatctgtctcctn

SEQ ID NO: 3848 - DNA, 232 bp, Glycine max
  Peptide Sequence Number=SeqID_8048
  Probeset Number=SeqID_13627
agaggttgctggagtatcagtggaactatgactgtgggacttatgtcactaatacttttgaaattcggggttttaatatcatatctgaactgggtattgcctttggaatgcgatatatcgaagctgtatatgaggatggtttcattgcatatatcaatggccgagacttttattttaagcatctttgttccactgttagagtatcgataatgatcttggtttcactgtccac

SEQ ID NO: 3849 - DNA, 484 bp, Glycine max
  misc_feature (10)..(10): n is a, c, g, or t
  misc_feature (72)..(72): n is a, c, g, or t
  misc_feature (81)..(81): n is a, c, g, or t
  misc_feature (85)..(85): n is a, c, g, or t
  misc_feature (89)..(89): n is a, c, g, or t
  misc_feature (96)..(96): n is a, c, g, or t
  misc_feature (111)..(111): n is a, c, g, or t
  misc_feature (128)..(128): n is a, c, g, or t
  misc_feature (139)..(139): n is a, c, g, or t
  misc_feature (146)..(146): n is a, c, g, or t
  misc_feature (153)..(153): n is a, c, g, or t
  misc_feature (167)..(168): n is a, c, g, or t
  misc_feature (180)..(180): n is a, c, g, or t
  misc_feature (186)..(186): n is a, c, g, or t
  misc_feature (189)..(189): n is a, c, g, or t
  misc_feature (216)..(216): n is a, c, g, or t
  misc_feature (220)..(220): n is a, c, g, or t
  misc_feature (223)..(223): n is a, c, g, or t
  misc_feature (236)..(236): n is a, c, g, or t
  misc_feature (272)..(272): n is a, c, g, or t
  misc_feature (290)..(290): n is a, c, g, or t
  misc_feature (294)..(294): n is a, c, g, or t
  misc_feature (310)..(310): n is a, c, g, or t
  misc_feature (316)..(316): n is a, c, g, or t
  misc_feature (335)..(335): n is a, c, g, or t
  misc_feature (356)..(357): n is a, c, g, or t
  misc_feature (361)..(361): n is a, c, g, or t
  misc_feature (363)..(363): n is a, c, g, or t
  misc_feature (390)..(390): n is a, c, g, or t
  misc_feature (398)..(398): n is a, c, g, or t
  misc_feature (416)..(416): n is a, c, g, or t
  misc_feature (419)..(419): n is a, c, g, or t
  misc_feature (436)..(436): n is a, c, g, or t
  misc_feature (451)..(451): n is a, c, g, or t
  misc_feature (482)..(482): n is a, c, g, or t
  misc_feature (484)..(484): n is a, c, g, or t
  Peptide Sequence Number=SeqID_8049
  Probeset Number=SeqID_13628
atccccatcnaaacacaagcaaatcctaaaaagctgattgagatatatagaaactaccttccatttcacaanatgaagaangtgnttgncacattnttagctgggctagtngaatttgatcttacagngaaagcttcanaggcacnactaccngttaaaacaaattnngcatcaaatgantacaantgntcacaagcgtataacctgttagtttcntgcntanattacatgattgntggagatgatggggccccttcacgtgattgttgccnaagtgttaatgcagaganagcntcagcacccccacaantctccnaatggctgcatgtaagtgntttttccacggagaagactcnncttncnttcttgctcgaaaacaaggcccattcncttccganaagtatgcggcggtcgancangggcaggatcatgagcnagcagaaaaccaacntgtgacaaaggtcctggaagctcaggcatgntn

SEQ ID NO: 3850 - DNA, 729 bp, Glycine max
  misc_feature (636)..(637): n is a, c, g, or t
  Probeset Number=SeqID_13629
ctgcagggctggaagtctgccggctatgaggtgttccaggacgtcaattcctatgccaaggcgttcggtgaactcgtggaagcgcggcggcatacgccgtcgctgccggcggcggaagtcaacgcgctgattgccagcggcgccaatatccagatcctcgacgtccgccgctttgacgaatacgcaaccatgaacatcccgggttcgatcagcgtacccggcgcggaactggtgctgcgcgcgggccgtgccgcgccggaccccgacaccacgatcatcatcaactgcgcgggccgcacccgctcgatcatcggcacccagtcgctgatcaatgccggcgtcaccaacaaggtgcgggcgctgcgcaacggcacgatcggctggacgctggcaaagcaaacgttcgaaaatgggtcggaccggcgcggcgagatcggcgccatcgccggcggcgaagctggcgcgcgcgatgtggcctatcgcgccggcgtccgccacatcggtcttgccgaattgacggtgctgttggcggatgcgcggcgcacgctgtaccgcttcgacgtgcgctcggaggatgagtattccgccagtcatctcgcgggcttccggcattatgccggcggacagctggtgcanngaggtcgacatggccgcaccggtccgcggcgcgcgcatcgtgctcacggatgaccggagcgttcgcgccgacatgacggcgtcctggctcgc

SEQ ID NO: 3851 - DNA, 1514 bp, Glycine max
  misc_feature (1)..(1): n is a, c, g, or t
  misc_feature (91)..(91): n is a, c, g, or t
  misc_feature (551)..(551): n is a, c, g, or t
  misc_feature (643)..(643): n is a, c, g, or t
  misc_feature (677)..(677): n is a, c, g, or t
  misc_feature (685)..(685): n is a, c, g, or t
  misc_feature (694)..(694): n is a, c, g, or t
  misc_feature (702)..(702): n is a, c, g, or t
  misc_feature (721)..(721): n is a, c, g, or t
  misc_feature (745)..(745): n is a, c, g, or t
  misc_feature (750)..(750): n is a, c, g, or t
  misc_feature (789)..(789): n is a, c, g, or t
  misc_feature (902)..(902): n is a, c, g, or t
  misc_feature (1027)..(1027): n is a, c, g, or t
  misc_feature (1054)..(1054): n is a, c, g, or t
  misc_feature (1118)..(1118): n is a, c, g, or t
  misc_feature (1158)..(1158): n is a, c, g, or t
  misc_feature (1253)..(1253): n is a, c, g, or t
  misc_feature (1268)..(1268): n is a, c, g, or t
  misc_feature (1274)..(1274): n is a, c, g, or t
  misc_feature (1432)..(1435): n is a, c, g, or t
  misc_feature (1437)..(1443): n is a, c, g, or t
  misc_feature (1458)..(1459): n is a, c, g, or t
  misc_feature (1464)..(1464): n is a, c, g, or t
  misc_feature (1467)..(1468): n is a, c, g, or t
  misc_feature (1473)..(1475): n is a, c, g, or t
  misc_feature (1478)..(1493): n is a, c, g, or t
  misc_feature (1500)..(1500): n is a, c, g, or t
  Peptide Sequence Number=SeqID_8050
  Probeset Number=SeqID_13630
nggatgttggtgattgtgatgtgacacaagcatacagtgtataacgtgtcggcgtgtggtatgcgcatacaacagacaggtagttagcatncactccacgccatagtgatgacatgcatagtgtggttagagataacacacagcagaaatcgagtaacaccgtatgatggtatacacgcaggagcggtgcatatgcgagcagggagatggacgcaccacgattcccgagcggggaagagggattgatgactgctaattcgatcaacaacacaattcagtagtatgtcctcagcacaataggtacacataatataagtggcagcaggaggagcgctctcacatccacgtttcgcacgctcaccacaaaagtagccgagttgtggttggtagtgtgtgtaatgtctgatgcccactcgcagatgtatgtgtttagtatgagagtccatatagacgcgagcgtgaattgagtgtggcacagagttgtgacgcagctgttgcagcactgacgaatcgagcaagagtaatagcgaggcgcatgtggttttgttgtncccagacagttgagtatatgcattatacatctccaaacatcttattgtgcacaccacgcttgatggagtagatgtagagacagtttggtttntacaccaaaatgttttagtagttttgttttatgnctcatatnattatatantttcagtnagtatatttcactattatntttattatatatgatacaccatanctcantatagagacaaacctcgcgcagactatatattagatcantatagaagcagaacgagataaacatgtatgatgcgtagtgtatcgcgacgcgacgcgcgcagctgtgtatgtgtgagcgaagaagaacaagtacgagcacaaacgagagaganagagagtgagcgtgcgagtatgatgtgcgagtacgcgggagatgagtgcgtgtgacacacacgcgagcgacgtgtgtgaagaggtgagcatatagatcagagtcgcacaccacctatttttgagntgtggagagaggagtgtacgacagctnctggatagatacggatgttaacatgatgtgtgtattctaatggaggtggtagtatgagggcagnacggcatgtgtgtcacaagagagatacgcgtggagctagnggactgttagccagacgacccgatgcgtacatacgcgaggcacgcgacacgcacgaccgacgagttctagaggagtccagatagtagtagacganaggaggatagagcancactgnatcgtcagtagaggggagtgggggagcgacgtgactgcaccgcgttatcgtgtcgtgatgagtgtgttttatcggtgtgggtgtgtgtagtgagctgtgagatgttgcacgccagcggtgtgggttgtctgcgtcgatcactgatttgtcggtgcgtnnnngnnnnnnngcaagttgcagagtnntgtgnctnntaccnnngcnnnnnnnnnnnnnnnnacaaccnatccctccaaactc

SEQ ID NO: 3852 - DNA, 1525 bp, Glycine max
  misc_feature (1412)..(1525): n is a, c, g, or t
  Probeset Number=SeqID_13631
atttcacttttacgcgtcggagaaaaaccctggaagagagcgagcagtggcaaggaatcttcatggtcgatgctataaaagcgtccgttgtttgagattccatgtttcgaatcgtccaacttgagatcctcacaaaaacttgaatcaactctcctccgaacaaaaaagagaaacacgaaattcataggaagcatccttggttttatatcaatttcaaaggaacgagagaaagaaaaaaaagcgcttaaattggttattcatggaagagactaaacagcgtgttgctcttcaagagagattgaggatggtgtcttctgaaattgttgaaaaaggtcaaagcagtgaaagcaacaagcaaattctgaggtcaacccttaaggataacgctgctgtggtgcaagagatcaagcaatacaacgagcacttgaatccacccagagaagaaatcaacaccctttttggagaaaaagaaaatgcagatgaagaatttgtttgtaaatggttctccaagtggtgtctatctttgtttctgtgcagatttgggcagaagagggatgattcatttgctggtggtgctgagaagcaaggtcttgtggcaaaagacccacgcgtccgtacggctgcgagaagacgacagacgggtacggctgcgagtagacgacagaagggtacggctgcgagaagacgacagaagggggcgcaccacactgagaggaagagggagtgagagagagtgttcttcgtttgctaccttctcccagaaatggttacgttcaggtttcaccagtaccaggtggtcgggagggctctcccaacggaagcagatcagcatccgaagatctaccgaatgaagctctgggccaccaacgaggttcgcgccaagtctaagttctggtattttttgaggaagctgaagaaggtgaagaagagcaatggtcaagttcttgctatcaacgagatttttgagaagaacccaaccaagattaagaactacgggatatggttgcggtatcagagtaggactggttaccacaacatgtacaaggagtaccgcgataccactctaaacggttcagttgaggcaatgtacaatgagatggcttctcgccacagggtcaggagcccatgcatccaaattatcaagactgcgaccatcccagctaagctttgcaagagggagagtcccgagcaattacccaactccaaaatcaagttcccattggtcttcaaaaaagttagaccgcctaccagcaagcttaagaccacatacaaggccaaaaagcccaatttgtttatgtaatgtgggttatgaatgggtctccaaaacctatggtgttttccaggcgttttcagtaaaaaaggaccccgtgggtttttacctcctgaattttggttagggtttttttaatggnnnnnnnnnnnnnnnnnnnnnnnnnnnnnnnnnnnnnnnnnnnnnnnnnnnnnnnnnnnnnnnnnnnnnnnnnnnnnnnnnnnnnnnnnnnnnnnnnnnnnnnnnnnnnnnnnn

SEQ ID NO: 3853 - DNA, 1735 bp, Glycine max
  misc_feature (13)..(16): n is a, c, g, or t
  misc_feature (30)..(30): n is a, c, g, or t
  misc_feature (39)..(39): n is a, c, g, or t
  misc_feature (73)..(73): n is a, c, g, or t
  misc_feature (176)..(176): n is a, c, g, or t
  misc_feature (502)..(502): n is a, c, g, or t
  misc_feature (745)..(745): n is a, c, g, or t
  misc_feature (826)..(827): n is a, c, g, or t
  misc_feature (974)..(974): n is a, c, g, or t
  misc_feature (1017)..(1017): n is a, c, g, or t
  misc_feature (1244)..(1244): n is a, c, g, or t
  misc_feature (1275)..(1275): n is a, c, g, or t
  misc_feature (1302)..(1302): n is a, c, g, or t
  misc_feature (1379)..(1379): n is a, c, g, or t
  misc_feature (1435)..(1435): n is a, c, g, or t
  misc_feature (1468)..(1468): n is a, c, g, or t
  misc_feature (1541)..(1541): n is a, c, g, or t
  misc_feature (1617)..(1617): n is a, c, g, or t
  misc_feature (1735)..(1735): n is a, c, g, or t
  Peptide Sequence Number=SeqID_8051
  Probeset Number=SeqID_13632
gccttctcctacnnnnctttcttctctctnttttatctnaacttttccctgcactacactgtcacagcatatnctacatgacgtcgtgctacgatccgcagtgtatggcaacaggagtgtatactcgagcgcacttctgatagagatgagttactgcagcgtatgcgtgagcgacnagatctctctatgtctcgtatgtctatctatatatctgtatcgccggatcgcacctgatatctcatctacgcatacagcacgcgagattacatagacgtacagaagagcaacagacatataaataactatgagcactgctgcgagcagagtcgaaccgacacgcgcactatgactccatatggcgacatgtcactttatggtctctgatggatatacgttagtctcgccatgactggtgtgatctcctgttttatcgatactgcagtaacgcgatacggacaccagtggaggcggcgcgtgcaatgcactaatgagtggcgttcgncttttgttaatgacgcgcgaacgtgaaggagtaatgcgatggaattagcttcgttaattgatcagactgatgcatgtgtacagtccacgcctcctctctcctatactcgttgtgagtctgtgtgtcgcatgagggttgctagtcgttatctctccctcacatttaatacaagtgtgtctcgggtgatatgggttgtccgttgttcatgtgacgaatctagcgatgcgcactcgtccgccgcanatgtaatcctgcgtgtgtgtactgatcgtcagccgcgcgcggccggttcgtcgattgcctattgtgcggccacctcggatnnacgcacgtgtagcagacgctagtataggtgtcgagtcctgatgacagactcacatgcgatcacagaaagcaagacaagtggagtaatatattatagtgcgccgtctctgtcttctagcgccatcgagaacacagacatatatgagcnctactgtcatcggtatgatagtacgcatgtagcgaccagaatngcttgagtctaccagagcctattcggaacaccacgatggtagagttaccagtatagatgagggtgcgtatacgagctcaccacactatcatttcatgtagtatattctatatctgttggtggagtaacacgtgattcagtgtactcagtcactatctacgtatgacatacatatatgtatagtcgaagctcatcaccacactgttcacgtacgagcatataataacngttagaattagagctcatggattaaacaccngatcctggtagatctaatatatacaanacatactcatcatactatatatggcattatgtacattatctcttgcgtttgcgtacacgtcttggtctagatcatcnttatctgagacgtgtgatctgacatgtagacaccactgcgcagaaacgctctatcntacaggctcgagtgagtacatatgactaccgtngaacggtacgactcgcatcatcatacatcgcctatgtactacacatgtgacagaatataacacagaggatgantacatcacatatatccgcgcgtcacatcaccagacggagcgcgcccagagcagctccgcgagagtaatactactgnctacgacaagagcgctgatcgtcggtgcctgctgccgacagagatgcatgatactagtatcctatctgccgattaccacacactgtccctgagtgcagggactatagattttagatgn

SEQ ID NO: 3854 - DNA, 1363 bp, Glycine max
  misc_feature (1)..(1): n is a, c, g, or t
  misc_feature (62)..(62): n is a, c, g, or t
  misc_feature (138)..(138): n is a, c, g, or t
  misc_feature (1320)..(1320): n is a, c, g, or t
  misc_feature (1331)..(1331): n is a, c, g, or t
  misc_feature (1345)..(1345): n is a, c, g, or t
  misc_feature (1351)..(1351): n is a, c, g, or t
  Probeset Number=SeqID_13633
nagggagtatgtagcgtagtatgtcgatggcgaattatgagtattccgtcgatagttgtganctacgcttcgtataatgtgatgagacgtattaacctctatataccgtcctacttgcagatgctgtagatctcatgntctctgtgatccctccgatacatgcgtctattagtctccttcgctgagcgactcctatgtcggagaatggtaatagcgtcacatagccgtgatgtagcacacgacgaagacgaggagtggcgtgtcaggtctgtagtgcgtttatgagctctgttgcgtggtgatggcgcctatagcgagcacgcggcttgtagtctctaatctgtcaggtattctgatgtgagaatataagtgcgcatgcagcagagtgaatcgctgctgcgcaaagcggtgagcatatagatgcgagtctgaagggggtcgcgttgtcggaaggttgtggagtactgtcttattacacatagaccgtaatggcaagttttatgctaacgggcgcagtaggaggaagaggccccatgaagaactacatggatcacaccacccccaatgagctcggccaaaagcgcgcggcgtcttgttaggatattgtgagattaccaagtgcgggacgatgtccatatagaggaagacaattgttccaatctgagctttgggcggctctttcttggtgagatactgttccatttggcagtgagacggagatacttatgtcagtggtatatgcgtaagcaatacgctataatgagacactctctgtccgtcgtaagctaccgggggggctcgcgtagagacagcgtcaaaaagatcaaggcgaagtgtatgcaggggtcttattgccacgggagggtcaaggtaagtatccacagtcgattttgtggcttgggcgacaaaactgctgatcggtgtgattaaattcaagctgaagcgcattatcatgcccatgagaggttacagaactgtgggagggtatgctgcaatcgaggagatgacaagtaagcgtgaagtaacgtccctcctaactgctgtggtatattaaagactgagtatctaggctgttgccctgctctctactctcctatgcagggcgatccttgttctaaatgtggatctaccacgaatacatcatacgtataatgctgagagagcgagaccatttaccggagaagagaacagtctttcctataatagttaacagtctattcgcacagggtcggaaaaaaagaaaaagagagggagacgttgatcgtatggccgtcgagcgtggagggggggggaccggaacccgaattaggaaatagtggntgtttagattnttgtgaccactttncagctngtgggcgagtgg

SEQ ID NO: 3855 - DNA, 521 bp, Glycine max
  Peptide Sequence Number=SeqID_8052
  Probeset Number=SeqID_13634
agatttcgattagccgggctgcccatcccatccgagtactgtccagtcagttgttggccgttgctgtgattggtaagcacttactttttgactccaatcttcaagtctcctaaatcagcgaccatgccagtgaaagcagtgtgtgtgctcatcggtgagaccgtcaagggaaccgtcaacttcgagcaaagtgcggatggcgcccccgtacaggtgtcaggagagctatccggactagctaagggacttcacggcttccatgtccatgagtttggagataacacaaacggctgcaccagtgctgggccccacttcaaccctctgggcaaggaacatggagcccccaccgatgctgttcgacatgcgggtgatcttggaaacgtagaggctggagctgatggtgtggcaaagataaacatctcagacaaaatgataagcttgtcagggcctaacagcatcattggcagaactgttgtggttcatgctgatcccgatgacctgggcaaaggtggccacgagct

SEQ ID NO: 3856 - DNA, 1169 bp, Glycine max
  Peptide Sequence Number=SeqID_8053
  Probeset Number=SeqID_13635
atcagcattccaacaaatgttgctgtatttgaaaaacagaagcactcgattgacacatcgattgaagcgtcagccaatgcttcttcgccagcctttagcctttcagagaaaaagaatcggctggatattacaggacaaaaggcgggaaaagctgaaattgtttatgattttaaaggatttcctattaagaaaacaaaagttgacgttctccctgaattaaaagtcattcctggagggcaatccattggcgtcaagctccactctgtaggagttctcgttgtaggttttcatcaaatcacaacagcagacggcaaaaaatcaccaggtgaagccgcaggcattcaatcaggggatatgatcattgaaatcaatggtcaaaaaatggagaaaatgaatgacctcaccccatttatccagaaagcagggaaaacgggtgaaacgcttcgtttgctcgtaaagagagatcataaaacctttcaaacaacattaacacccgcaaaagatgcgagtgaaggcatctatcgaattggtctttacattcgtgattctgcagcaggaatcggcacgatgacctttttttgaaccttcatctaaaaaatatggtgcccttgggcatgtgatttctgacatggatacaaaaaaaccaattgttgtcgacaatggtgaaattgtcagatcaaccgtgacatcgattgaaaaaggcacaggaggtaatcctggagaaaaattggcgagattctcttccgaaagaaaaacaataggagatatctcccgcaacagcccttttggtatctttggtacgttaaccgaaaagcttgaaaatcatatagcggataaaccacttccagtcgctttatcaaatgaagtaaaagaaggtccagcagaaattttaactgttgtggatcatgataaagtggagaagtttgatattaaaatcgtcagcacaacaccgcagaaattcccagcaactaaaggaatggtattaaaggtaacagatgagcgtcttttaagcaaaacgggcggaatcgtccaaggaatgagcggaagccccatcatccaaaatggcaaagtcattggagcagtcacacacgtattcgtcaatgatccgactagcgggtacggcgtacacattgaatggatgctgtcagaagcaggaatcgatctttatc

SEQ ID NO: 3857 - DNA, 1528 bp, Glycine max
  misc_feature (1)..(1): n is a, c, g, or t
  misc_feature (259)..(259): n is a, c, g, or t
  misc_feature (363)..(363): n is a, c, g, or t
  misc_feature (427)..(427): n is a, c, g, or t
  misc_feature (571)..(571): n is a, c, g, or t
  misc_feature (606)..(606): n is a, c, g, or t
  misc_feature (739)..(739): n is a, c, g, or t
  misc_feature (1185)..(1185): n is a, c, g, or t
  misc_feature (1205)..(1205): n is a, c, g, or t
  misc_feature (1379)..(1379): n is a, c, g, or t
  misc_feature (1434)..(1434): n is a, c, g, or t
  misc_feature (1495)..(1496): n is a, c, g, or t
  misc_feature (1518)..(1518): n is a, c, g, or t
  misc_feature (1526)..(1528): n is a, c, g, or t
  Peptide Sequence Number=SeqID_8054
  Probeset Number=SeqID_13636
ncgagaagacgagtcagtgcgagagcgacagacagtgacgcggagcacacacggtatggtctagcggcgcagccagactcgtcatgttacgccaccgcccagttgatcgtagcatgaaggtgttgtagaggacgagcgtagggctgaagtatactcatgaggacgtatatgagcaactccacatctacaacatccttaccgtcgctcctcagtacgagctcgacggatcgcagattgtagtgagtgtgcgcctattatntcagttggaacagaggtgcgggggccggtcgggaactagagaggttcgtgcgcggagatctctgtcgtcaccacggtgtgcagcgggtggcaggcgtcagctcntcgcgcgcactcatagtcatattgtcatgactggtcgagtagtcgagacaatgtcctacgatgntccgcggcgcgtctgtgtaacgaatagcaatcaggctctgctggactacacacaaggcatgcggcgtatgtatgctcgctgtgacgagcacgacccgaatgtcctctgcacactccgtggatagaataagagatagcaaggcanccaatgtagcgtacgcggaataagttgggcctgtngtatgatactcagcgctctatcacaaataagtaaatgatgagattccacgcgctagaaacctgatccgctctccggatgtcgtgtatggtcgcgaatagaacgccgtcacacagccgcatacgatcgcgcgtngcgctatagccagagctgcgacatagatgttgcgaacgatatcagacatccatatttataaatcataattaaactatctaatgaggttacagtcgtgattggctgcatgcgcatagctgagtcgtagacagtgctgatgctatttgcacatccaccacgaatctatatctatgacacacaccactaatgtaaccgccatgagatagatcaattactacaacatttacaaaatgtaatgacgctgcaaaataaactgaacaccgcacacgagaactcaccgcagcacgacacgaaaacattcacagcattcagcgcctagtagagtgtccacgcaccgtgccgcgccacgctaggtcaagcacatgcgttcttctaccgtactgttcgccacaccctcgagtactcagtgcgattatacactcactcccacctctccgtacattcancacgcgctgtagagatcacncatagtctcatctgaatcgggatgtgtaaaccaacggatactctgcaccggatacagggtcacatacaaatcgtagtcacgcgaagtgagtacgagcatgtacgcggtactcactacaggcaacacttaacacactcccatattcaatcgaggcgtcgatcaccaaagaggcgnaccctcacatctctgaagaacgactatatgtagagggcccagcgcggcgggtgtngtctcgcgccgttctcgctctctccctcccgtcgcgtaataagtagtgtgacagcatagcnnaaaccaccagtatacaaatttnaaaatttnnn

SEQ ID NO: 3858 - DNA, 1570 bp, Glycine max
  misc_feature (1)..(1): n is a, c, g, or t
  misc_feature (31)..(31): n is a, c, g, or t
  misc_feature (258)..(258): n is a, c, g, or t
  misc_feature (306)..(306): n is a, c, g, or t
  misc_feature (461)..(461): n is a, c, g, or t
  misc_feature (499)..(499): n is a, c, g, or t
  misc_feature (513)..(513): n is a, c, g, or t
  misc_feature (935)..(935): n is a, c, g, or t
  misc_feature (1085)..(1085): n is a, c, g, or t
  misc_feature (1328)..(1328): n is a, c, g, or t
  misc_feature (1336)..(1336): n is a, c, g, or t
  misc_feature (1407)..(1407): n is a, c, g, or t
  misc_feature (1442)..(1442): n is a, c, g, or t
  misc_feature (1544)..(1544): n is a, c, g, or t
  Probeset Number=SeqID_13637
ncgcacagtactacgtcgtgcacagcatcantgacatgacatatacggagtataaaggtgcacgactagagtgagtgaagaggtaagagtgatgcgtagattcgtatacacacatcacatcgtgacactatcgaatcagactagatgcgatcgagttgaattagatagtgagtattcgcgatgcacgacattatatgtcgataatagtgtgcgatgatatgctacatatactgttcttcaataagcgctattagtgcnctatcatcgacaaccgcgtagactgtgacgtgcgcatagcgtcggcgngagtgactcatatgataacacgtatcgctgcgcggcgcggttcgctctgtcggtgataatctgatcgcgtatctctaagatgcttatctgtctaacagtatatgtaggttcgatatatccatgcgaatttagattagacgtaatgcgtaatcganactgtgctacacttgagatagagagtaatacatacctngtgcggcgcagcgntcaagatagtgacgtacatatcgtcatgtgtatcgctacgatgcacgatgtcgctatccagtacacgcgcatcgtctctagcagatagtgtgatggacacggggtctcagcgcgcgaagatatgccgtgactcagttacgtagattatgatgtcgctacgtccatctgccggatccactaatcatcatatatattactacatcaccagcactatcgctgtcgcacggcgccatcatatcgacgcgcatcatcatagacaacagacagcgaacaagcaggtgagaggagaggcggggctctgtgccatagtaatgaatgcatctagtgtaggcatacgctagagaatctacgaacggagaatgcattcatcatcatattaggttcgcttaataagactatttcggtacggtgtgtaagtagtntatttagtgtctatatagtacgctatcgaagtgtctatagagtgatctactattaatatagaatattgtataagctacgtagtatgacttctctctggctaatatatatctgcgtcacttgtatatgtgcggacaccacgcatcgagtcngatcgtgcagtgcgtagtagagtgctctcgtcgtcttatctcattatgatatagtatatagtgagtagagcggattgagcagcaggcggaataaaagcaacagactatatatctacagacatatctacactacgtcttcacttcacacaacatagattacgcgtcgtcacgattcactatcgtggagccgaacgagtcacatcaggacaagcgcgtagttcatgcatgtggtgagatgtattnaacttgtnatctcgctatgtgagagtattgagttccagtagagacatgacagtgatataagcctctatgccgcgtacangggtctgattgcgtctatgctcgatagaacatatntgaaggctgcgagaggtggtgtgtgcgtggcgtgtgctgagatactgtgagtgtgtagagacgcgagctgagatcgatactagtactagcatgtctagacgnggatactgcgacgtcgcgcgtgcgcg

SEQ ID NO: 3859 - DNA, 2600 bp, Glycine max
  misc_feature (1)..(267): n is a, c, g, or t
  misc_feature (2600)..(2600): n is a, c, g, or t
  Peptide Sequence Number=SeqID_8055
  Probeset Number=SeqID_13638
nnnnnnnnnnnnnnnnnnnnnnnnnnnnnnnnnnnnnnnnnnnnnnnnnnnnnnnnnnnnnnnnnnnnnnnnnnnnnnnnnnnnnnnnnnnnnnnnnnnnnnnnnnnnnnnnnnnnnnnnnnnnnnnnnnnnnnnnnnnnnnnnnnnnnnnnnnnnnnnnnnnnnnnnnnnnnnnnnnnnnnnnnnnnnnnnnnnnnnnnnnnnnnnnnnnnnnnnnnnnnnnnnnnnnnnnnnnnnnnnnnnnnnnnnnnnnnnnnnnnnnnnnnncttttccgctcccgtaggaatcgaagatttataattccaatcatatatagtaatcgtaacatcgtagtataatctgattcatcaacagcgcttgtcggaaacagagtcggtttagtttgttagttagttgtttaatgaacgcaattcggtcccgttggttgacgagaatggcagaagacattgggaaaagcaacctcgaatcctcttctgcttcaacaacttcccgaggctaatcttttcctgaccgacctcccccgccccacagtcgtttcgttgccttctcaatcatcattttaatttaattgatttattccgcgtctataagctttcttgttttgctattgcttgctccgcaatcataatttcatcatcgaatcaaatcaattttgaaggttcattataatggcggaagagataaccaagaacgacgtcggagtaacctccaaaaccaccagaagcagctccaggttctggcctcgttggattcccacttccaccgatcacatcatcgctgccgagaagcgccttctttccgtcgtcaagactggttatgttcaagagcatgttaacattggctctggtcctcctggctccaaagtgaggtggttccgttcatccagcaacgagccgcggtttattaacaccgttacatttgacagtaaaccccattctccaacgcttgtcatgattcatggttatgctgcttcacaggggttcttttttcgcaattttgacgcgcttgcgtctcgatttagagtcattgctgttgatcaacttggatggggtggatcgagcagacctgatttcacatgcaaaagcactgaagaaactgaggcatggtttattgattcttttgaggaatggagaaaagccaaaaacttgagcaattttatactgctcggacattcttttggtggttatgttgctgccaaatatgcgctcaagcacccatgagcatgtacaacacttgattctggttggatctgctggattttcatctgaatcagatgcaaagtctgagtggataacaaggtttcgagcaacatggaagggggcagttttgaaccatctttgggaatcaaatttcacacctcagaaactcgtcaggggtttaggtccttggggtcccaacatagtccgcaagtatacaagtgctaggtttggtacacattcaactggggaaatactgactgaagaggaatcaacattgctgacagactatgtttaccacacattggcggccaaagctagtggagagctgtgcttaaaatatattttttcatttggagcatttgctaggatgccccttcttctcagtgcctcagagtggaaggtgcccaccactttcatgtatggtttccaagactggatgaattatcaaggtgcccaagaagctcgcaagcatatgaaggttccatgcgaaatcatcaggattcctcagggtgggcactttgcgttcattgacaacccaactgccttccattcagctgttttttatgcttgtcgaaggtttcttacacctgatccagacaatgaatctcttcctaaagggctaacctctgcataggttaggtcttaattttgtgctattcctgtctatatgtattttaatatttttttttactaattaaatttcataattgaatgaaatcatatgtatattgtttcagtaaagtggaatttactgaaaatatttgtaatagcaacttcaacaaaaatcgatttgtaggagaaatttcttccctggaaattgttctattttaaatcttgttgctcataagatattatgacttcattcaactaataattcatgtcgtttaggttacgttttataaccaaagagttgcttataatttctacgtgttcactcacctcttagctccctaactttcttctgaaatttactattccatgtttaaccccaacaacgtcaacatgataggaaggaaaagaagaagaggaaaccagggcccacaatgctcgtcgcggcggttttcgcggtgttgctatcacgtggaaggagaagaccgacatggacctgtggaggtttatacctttgaagattgaaaacctttaacccatttttattaaaggggtttctatagggcaagacattaaatgaccttatcaatttcttctatttgtacagcttagcattgttctagtgatgacaagcatacatatccattttctatgtcctactagaaacatttaacatcaattactaactttttttcttcattctccaaagcggggaaagaattatgccagcttttgtaagatacttgattactcaattattttctcctcctactgtctcattctcgtcttgn

SEQ ID NO: 3860 - DNA, 396 bp, Glycine max
  Peptide Sequence Number=SeqID_8056
  Probeset Number=SeqID_13639
ttttgtagatctattatgatggcgcttaaaattttacatgcctggattctgattgaacttgttcttgtaggtctttccactatggccagtttagttagagttgcacatgtcataacactatataccaataactcccagctagtgagaaatttttttgtcactccattaacacatactggttagtgttagtcatactatttatgtacatggaatttgttgtcaattttgttagaatgcaaccttttggtaattctggacttttcttttgtggtaatgtaatgatgttacatgtttgctgattgttgtatatggaaaagacgaatcctattgttttctttttgatgtacacacatgctgatggttgacactcatgaacagcaagcaaccattctagtt

SEQ ID NO: 3861 - DNA, 581 bp, Glycine max
  Probeset Number=SeqID_13640
gctatcgctttgcatagccatgagagcacccactccctcagcttctctcattctcactaccccaaaaccatcttcactctctttgaaccttacccgcacttgctccagcgctcgctctccgctcctccattgctccttcctctcttctccttcccatctctcttccccttcctccgtttcaggtatttctcgcctttatttcccatctagatatttgttttttttccacttccattcggttccttcactaattatcatttgggtcgttttgaatttcgattttctgggtgaatttccattgtaccttgtttcccatggatttgtgtactttttttttgttgcgaagtgttgataggggttgatgttgctaatgggttttgaaacaaaaatgtttttgttgttgggattaatttaacttgaacatggctacgttttggaacagaaagctgttcatggggctttctaaaaaacacttttctttttttttttgtccattctggaccgaaaaggaagttgatgccccataccggataacccatggagcaacactcattcacatttatttttaacccctggtgcct

SEQ ID NO: 3862 - DNA, 240 bp, Glycine max
  Peptide Sequence Number=SeqID_8057
  Probeset Number=SeqID_13641
agctaggcaatcaacatacaaaagcttcattaattaccacgaagcgacgacagaagctttcaatcgatcgcgcaacttcatgattctacacaaccaattaaagtgaacaacagcgatatatatgtaatatattcaccaacaagagctagctagtgaggactaaactcttggtcgcattcttcagcctcttcggcaatggtttctaacacaggaacctgtgaaaccttcctgacgcgaaca

SEQ ID NO: 3863 - DNA, 684 bp, Glycine max
  misc_feature (20)..(20): n is a, c, g, or t
  misc_feature (162)..(162): n is a, c, g, or t
  Probeset Number=SeqID_13642
gcgaggagacatgagatccntctttgagaaagagaaccaataatatatctaggcttgcttgatttagatgagatatctccaatagaagagcatgcggatgtcgtcggatcatatgatattgtgtggataacgtgcaatgattctgctaaaacttcatagcanttatataattatgccactcttaagaagagagaatgcctgctataatagggcaaaagccaagggctcgacaaagatcttcttgatatatcttgagagaacccgaatttgcaaaggttccaagggagtttcttcttccagccggtgattttcccaatgttgaacccttcagacaggttctgagtggctatagcattgtcaaatttgagaaactaaagcccaaaatgtttctaggccgtcgttgtacatgcttgggtttgaaataccagagcttttgaagatattcagaaatccttacgattcaattaataaaagaatgttgccccatgttattatgtgatgaatgttttttggctgagattttgatgtttagattgttttaaaatgttggatttcctcatgtttggttgtctatagtctataccccatgggtcacgagcccatccaatatattaaccatgtataaaaaaattcaaaaataaaaagaaaaaaaacaacacttttaaaaataaaaaaacattaatt

SEQ ID NO: 3864 - DNA, 1614 bp, Glycine max
  misc_feature (10)..(15): n is a, c, g, or t
  misc_feature (24)..(24): n is a, c, g, or t
  misc_feature (26)..(26): n is a, c, g, or t
  misc_feature (32)..(33): n is a, c, g, or t
  misc_feature (35)..(35): n is a, c, g, or t
  misc_feature (38)..(39): n is a, c, g, or t
  misc_feature (49)..(50): n is a, c, g, or t
  misc_feature (57)..(57): n is a, c, g, or t
  misc_feature (70)..(70): n is a, c, g, or t
  misc_feature (78)..(79): n is a, c, g, or t
  misc_feature (96)..(96): n is a, c, g, or t
  misc_feature (106)..(106): n is a, c, g, or t
  misc_feature (108)..(108): n is a, c, g, or t
  misc_feature (110)..(110): n is a, c, g, or t
  misc_feature (112)..(113): n is a, c, g, or t
  misc_feature (116)..(116): n is a, c, g, or t
  misc_feature (173)..(174): n is a, c, g, or t
  misc_feature (194)..(194): n is a, c, g, or t
  misc_feature (243)..(243): n is a, c, g, or t
  misc_feature (251)..(251): n is a, c, g, or t
  misc_feature (473)..(473): n is a, c, g, or t
  misc_feature (748)..(748): n is a, c, g, or t
  misc_feature (842)..(842): n is a, c, g, or t
  misc_feature (980)..(980): n is a, c, g, or t
  misc_feature (1115)..(1115): n is a, c, g, or t
  misc_feature (1275)..(1275): n is a, c, g, or t
  misc_feature (1300)..(1300): n is a, c, g, or t
  misc_feature (1307)..(1307): n is a, c, g, or t
  misc_feature (1309)..(1309): n is a, c, g, or t
  misc_feature (1397)..(1397): n is a, c, g, or t
  misc_feature (1475)..(1475): n is a, c, g, or t
  misc_feature (1482)..(1482): n is a, c, g, or t
  misc_feature (1570)..(1570): n is a, c, g, or t
  misc_feature (1591)..(1591): n is a, c, g, or t
  misc_feature (1593)..(1593): n is a, c, g, or t
  misc_feature (1606)..(1606): n is a, c, g, or t
  Peptide Sequence Number=SeqID_8058
  Probeset Number=SeqID_13643
tgtggttttnnnnnntttgaattntntttttnntntannttggaatatnngtgagtnaagatgtgattgnttgataannggtagattgggtattgntagaaggtgntnantnnggngagagaggaaagaagagaaaggaaggagtgctgggtgaggacgtggtggtggtattnnttaatatcaaaattggtgtntgagaattgaatgaagactcggtgataggtgatataaatatattgtagntcctgcgntctatgagtgtgcacgtctctgcgtcgctgatctgctccgctgattccaccgcctttctgcgcctatcgcgctactgctccccggtattgtatgctgcattgtaattacggtgcagggctcgcgccaatgcgcggtacatggtccgggcgacctgtccgcggagggcaccaggtcgaatacggtgcggcggcccgcgcacgcagcccgcacgcacatccgcnctctcatatctctccctctcccctcctcttctgttatgtgttgttgacgaggggacaggaggatgcgtcagttatagagtatcgtctggttttcgctgggcacagcctgttcactacctgcggcactacaccatctcctgtgccgctcgatcacaaacctcattgtcttatatgttgctaccttctcgaccacgcccgcaccaccatccggttggatgattaataacatggttactaactgtgaacatcggggggcagcgcgtgttacatatatngcagacgataacgccgaagcgcggcgcgcatcgcgcagcctcgcggtcaatatcatcgctgtcgtcaccgaccgcgaaaccggcggaccagcgncgcaacatgtgcgcgatataatcatagaatgggtggagagagcggcaaacgtaccacgcggtgtacaactaacgtggggagcactgctgcacggtcgttgtgatatacattagacaaaccacacatacaggcggtgcntggactgcgcgacacgaacagacatgaagagagtgtcggagagtctgtatacgctatgatgagtgatgatagttgtagtatatagatatagtgctgtggacgctaagtgcgtgctgtatcgcctgtgcctgtganttgtgcgctggtgcagtatatgtgtgttcttgtcgcaggagcacgcgctgcgactgtgccccgtgcgccggtgggcgtgctgtgcacgtgtgatgtgccgacacttaatctagtcgtctgcgacgcgttggcgtctctatagacatgatgtgtgcactangagatgcattggatatcgagtgtgncgtgtgngncgactgtctgcagagcctctaatagttcaaccacgacgcgtgtcttgaaacaacacacatctctcagacgagttcactaatagacgcngacagacacacgctgcaacacgcaccgcgagtcgcgtgaacgacagagagacacgtatgtgcgcaggccgtgcgcgancatcaancgtccgctcgcaagcacacctcatgtactagacataacagcatgagaacccatcgtgtgtgtatgtatgtatagactgagcgaatatnaaataacgcgggcgtgacacnanatagcgatatacngcacccag

SEQ ID NO: 3865 - DNA, 1336 bp, Glycine max
  misc_feature (22)..(22): n is a, c, g, or t
  misc_feature (106)..(106): n is a, c, g, or t
  misc_feature (108)..(108): n is a, c, g, or t
  misc_feature (111)..(113): n is a, c, g, or t
  misc_feature (195)..(196): n is a, c, g, or t
  misc_feature (264)..(264): n is a, c, g, or t
  misc_feature (648)..(648): n is a, c, g, or t
  misc_feature (741)..(741): n is a, c, g, or t
  misc_feature (870)..(870): n is a, c, g, or t
  misc_feature (1032)..(1032): n is a, c, g, or t
  misc_feature (1057)..(1057): n is a, c, g, or t
  Peptide Sequence Number=SeqID_8059
  Probeset Number=SeqID_13644
tatttattttatatatttaacntggggccggcaagagtaattattaaaggagtgcgagatgaaagtagcgcgctcgaagtggggagtgggtaggggccgacggggntnaannnggagggagagagaacgcgcggcaacatacctacagtgagggagcggcgaggccgcactgcattatagaataaatgagaatcnncccccgcggctgtgtgagtgagaaggtctcgcatacagtactcttttctacccttaattgacatgatnctggataatagagagaaagagcgcccgacctcgcgctcgcggtcgagagaccatgcgccgggtcatgcggaggtgatgctagccatacataatccaccttttaaggcgtatcgagaccatgaatagtatgcagagaggtagctctctacgatggatacagtatagtaaattgaccacacatgctcatctataactctgttgtatgtagtgagagtggaaatgagagatgtgaccctcacgccctgattgacccttatatcaccctcttcacaatagcatcgacaagataatatgccggccgctgcagatggggatgaactctggagctgcttgcctcttagttccgaccttagatcgctctcgcctccgtcctgacatgcgctncgcgactagtctatacgcttctcaatccgagacacagactagcctgtagtattaccgacgtaccccatatgcaaacttaagcgaccgatgagntgactaatgttacagatcaacaactcgtcctacgactcatgataggctctccacatgccgtgtatgctacttcgcacgtcgactaagtacaagcaacaaatgctatgtggttagagattaagttgatcngcgctaccgccgcccgaccagaggagtgcacacaactcacactcttctggcgtgcgattccgccactctctcgtatttatggcgccgcttgcggttctacctatgtatacgccgcgccggtcagaatcgatatcggacacaagacgctgaagaccagcccancgtcacaccacgtaagcgaccgcgngtcaagcgagctatcatctgctcagaatgcactgacatctatctatcacctatgcctgctcgtgcgcagcgctatagatcagctagcatcgtaaccttagagcatgtgcgcacccgcggccgaatcctatctcctctcgatgtaatatgagagcatatacttgtcactgttgtgtatgagctcgtgttgaacgagtatgtacgctcgtgcgtaacgcgcgacctctcaaccaccactctccgtgtctctatctcagatccactctattcctaccttctg

SEQ ID NO: 3866 - DNA, 715 bp, Glycine max
  Probeset Number=SeqID_13645
acatcagttttcaattaaagatactgttacactcataaaaaaagatggcaaacttgagtacactcgttggttgcattgccatcatcttcttcactgtcgttgcacctgcctcctcagccactcattctgtcgaatggtcgcttgggaaggactatagctccttggctactggaaaaccttatgccattggcgatacaatcgtgttcaactacggtgcgggtcacacggtggacgaagtgagtgaaagtgactacaaaagttgcacattggggaactcaatttcttcggacagtagcggaacaacaagcatagctctaaagacagctggttctcactacttcatttgcgctatccccggccactgtgccggcggcatgaagctctctgtctacgtaggtgcagaagcctcttcagacggtggcggtgacagtggtgacggtaccacccccaaaactacaccttctccaactgtagagggcaggaaggctgctccttccgcttctgccactgctatgttgaagccgttcaaagctttggttttgacttgtgtagctgcattattatatgctttggctctttcttagttgtttttaatttctcgttgatttggtttggctcgtttgaaaatccagctagaggcagtgctatgagccctattattattatatgcttcttgttgtgattaattattctatgatattttcctttgtttagt

SEQ ID NO: 3867 - DNA, 201 bp, Glycine max
  Peptide Sequence Number=SeqID_8060
  Probeset Number=SeqID_13646
cgggtgcagtttcactagctgtatttgccctgttcgccatagtggcagcagataccaggatattgcccttccatggtgtgcatgctccacattggcctccatgggcaaacctctctatgcctgttccatcgtcaaagagcccttgccctaagggttccctacgtgagaaggctcgtcacttttccatgtcggcctctgcag

SEQ ID NO: 3868 - DNA, 1424 bp, Glycine max
  misc_feature (9)..(9): n is a, c, g, or t
  misc_feature (24)..(24): n is a, c, g, or t
  misc_feature (38)..(38): n is a, c, g, or t
  misc_feature (80)..(80): n is a, c, g, or t
  misc_feature (82)..(82): n is a, c, g, or t
  misc_feature (89)..(89): n is a, c, g, or t
  misc_feature (102)..(102): n is a, c, g, or t
  misc_feature (105)..(105): n is a, c, g, or t
  misc_feature (136)..(136): n is a, c, g, or t
  misc_feature (140)..(140): n is a, c, g, or t
  misc_feature (159)..(159): n is a, c, g, or t
  misc_feature (242)..(242): n is a, c, g, or t
  misc_feature (245)..(245): n is a, c, g, or t
  misc_feature (270)..(270): n is a, c, g, or t
  misc_feature (307)..(308): n is a, c, g, or t
  misc_feature (331)..(331): n is a, c, g, or t
  misc_feature (426)..(426): n is a, c, g, or t
  misc_feature (504)..(504): n is a, c, g, or t
  misc_feature (506)..(506): n is a, c, g, or t
  misc_feature (541)..(541): n is a, c, g, or t
  misc_feature (1323)..(1323): n is a, c, g, or t
  misc_feature (1325)..(1325): n is a, c, g, or t
  misc_feature (1389)..(1389): n is a, c, g, or t
  Probeset Number=SeqID_13647
ttgtgaaancagcacaccactggncgcgcgggcggccnccgccggcacgcgagccgcacgctgctgcgccttcaacatananacctctnctcactcctcacnatnctcttattattaccaacttcgttgtgtctangacnagagaagctctgctctaanctccgtatctccaccagtccacttaacactcctcctatctattcatgtctctaagatactatcagccgggagaatacgtcgtnatnctattctctcatttctactatcttnatatcttaatattaataaaataatgataacataattnntctatatcttcatataataaganatataagaacagaacaaacagacgagagaaccatattatactgtctcatctcactgcgctctgctctctgcgtgaacatgttatgcttgctcttnattttgtatatgtacgcttatatgtactgttttctgttctttttcctgctttattctttcttctggtcatcacacggnangctcgtcaccgaacaagccaagacctacaaatacnacccatacatctctcctctcccacttatcttgtttatatcttgtatgattattatccaaagctctacgctctaccatacttctttctatatcactatcctcctttattcgtgtcattgtgtctggttgtagagtacaaggacgtgctgtgcgttgccttctttccgtatcggtctgtattaggtgtaaaattgtgttgtatccgttttctcttagtatgtgattgtctttagcataatgcctgtgtggcgcgcgccgacacactagctagatacaaagggtacaccattcacctactcaccaccgactcgatatacgtgcacacccattgcggtgccctccgcgcttagtaaaaatactattcacatatctaacagacacactatatacgctcaatatagctgccttgtaccatccgctaactgtctactacgtgtatgccttctacatcgggtatgagatcacacctgcagagcacttctctctctattctgtggtgttataataacatacatcctgcgcgtgtataatatatgtatattattatatctactatatatatatgtgtgtattgttgtatatagtagtgacagtcgcacacgaccacaccattacttctctcctcatatcctatccacgtgagtcagacgcgactgtgctaggcattatgatgtgtgatatcacgttattagataataaccttatatagagagagaaacaagaggagagtatgtgtgggtgttattatccctatttagtgtttgtgtgattcctctgttctcncnaaatctactccgtcccggcaactacgacgctgcatttgcgcttacttatgtctctataagtagntctctcgcatcttctgttctatctctattgtgttg

SEQ ID NO: 3869 - DNA, 494 bp, Glycine max
  Peptide Sequence Number=SeqID_8061
  Probeset Number=SeqID_13648
tcgagtcagctacgtaggccccccccccccccgatacacagacatggctgtaggcaaaaataagggtctttcgaagggaggaaagaagggagttaagaagaagattgtcgaccccttcaccaggaaggattggtacgatgtcaaggcaccgtccatgttcacaacccgccagattggcaagaccctcgtcaacaggacccaggtaccaagattgcttctgagggtctgaagcaccgtgtgtttgaggtctctctagctgatcttcagaatgacaatgatgctgagaggtccttccgcaagttccgcctgattgctgaggatgtccagggtcgtaatgtccttaccaacttccacggcatggacctgacaactgacaagctcagaagtatggtcaagaaatggcagattcttattgaagctaatgttgacgtcaagacaactgacggttacctccttcgagtattctgcattggtttcaccaacaaagaccatca

SEQ ID NO: 3870 - DNA, 1703 bp, Glycine max
  misc_feature (1)..(1): n is a, c, g, or t
  misc_feature (40)..(40): n is a, c, g, or t
  misc_feature (51)..(51): n is a, c, g, or t
  misc_feature (57)..(57): n is a, c, g, or t
  misc_feature (87)..(87): n is a, c, g, or t
  misc_feature (106)..(106): n is a, c, g, or t
  misc_feature (256)..(256): n is a, c, g, or t
  misc_feature (719)..(719): n is a, c, g, or t
  misc_feature (952)..(952): n is a, c, g, or t
  misc_feature (1550)..(1550): n is a, c, g, or t
  misc_feature (1670)..(1670): n is a, c, g, or t
  Peptide Sequence Number=SeqID_8062
  Probeset Number=SeqID_13649
ncgcacgcctctctcaatgtcatcttgattagttatattntttcctattantatatntaggtcgtctcgtcgatcttatattgatancgtcactcagtgtgcacangggacggggactcctatactaatatactactataaccgcagcggtgacacgcaatagatatcttctccaaacacactcgtagttagtaacgaggtcgctgtggatactatcgtgctgcaatattataagtgtatgcccgtgagtagatantgtaatgactgtacgcgagtctcgcgtgggtcatgtatcaacaatatacatacgcggctgttatattcgttcgcgccgcgcagcgcgcgcattaattaattagttattcatgaatatatacgcgttgaccctccatcccaccgttgtctgagtagtcctctgtgcacgctctcacgatacgcagctatactcgtatgctgccagaattacataatcgataatgtgatgcgcgcgcgccgcacaatattacggtcagcggcgtccgcgtcccacgcaccgctcatatcatagatataactcttgtagttccgtccgtcctccgcggtcgtttcgtcgctgccggttatatgatacttaacgatataatatatacttccacgacgcgcgcgacgcgttcgttttatactctcgtccgctgtctatctgcccgcggcgcgttatatattaaatatacaacatactngacggctctatccatgatctgcacatgcggcgctgcgagaaacccatgcgcgctgtatatattactgtatatggcgtatatatattagcggcgcggcaagttacacgcgacgccgggtatacacgcggcctcgcgcgcttccagcattacgtaatattatacgcttcatataaacatccgcgcctcgccgcattcagtattactttcgctctctgacaaccctcccctctacntacacatacttaactcctatttcggtgcgcgcgtgttgatatagacttacacacattcctcaacgcgcatatactatgcgcgtctccacgatatcagccgcgctagtcggaccggaaaattacacaggcggcgccaacgtacctgtaatctcgagcccacttgtcgactcctctatggctattcctctccgaatatctatacaattaaacacgcgcgcttctcactaatatctcgttcatatgcgtcatcacacgtgagcacgcgcctcatattcatttgtgttcatctattacacgatagtatggttctgtctctggttaacataatatataaaatataaccacgctggcgtggttacatatcgcgcggacagacacaaagagtatactcctcctccctcacacgtcgtcgttcccaaacactcgtatattttatatattccattttgaatataactatattttgtcggcgtgcgcgtagtacaatggaacgaaatagacgttactgcgcagcgtatcgtgtgtcgaacataaatgaataaacaacaagctgcgctacaaagagagaaagagaacacgcgtgggtggcgggcgtccncctctttctgtttaggaaactatctactttcttttgctgtactctctcctctattcgtgtcggtttaatagttgtgtgattcttccctcgttctttgttatccctcctcttctctctctnttatactatcctaccgcggcgcgtcagctcgct

SEQ ID NO: 3871 - DNA, 775 bp, Glycine max
  misc_feature (42)..(42): n is a, c, g, or t
  Probeset Number=SeqID_13650
aggttgttgagatgttggccagagatgcaatcataacattgnagaagagtaaatcagctgaaggcaacaaaaatgacaaggactcttcctcaatggtgacactcacactagaagaatatcatgagcttagcaggagagcctataaggcagaggagcaagcgaacatgaggatcgaagctgctaattctcagattcagatagcaagggagtctgaactaagaagcttggagaagttaaaagaactgaatgaggagttgtctgtaagaagagaatctctcagcattgcaaccgagaatttcaaaaaggccaatgaaggaaagttagctgtagaacatgaattaagaacttggagggctgaacaagagaaacaaaagaagcctggtgaattgaatgatgaacaaacttctactccaactaagcctgcacatgattcatcaagccctaagggaaaagttccttcaaataacattgaagttggatcagcctcagataagaacaaaaagaagaagaagaagaagtcattatttccttccaaagttgtaatgttctttgccaagaaaaaaacgcatccaaccaagtgaatgtaatccttcaacagaaggtagtacactaagtaacaaatctaatttctgaacaacttgtgtattggttgccaattgtgataatttgtattaagttctttggttgcaaggagaaaataagatcatttaatgtataaaaaaaaaaaaaaaaaactcgagactagttctctctctctctctctctctctctctct

SEQ ID NO: 3872 - DNA, 720 bp, Glycine max
  Peptide Sequence Number=SeqID_8063
  Probeset Number=SeqID_13651
agaatgcagtaaatagtagtagtgtgagtaaacaataataatattgaatctgttagattgcaggactaggttatattaattcctctatagcctattcagtaattttacatttgtatgaatctttttgatctaccaatttgactatttcattcgtaaaattaaatttataaaaaaatgcctaaagtaagaaggagtaaaaaatctccaccagaaggttgggaacttattgaacctacccttgaagaattggaacagaaaatgagagaagctgagacagagccacatgagggaaaaaggaaggttgagtctctttggccaatatttaaaattcatcatcagaaatcaagatatatttatgatctgttctatagaagaaaagccatcagtagagaactttatgagtattgtttgaatgaaaatattgctgacaaaaacctaattgccaaatggaagaaacmagggtatgaaaacctytgttgtytccgatgtattcaagcaagggatacgaattttgggactagctgcatttgtcgagtccctaaagcaaaacttkaagagggtcggatagttgagtgcattcmctgtggatgccgaggctgctctggttgatattctcmcaaaattattactaattgaatattgtgtatatgcataggacttatttataactaaataaacattttttgtttcatctgtaattttatgataataaaaactaat

SEQ ID NO: 3873 - DNA, 1370 bp, Glycine max
  misc_feature (19)..(20): n is a, c, g, or t
  misc_feature (26)..(27): n is a, c, g, or t
  misc_feature (33)..(36): n is a, c, g, or t
  misc_feature (57)..(57): n is a, c, g, or t
  misc_feature (74)..(75): n is a, c, g, or t
  misc_feature (121)..(121): n is a, c, g, or t
  misc_feature (348)..(348): n is a, c, g, or t
  misc_feature (390)..(390): n is a, c, g, or t
  misc_feature (511)..(511): n is a, c, g, or t
  misc_feature (557)..(557): n is a, c, g, or t
  misc_feature (610)..(610): n is a, c, g, or t
  misc_feature (640)..(640): n is a, c, g, or t
  misc_feature (699)..(699): n is a, c, g, or t
  misc_feature (701)..(701): n is a, c, g, or t
  misc_feature (777)..(777): n is a, c, g, or t
  misc_feature (827)..(827): n is a, c, g, or t
  misc_feature (958)..(958): n is a, c, g, or t
  misc_feature (977)..(977): n is a, c, g, or t
  misc_feature (1077)..(1077): n is a, c, g, or t
  misc_feature (1207)..(1207): n is a, c, g, or t
  misc_feature (1217)..(1217): n is a, c, g, or t
  misc_feature (1223)..(1223): n is a, c, g, or t
  misc_feature (1370)..(1370): n is a, c, g, or t
  Peptide Sequence Number=SeqID_8064
  Probeset Number=SeqID_13652
agggttgccccccccccgnntgtctnncgtggnnnnacgccggtgcgaatcacaaanaataataatattatgannaagaggagcaaacggaaaatggagataagagggaggcaccgccccnatcgccagtcctgtgatggagcgtgatgtgccccacacaccccccccaaaatccgagaggatgcgctgtcacaatggtgtaggagacatatttcaacgtggatggtgggtcttcatccttctgagagagatctgtctgaagcatctacatgttagagttgggtatattgcgcctagatgcgatagctagcctggcctgtgctatggaactgactatctactgctgcntgagtatcacgcgacgagtaaactagccttaacatccatctnataagatgtctaaattgtgtatagacactactatgcgatacggcgatgtagtctgcatgtagtagacaggtcgtgccatgtgcctgtttagtgatgtgactcataggtaatttctgtgatntgttgaagagagtgtgcgtgagcctgccgtatcagcagattgagcngtgagtacatgtgtcacatcatctggcgtaagacgctgatgcagacaagtgcngatcgggatgatttgtgagaatatatttgntgatcatcgatatatatatatcgtgatagccatgaccgcgtaaatacggtgcacatgtnantgtaatcgcgcgatgcgcacaccattggtgcgctgtgtaccaatcgatagaatagctggctcgcctgtatacgggnagatgaattgtaatgtaaagtttcggctgtagaaacccacacaagagaanattgagctctaagcccgataagttatggtggagtgcacccacatgcccacccaactcctctctcgtgttgtgtcatttgctggataaagatgatagatgaagaccgtggcgtcgacatccagtcatattgncaacacctgaagtgtatgnctctagatggtctaatagtgtggtggctgtaacgggtgactgtatagacctgcactagcctgccccatactcgactgaataagatgctttacactgacgnccctctcctggctggggtgccccgcctgtcgttgtgcccgtatacgatggtgtaaacataaggagccgtgtatcacctgtacacatgactaatgtgttacaccgccgcctctatataaagtgggcaagangagaagaganatgtgnggatgtaagtgtatgagtgcatatacagagtcatctaacgtcgctcgctgaccactcggctggtgccggtgtgctatattcactcatactctccgccgcactctcgtgtatagatatagagatggctgatagctgtgtgctgcggcn

SEQ ID NO: 3874 - DNA, 1908 bp, Glycine max
  misc_feature (16)..(16): n is a, c, g, or t
  misc_feature (37)..(37): n is a, c, g, or t
  misc_feature (51)..(51): n is a, c, g, or t
  misc_feature (53)..(53): n is a, c, g, or t
  misc_feature (55)..(55): n is a, c, g, or t
  misc_feature (59)..(59): n is a, c, g, or t
  misc_feature (66)..(66): n is a, c, g, or t
  misc_feature (71)..(71): n is a, c, g, or t
  misc_feature (78)..(78): n is a, c, g, or t
  misc_feature (83)..(84): n is a, c, g, or t
  misc_feature (90)..(90): n is a, c, g, or t
  misc_feature (92)..(93): n is a, c, g, or t
  misc_feature (97)..(97): n is a, c, g, or t
  misc_feature (167)..(168): n is a, c, g, or t
  misc_feature (171)..(171): n is a, c, g, or t
  misc_feature (175)..(177): n is a, c, g, or t
  misc_feature (180)..(180): n is a, c, g, or t
  misc_feature (192)..(194): n is a, c, g, or t
  misc_feature (199)..(200): n is a, c, g, or t
  misc_feature (205)..(205): n is a, c, g, or t
  misc_feature (207)..(207): n is a, c, g, or t
  misc_feature (212)..(213): n is a, c, g, or t
  misc_feature (238)..(239): n is a, c, g, or t
  misc_feature (246)..(246): n is a, c, g, or t
  misc_feature (251)..(255): n is a, c, g, or t
  misc_feature (257)..(260): n is a, c, g, or t
  misc_feature (272)..(272): n is a, c, g, or t
  misc_feature (289)..(289): n is a, c, g, or t
  misc_feature (604)..(604): n is a, c, g, or t
  misc_feature (655)..(655): n is a, c, g, or t
  misc_feature (707)..(707): n is a, c, g, or t
  misc_feature (735)..(735): n is a, c, g, or t
  misc_feature (741)..(741): n is a, c, g, or t
  misc_feature (857)..(857): n is a, c, g, or t
  misc_feature (900)..(900): n is a, c, g, or t
  misc_feature (936)..(936): n is a, c, g, or t
  misc_feature (984)..(984): n is a, c, g, or t
  misc_feature (1031)..(1031): n is a, c, g, or t
  misc_feature (1036)..(1036): n is a, c, g, or t
  misc_feature (1097)..(1097): n is a, c, g, or t
  misc_feature (1139)..(1139): n is a, c, g, or t
  misc_feature (1177)..(1177): n is a, c, g, or t
  misc_feature (1179)..(1179): n is a, c, g, or t
  misc_feature (1191)..(1191): n is a, c, g, or t
  misc_feature (1193)..(1193): n is a, c, g, or t
  misc_feature (1206)..(1206): n is a, c, g, or t
  misc_feature (1289)..(1289): n is a, c, g, or t
  misc_feature (1366)..(1366): n is a, c, g, or t
  misc_feature (1413)..(1413): n is a, c, g, or t
  misc_feature (1421)..(1421): n is a, c, g, or t
  misc_feature (1426)..(1426): n is a, c, g, or t
  misc_feature (1474)..(1474): n is a, c, g, or t
  misc_feature (1497)..(1500): n is a, c, g, or t
  misc_feature (1545)..(1545): n is a, c, g, or t
  misc_feature (1547)..(1547): n is a, c, g, or t
  misc_feature (1686)..(1686): n is a, c, g, or t
  misc_feature (1779)..(1779): n is a, c, g, or t
  Probeset Number=SeqID_13653
aggtctctatattatnacataaaccagcacacacccnaaacgcgagcaccntngngggngtgtggnggggngggggangtggnnggcggngnngcgngaccgcccagcagcaccgggagcgcgacgacaccgcacgtacatactacatctcaatcgacgaacctacnnttnttcnnnatntatctgatactnnnttctnnatgcncncttannccgccccccaccgccctctcttatnntatcttntttannnnnannnntacgatggagtngtacacgcgcgcggcangacaaacgaactacatatatcgtgagtatgctcagcttcttatattgcgcgcggatcttgggagatacaattagcgtgtgacatgcgggcgtcgtgtgcgctgtatcgcggcgctgcgtgtaacattcagacgggactgctgggggttggtatgagcgtacgatgatgcgtgcgactcacagtccgcgtcgtgataagtgcgcgcgctcacggatacgcgtagcgtacatgtagagacgtgcgaggggagcctgagatcgtctaggagcggagtgatgagcgaagatagaggatgatgggcttataatgctatgncgcgcatttattgtagtctccggctctcgtctgtgatccgcgtctctaccncatactctcgtctcacactccacgtcatctcggcacctcatgtctcctgctnacctacccaggacgtcggcgctacaganatcaangttacgatgattcgaccgtgcatgacagatatgttcgatcgctctgcgctcagcgcgcactcttcgtctatcatgctcgccgacgccactcgtcacgcgttgctgtcgcatctcanttgtgtgatcgatagagaaactcggtcgtatgcgcgataggtntgtatggtagtcgcttcaatcgagtatgtaatcaantatgtatgctatatgacgcgcgtgtacagtatatgagatgatgtgagnagtgtgtcactggtgtgcgagagtcgacgtcgcgcgcgagcggtgangcgcntgtcgcgtatgctcgtactgtgatcttgtgtagtaggctgacgatagatcgcactatctanatgtagtatattatcgtagagagcgcgtcattcagcgagctngctaactgcgtcatgtctgtcgagtggtccgtgcactngncacgcggctcanangcgttcagcgctngtggactccgctgcggccgcgagatctcgacgtatcgtgcacgtctcatagggcgcgcgagcaatgattgtacgtcagccganctatcgtagcagcaatctgcgctctgtgatctacacagctctaccacacgttcactcatgacatgggatcgtgatgntgagtgctcgtgagtatgtgtccgtgcacgcgtggctctcatgccgncgcgagcngtgantgtatggcgcgtgcgagaagcaggcgcatacgcatctcatacgacatnacgatatcgatcatactcaactnnnntctcaaccataccacgcatgtgcgtcatcgtcgaattcatcatgntnctactactagtacctacgtacagcatctgacactccctctcaacggatcgtctgctcgatacgcgactgctgtagtacgattcaaccaccactatctatgtatgtacgtagtgacataatactaatagttagtgtgtgngcatagctccgttactcgcgcgatatcatctgctccgtactatatcagacggaacactacacactcacactcatactatacgctaatgccatntgcgtcactacacgtcacgatcgacactaccctcgcgcgagacggcgcctcggagacacgaaacatcaatccgcgcgacaccctcgcccatagcaccacgtcgtcacgccgcgcgaacgtctgacagcg

SEQ ID NO: 3875 - DNA, 1133 bp, Glycine max
  misc_feature (1)..(1): n is a, c, g, or t
  misc_feature (639)..(640): n is a, c, g, or t
  misc_feature (651)..(651): n is a, c, g, or t
  misc_feature (653)..(654): n is a, c, g, or t
  misc_feature (670)..(670): n is a, c, g, or t
  misc_feature (673)..(674): n is a, c, g, or t
  misc_feature (684)..(685): n is a, c, g, or t
  misc_feature (688)..(690): n is a, c, g, or t
  misc_feature (692)..(694): n is a, c, g, or t
  misc_feature (696)..(697): n is a, c, g, or t
  misc_feature (838)..(838): n is a, c, g, or t
  misc_feature (1004)..(1133): n is a, c, g, or t
  Peptide Sequence Number=SeqID_8065
  Probeset Number=SeqID_13654
natctgggcattcaaactccacttctccttctggggttatgagcttcaccttgtacgaggccatgcaagtgacacgaccacctcgtccacttttcagacctaaaagagcttcaccaacgttggggaatgtctttaggcttgtggtggtcataggttgcctcctcatgaaggaggtgctcaccatggttccggatagagctgctgtggcgcaaaccacaatgcctaagcagatccacgagattaaggatttccttctgacggcacggaggaaggatgcgaggtcggtgaaaatcaagaggagcagggatgtcgttaagtttaaggttcgatgctccaagtgcttgtacacgctttgtgtctttgaccctgagaaagccgataagttgaagcaatctcttcctcccggtttgagtgttcaagacctgtagaggtgctgagtgcggcagcgtgcgtttgtttctctttttgttgcctgatgctctagattttgtggcttggttttatatgttggtgattgttacgaggacatgcttgtttttaaattggtacgaaagtgcgaaagttggatattgagcacaattgaaaagaattgcccataaaaaaaaaaaaagtggtttattttatcttaagcaataaaannaaggggtgagntnnatatgaaggaaataanaanngaggagaganngannnannnannggacactaagaaaaagagaaaagtatgtggtggtaaggtgagaaggaaagttgtaaccaccttgatgtggtgaaggaaacagcggaattgaataaaaaggataatgttgtttaaaaaagttaaattctatttataacccanatgggaaaaaagtaattcctaagagtagctaatatgtaggtgataattgctagaagtgatagaatataaattgtagaaatgattagtctgaggatagagtcttggaatactgaaagaagggtaccctgcatatcgtttgtttgtttatgtttttgttgactcatgnnnnnnnnnnnnnnnnnnnnnnnnnnnnnnnnnnnnnnnnnnnnnnnnnnnnnnnnnnnnnnnnnnnnnnnnnnnnnnnnnnnnnnnnnnnnnnnnnnnnnnnnnnnnnnnnnnnnnnnnnnnnnnnnnn

SEQ ID NO: 3876 - DNA, 469 bp, Glycine max
  Peptide Sequence Number=SeqID_8066
  Probeset Number=SeqID_13655
tacaggcgtgagaacaccatgcaaggggacgacgaaaaggctatgagcggaggccgctgctgctggtcgtggttggaaacttgatacagcactcatatgcccataagatcaccttgtacagagacgtgggactcctcttctagcccggagatctgacgaactctatactaagagtgtagtcgaaatcttgctgggtgctttcataacaaattcgtacactggttctaatgcacatgctactgctgtgaaactcgtacatggatctcttgtggaggcagatacgggaattataggcattggagcaaaacctgctgtgactacctttgagagggtggccctgaatacagaggttgttggcatacaggtcgaaggtcagtttcggacaagcactcccgggatctttgctgttggtgatgtagcctccttccctttgaagacttatatcgtatctctctagtggagcatgtgg

SEQ ID NO: 3877 - DNA, 541 bp, Glycine max
  Peptide Sequence Number=SeqID_8067
  Probeset Number=SeqID_13656
cccttgtttctttgatgatcgttttgcatttgaaaaagactttcttattttcttttcatcaagttgctggcatggctttttggttctataaattctccggttgaagcatacaaagtccccttccactttcttccttctttctcatcactctttgaagatatttttgtcacatagtttatggactacgagagccctgcctctgtagagtgtaaaccaacctccttttctttgctttgagctcgctcgatcttcttccatttcatgtgctggtgtagttgatgtgatatatgtaagcctgttagatgcccaacattctgttcatgatgtttgagattgatgccttcaattctgagcgaagtctcttttccgagtgcatgatcgattccactgtgagacgcaggacccatccagctcatgcgtactatgatgctttactttactggctctactacgaatcatgatttcaaaccccctctctattattactaaattagacccgattaaaaatcccttactgatcttaacagaaaaaaaattatct

SEQ ID NO: 3878 - DNA, 349 bp, Glycine max
  Probeset Number=SeqID_13657
cgcgaaaaaacccgagggccctgtgaaggttgttgaggtcgcagaggttgtggtcccgtcgtctcttcgcaaggggaggccggaggttggactcgttttgcgtacgactgtatggtcatgtccgttagtctagcgcgggtgatgacgagtagggtggccgatcgtcggcgacggtgagcaggccgctagcgctcagcgacatgcgcgactggtggacgaggaacatgtgggcgttcgtcaatgagtcacctcaacagcagctcgaagcaggcgcagtgggggcagcccctgaaaagcatcgtatgatgttaaacacaataaagtgggaactggaggggtgaaatgagtt

SEQ ID NO: 3879 - DNA, 1354 bp, Glycine max
  misc_feature (1)..(1): n is a, c, g, or t
  Peptide Sequence Number=SeqID_8068
  Probeset Number=SeqID_13658
nagactttatatttagggcctatttataaactggcaatagcaagccctgacttgtataagcaatggtaatttgcattccttccaaagagctgtttgttctagcatcatcttgattttctggattgatcttttcatatcatagttaattttcttgaaagcattttgcgacaaagaacttgatttggagtgaggtgctgacttcaaaataaattggcatttgcaagcctcaacctgatgggttgttttaacttgctttcattctccaggagctcttttctccaacatgtacgaataagcttcgtttccttctgatattttaccatcttgatttcttgactttgtaagaatttcatctttaaaggattctttcacttttcttcaagagattttgcaacaaataatcttccttagattttcttgaattcttgaagggcctatttataaactggcaatggcaagccctgacaagtataagcgatgagaacttgcgttctttccagagagctgtttgttctagcatcatcttagcttcttctgtcttgatgataaatcatcaacttctttctgcttctcatttttccagaactttccaaaagcatcttgtcttgcagagtttttgaactctctctttacattcttcatctcaggcttttcaattgttcatcttctggccttatcttgatccgatcaagcttgacttctttcatagcattcttgttcttgttttccgacttcaaacaacttgacaatcttcgagaaattaggctttcttgatataagcatagctttctgtctacttgaacttcttgttcatatcatccaacttaaaactgagtttgttaattcaatttcattcgggaaatctttctttatttttataataataaagcttcgccgactttcattcttctcttctttcggctcgtacttctttacaatcaattctatcagaatcttctttcatttaaaccgcaccgcgtctttatcaatttcttatcttttcttcttctagaattctctttcttgggctaaacttcacatttatcctttcttgaatttttccaattcttcttgtactttccagaactttcattctttcaatttgtcttgagcttcatctttcgatctcgacttgaacttgaacttgatcttgttgatgttgttcctgaacttaacatcaatgattctggattcttcttgtcttgaagtttttctgaggcaactttcgttcttcatatctttgtagagcaaaaacttgtttctgacttcatatggttcttctagatctttagcttgggctatctgatcttaaatatttcatcagcatcttgacatttaagatttgattttgata

SEQ ID NO: 3880 - DNA, 1335 bp, Glycine max
  misc_feature (56)..(56): n is a, c, g, or t
  misc_feature (112)..(112): n is a, c, g, or t
  misc_feature (125)..(125): n is a, c, g, or t
  misc_feature (207)..(207): n is a, c, g, or t
  misc_feature (280)..(280): n is a, c, g, or t
  misc_feature (430)..(430): n is a, c, g, or t
  misc_feature (561)..(561): n is a, c, g, or t
  misc_feature (958)..(958): n is a, c, g, or t
  misc_feature (1018)..(1018): n is a, c, g, or t
  misc_feature (1291)..(1291): n is a, c, g, or t
  misc_feature (1309)..(1309): n is a, c, g, or t
  misc_feature (1312)..(1312): n is a, c, g, or t
  Probeset Number=SeqID_13659
catagacacaacatcacgtcgcttatgaggagaacagaccgattagtatagatggngagaaagaagaggatagatattttttcagcactgtagagatgatgtgtctgtgtgnggttagatagtgnaggtgacatagtcaagtatgcagaatacgagggaaaatttgtcaaaggttgtgtggatgcttatataccgtctcaaggcganatgtagcgcgtttgtattagaatagttatgtgtgccatcatcgattatgtggcctttgttgtcgtcatatganttatgtagtgtaagtgtcgccagagagaggtgtgtcgatgtaccagatgatatagttacgctggtatcttcgtattcagtgagtgagggagagatagagttgttgacgtatggggtgtggtggcacgtttatagtactatcgatagtgtnaactattgaagtattactataggcgtgattagtatcgcacgcgctcatcacatgattagatagtcgagagggtgttgtgtcgccgcaaaggtggtgttaggatattctacttgtgccgagtatgtataatnatttcccagtgcctcttagtagaaggtagatggccaaacacagaggagtggatgcgcgaggacaacatgagccgcttattattccttagcaacgtcgctacaagtatcaggaggttgagtttcacgtggcgagtatcaagtatgcgccagagtaaatacgatatagggcgacgtggggcgagagaaaagaacaagagtattatgtggtggtgtattgcaaaacatatacaataagatgtgcgctatgcgtcgtatgacgatttgtctggagatttcacacgttaggggttctgattgtgaataagacaatgtgttggtttatcaaaactaatatgtatgtccagggcccgtttgtatacattacccacacgagcgtacaccttactattgttgtccnattatctagacattctaggcagagagttttgacgcgtacatatagaaaggtgagcgcatncttgtcaatcacgtaccctttgtgtctatgtatctactactttacgtgatgtatgttaatcctatattattctatcttactttaagatattccttgcggcgcgtacggcctgttgtgaagtctacataaaaatagtaaaaggagggggtgggctgcggggactctggctgccttcgagggtattagcgccggcctcgccctttcgtcagagagagtttaagtatgtttatctttttatatattcctgttgttattgtgggggtgatattctanttgatagtgtgatgtttnaanaaaaaagcagagaaaaaaaaaaa

SEQ ID NO: 3881 - DNA, 1843 bp, Glycine max
  misc_feature (1)..(89): n is a, c, g, or t
  Peptide Sequence Number=SeqID_8069
  Probeset Number=SeqID_13660
nnnnnnnnnnnnnnnnnnnnnnnnnnnnnnnnnnnnnnnnnnnnnnnnnnnnnnnnnnnnnnnnnnnnnnnnnnnnnnnnnnnnnnnnncgagagtgtatttggtgggggagacggtgtttccccgcgctctccgggggggggggagggggggggcggataacaaaagggagccctgggagagaaccattggggcgcacatgaccgaggggagccccccagaatcccccctgcaaggggaacaaaaagggggtaaccccctttgggggggccaacggggttccggaagaaaagaggggcgccggagtttagccccaaagtgcgggagcctctcctccgtaatcgtagaactaaaaatctccaaaaccatggatctctgcacttacttcaaatcccagccctcatggctcctcctcctcttcgccctcggctccctccaactcctcaaattcaccctctccctcctcaactccctctacatctacttcctccgccccgccaagaacctccgccgctacggctcctgggccatcatcaccggccccaccgacggcatcggcaaagccttcgcctttcagctcgcccgcaaggggctcaacctcgtcctcgtcgcccgcaaccccgacaagctcagagacgtctccgagtccatcagatccaagcactccaacgtcgagatcaagaccgtggtgatggacttctccggagatatcgatgatggagtgaggaggatcaaggagacgatcgaagggttggaggttgggattctgattaataacgcggggatgtcgtatccttacgcgaagtactttcacgaggtggatgaggagctgcttgggaacttgcttaagatcaatgttgaggggacgacgaaggttactcaggctgtgttggggaatatgctgaagaggaagcgaggggctattgttaatatgggttctggtgctgctgcgcttatcccttcgtatcctttctactctgtttacgccggtgctaaaacgtacgtggatcagttcacgaggtgtcttcatgttgagtacaagaagagtgggattgatgttcaatgccaggttcccttgtatgttgcgacaaagatgacatcaataagaagagcatcgttcttagtggcatctccagagggatacgcaaaggcagcactgcgttttgtagggtatgaagcacgctgcacaccttactggcctcacgccctcatgggttatgttgtctctgcattgcccgagagcgtctttgaatcctttaacattaagaggtgcctccagatcaggaagaaaggtatgcttaaagactcgaggaaaaaggaatgaaaacttttcgagggtgcatgattttcttctgcagcacttggtttcttgcaagtttctgtttagacttttgcaagacttgtacgctttagtttccgatgtttccaaggttgtttccttattttgaaaattaaaaaccaaaaaaaaaaaaaaaaaaaacgcgtatcgtatgggtaccggtgggtggattgaggaaaaaaggaaaccccaccctcgccccctataactgcagtccgcaattcaccaggcggcctcaactgggcccggacattttttaacaaacgtacctggacccggggcaaacacaccccggcaggttaacccccacccttatatttgacctcttgaagcccacatatcccccctttttcgaccaggtttgggggtataataaataagtaacagagcccccgcatcccgaatatcgccccttctccaaaaaggtttgctgcaaaatcccgtacaagggccgaaatgggaaataattgccaagccggttacaacattctctcgaaaaaaatt

SEQ ID NO: 3882 - DNA, 793 bp, Glycine max
  misc_feature (20)..(20): n is a, c, g, or t
  misc_feature (265)..(265): n is a, c, g, or t
  misc_feature (409)..(409): n is a, c, g, or t
  misc_feature (471)..(471): n is a, c, g, or t
  misc_feature (545)..(545): n is a, c, g, or t
  misc_feature (556)..(556): n is a, c, g, or t
  misc_feature (576)..(576): n is a, c, g, or t
  misc_feature (598)..(598): n is a, c, g, or t
  misc_feature (628)..(628): n is a, c, g, or t
  misc_feature (630)..(630): n is a, c, g, or t
  misc_feature (641)..(641): n is a, c, g, or t
  misc_feature (645)..(645): n is a, c, g, or t
  misc_feature (666)..(666): n is a, c, g, or t
  misc_feature (692)..(692): n is a, c, g, or t
  misc_feature (738)..(738): n is a, c, g, or t
  misc_feature (762)..(762): n is a, c, g, or t
  misc_feature (781)..(781): n is a, c, g, or t
  Peptide Sequence Number=SeqID_8070
  Probeset Number=SeqID_13661
ttcggcacgagcacaaagantacgtctgagaacaaagatgcatcaaagaaggaagcagcatttgcacttgctgcccttatggaaattccaattcagtaccggataacccaaaatctacaaatcgccaatgaaaatccaacaagtcatcaacgtaaaaggcctcttcctccgcctaaggaagtaatagatcgtgacaatgcagtcctagctgttccacacgtgccaaattttgaatcagttgagccatcagctccagctgcagtanaatcagtatgccctatttgcttaacaaatccgaaggacatggcttttggatgttggtccatacaacttgcaaggagtgtggtgttgacatttatcttccatgcccctatgttgcccggcagggaaatttacaactccccctganacttttacactttgattttgggtttggggatttctccttctgcctaactttaagatttatantttatattgcttgttattgccttgtttgaaaaagaatgtttatgactacctgtttaatttccccattcttcccnatttaaaaatnagattttacattgtccttanaatattattgaaatttaaaaanattccttatgatttttttaaatatattttnanatatgaaaatnaatnaatctcccatttttgttattnaaaaaaaaaaaaaaaaaaactccaanggggggccggttcccattccccccatatgattctttttaaatcccnggccgccctttttaacttcttaangggaaaccccgctttcccnctttatcccttg

SEQ ID NO: 3883 - DNA, 772 bp, Glycine max
  Peptide Sequence Number=SeqID_8071
  Probeset Number=SeqID_13662
gaagctctgcttgttctgcatcaatggcgcgaggagcgtctacactagagaaggaggaagctcaatcatgtcgatgcaattcggccacggaaaaaataatcgcacgtccaccatatggaggaggaactgcccgaggagattatcaatccgaagttctgcggcatagatacctcgtctgtccacagaagcttatccctgcttatcctcgcatctcaccctatctgcagcactaggacgaactctcggtgaagttcctcgatccggagtacatccggagtattgcgggatagacatctcatctggcccgtaaggttgatgtcgtcctagcaggtacagggaggagattcctaggttgcgattcactaatggagaaggcctacttagatgtattgacagagagaagcaacatggagtttgaccactagcagcttgtgaacaagctgaagaacataatatatgacaataattcgcaatgaaattaggatgtcaacgaggttggattttcagactaagcaatgtgtggcatctaattcttcaattgttatccttcctgccgtgttgtcttatgttcgtcctgtctacgtaggatttagtttaatggttcagagtggctgtatcaatttcctagattgccttgtgtcacttgtatcattactacaaaatatcatgttttgatgcactggaatatgcatagtttaatacaacctcgctctcaaaataagtgtctcaatttcagttttgatacacttattttgggatttaaggagtatgg

SEQ ID NO: 3884 - DNA, 597 bp, Glycine max
  Probeset Number=SeqID_13663
acctttctcccaccttgttgagcgccaccgccgtagcagagggaagggatagaaacccgccgtcgccgcctctgcgggaattggaattggtggcgtctccggcctcgaattgggtctcaggtgactcaccggtgtgggtcgaagccatcgatgggagtaatcgctttggggattgctgtggagctaggaatcgctcgtcgaagccgagctccgccctggatccgcggctcgtcgtcgactggtcgcgtcgccgcctcaactcctaacgagcaacccactgtggaacctgagcttcaacaagtagaagtagctgagcaggagctcattgcagacgagcaacccactgtggaacctgagcttcaacaagtagaagtagctgagcaggagctcattgcaggagaagaacaggtggttcaggaggagccacaaggcgaggagtatgatctgatctaggtggcgtttctcagtcgacattggcgccgacgatccttagttcgttttatatttacctttattttgtaataagacttccgctatgtaataaatactctgatgtattatgacatttatctctatacactctgttattataaaaag

SEQ ID NO: 3885 - DNA, 1786 bp, Glycine max
  misc_feature (1)..(1): n is a, c, g, or t
  misc_feature (16)..(16): n is a, c, g, or t
  misc_feature (18)..(18): n is a, c, g, or t
  misc_feature (50)..(50): n is a, c, g, or t
  misc_feature (648)..(649): n is a, c, g, or t
  misc_feature (698)..(698): n is a, c, g, or t
  misc_feature (865)..(865): n is a, c, g, or t
  misc_feature (1137)..(1137): n is a, c, g, or t
  misc_feature (1261)..(1261): n is a, c, g, or t
  misc_feature (1499)..(1499): n is a, c, g, or t
  misc_feature (1544)..(1544): n is a, c, g, or t
  misc_feature (1716)..(1716): n is a, c, g, or t
  Peptide Sequence Number=SeqID_8072
  Probeset Number=SeqID_13664
naatcttgtttttttntngaaccgcttgtatattcttatgtcctgctctnctccccctaccataagctgtgtagcttccacccatcgggtgggtcgcgtccggcttcctagcaaactagctgtgtatccccccccgcgccactcgacagtgtaatctcacacatcgcaagaccccctatcacactcacgtaacccctttcttctcttcctcttatcaatggtcacgctggcctatcactcatctccttccatccctctctcactctctacgcctactatcgccagcccgatatacaatcctcctcccccattgtttttcttccttctcatctgtctttatatatttgtgtcttcttatctcatctatactgtaattcacatccccacttctcttctctcttcatttcatttattcattcatttctttttcattctctctcctccctctctaccctctctcttccccctctcactctacattcatttatcatccagtccccaccaatacccgccctcccatcccaaccactctctccctccatctatgcgttctgctcatcccgtgctcaatcacatctactatcagcgttcaccattcactctcgtcttttctccttatcaccacacctccttcttcttactcgcgannacttgctacaccaactatggtctcctcacactcgtccccatctattctngcgtcacattcatacgatacctactatacctctcctcacacacgtctacttatcttatatacatactcatcgtgttccttcacatcccactcacccatctaccctatctccgcattccttctttctcccactacctaatacacaccccgcttcctattaatcatgtnatttctcacccaccatccatttccacctctatatctatatcttcttcgccacacgctcgctcttatcatttaccgactatctattacactcatacatgacattatcactgatatcccaacatctcactctttcatttctattctctttctcctgtctcctacccacattcacagcattgttgtctatcttcactctccctaatcaccccactatttgactctatatctatatactatctctctacgtccacttcatattcacaattgactanatacgccactccttacttattcatcactcctcgtcccaccactcgctcacttccgcgcgactcattcctatgtatcatcatctcccatctctaccactcacatctcatgcactctacactatgnttacacattaaccctcttcgtattccatatataagatgacctcgtactatacttacagatcgcacctccttcctctactcatacaccgcacatcattgtcagtacagctctctcctctactacaattacgactacctctcacgcgtcgactcgcctcctatctctatatctatctaatatatactcttctctctagatcctcattatattccgctaccgagtcaaatattcacacatnaatcatctactcatactcaccgcctcactatcgatataatttatntactattaataaatcccttcaccattcttacatactctgttatcacgcaagcgtacgcgcatcacatatgctatctcagcttatgtaagaggtattgagtaccgcggttctaacactaacgcagaccattactgtttctactccgccgcgctagtcctcgtcgacacacgangctacacattgcgcgaacgatattatatggagagcacagaataccacgtatactattacactaccgtcgc

SEQ ID NO: 3886 - DNA, 1403 bp, Glycine max
  misc_feature (1)..(1): n is a, c, g, or t
  misc_feature (33)..(33): n is a, c, g, or t
  misc_feature (36)..(36): n is a, c, g, or t
  misc_feature (233)..(233): n is a, c, g, or t
  misc_feature (436)..(436): n is a, c, g, or t
  misc_feature (539)..(539): n is a, c, g, or t
  misc_feature (675)..(675): n is a, c, g, or t
  misc_feature (720)..(720): n is a, c, g, or t
  misc_feature (834)..(834): n is a, c, g, or t
  misc_feature (837)..(838): n is a, c, g, or t
  misc_feature (906)..(906): n is a, c, g, or t
  misc_feature (1026)..(1026): n is a, c, g, or t
  misc_feature (1077)..(1077): n is a, c, g, or t
  misc_feature (1127)..(1127): n is a, c, g, or t
  misc_feature (1168)..(1168): n is a, c, g, or t
  Probeset Number=SeqID_13665
natctatgtcttcatataagtaggaacatacanatngcatgagatcgcacgagagtaatatgagatatgcagagtacagcatcacattagttgtagcgagcgctctgtcgcgatattgactgagcacaagcactgcgctcgtacgtatacgacgcatcatgatctcagcgcgctgcgatatcggcaactacgcgaactgacgcacactcgttcgccgaatcatgtgttgtagnaatgatacgtacagtaggtagagtatcatatatatcgtgactatgtcggtcatattaatctatacagactccagcgtatatatgtcacggagtgcatgcgtgttcgcggataggacatatggtggcgcgagtatgactcgtgcgatgctgtcgtctctctcatccattgttctatctcgtatgagtataatcctgctgtgcgncggtggtagaatgatcgataactatctatttacagtatattagcatgtgagtgctcatacacgctgacttcatcggagttggaacagccggcatgcatagcgngctcgtatcagtgagtacgatacgtacatcattccagtatgatccaccgctatgggggtgtagtagaataatatctatacagtgcgtatcgatagatgactgatacataatacatcagcgcacgatggccggcagnagcgtccgttagagcagaatcaacgagaacatgcgagacggttancgtcaacgctcgataccgacttcgcctcaagcgttgtgtcgtgtggcgttaagtagaattgctcggtgatggaaagtcgtgactacattgatatagtagacagtatctcatatngcnntcaacttcgtgctattgtcgatggtatctataatatcaccacactcactctgcccgtcactctctgcngtcgcatcatgaatgatctatacttactagtctgccgtcatcctctactcgtgtgcccatcatactagaatctctcgtgccgcgctatgatcatcgtatacactgtagtgcaccgcgtgngagacagcactcgtaagacgtactacgaccagatacatgactacgaaccgntactaccgcgcgacgaaagggagaagcgtgagcacacatacactctctgntcgtcaagcatgctatcacgaagctcgcggtggttcagtancttcgtcgcatagatacatacacgcgatgtgtgccgagcagagagcgtgagatgagtatagagacaaatccatatagtgagtatatagcacagtaccttgtctatacagaacaatccttcgactgaggattcctcgtgtgatcacctataatctactacactagctgcgctgtaagtcatatatatataagcaatagaatactgtatactctctataataaggcagattatgata

SEQ ID NO: 3887 - DNA, 623 bp, Glycine max
  misc_feature (563)..(563): n is a, c, g, or t
  Peptide Sequence Number=SeqID_8073
  Probeset Number=SeqID_13666
ccccaaaggaaccgaccagggtttccccccaaaaaaaaaaaattttttagggcaaattcaaaagccccggggtttcaaaacccccccgcttccagattgaaggaccaaaaaaatccccggagttaaagtttggcaaaacggaaatccaaactttccagtggtgccaaaccaactgttacagcataggttgcttcctggcattcttccggtgaagtttaaacttcaccgtagtttttggtagtcttgtttgagggcgattatgataaacatttatggttttttactttaaatacatttgagttcatttaagtattttgcaatgatttttagagttcaatcgaattgatgtgttgttggtttctattaaaaacaaaaaaaaaaaaaaaaaaaaaaacatagggcaagaaacgaaataaccaaaaaagacaccaaaagtaatgacatatatacaaagctccgggcgccccccaactgatgggctgaggcacccgaaaattaattgggaaccggcacctgaaaccatactattttttcataatggagaatcattgaacatgccgtangagacattccagtgttagtcattgcaaatgctgaatattcccttgtcactacgaaattct

SEQ ID NO: 3888 - DNA, 1974 bp, Glycine max
  misc_feature (12)..(12): n is a, c, g, or t
  misc_feature (17)..(19): n is a, c, g, or t
  misc_feature (21)..(22): n is a, c, g, or t
  misc_feature (24)..(34): n is a, c, g, or t
  misc_feature (36)..(42): n is a, c, g, or t
  misc_feature (45)..(47): n is a, c, g, or t
  misc_feature (96)..(96): n is a, c, g, or t
  misc_feature (101)..(101): n is a, c, g, or t
  misc_feature (139)..(139): n is a, c, g, or t
  misc_feature (147)..(147): n is a, c, g, or t
  misc_feature (159)..(159): n is a, c, g, or t
  misc_feature (179)..(179): n is a, c, g, or t
  misc_feature (181)..(181): n is a, c, g, or t
  misc_feature (197)..(198): n is a, c, g, or t
  misc_feature (203)..(203): n is a, c, g, or t
  misc_feature (211)..(211): n is a, c, g, or t
  misc_feature (215)..(215): n is a, c, g, or t
  misc_feature (238)..(238): n is a, c, g, or t
  misc_feature (258)..(258): n is a, c, g, or t
  misc_feature (274)..(274): n is a, c, g, or t
  misc_feature (305)..(305): n is a, c, g, or t
  misc_feature (309)..(309): n is a, c, g, or t
  misc_feature (311)..(311): n is a, c, g, or t
  misc_feature (359)..(359): n is a, c, g, or t
  misc_feature (378)..(378): n is a, c, g, or t
  misc_feature (388)..(388): n is a, c, g, or t
  misc_feature (391)..(391): n is a, c, g, or t
  misc_feature (395)..(395): n is a, c, g, or t
  misc_feature (454)..(454): n is a, c, g, or t
  misc_feature (468)..(468): n is a, c, g, or t
  misc_feature (470)..(470): n is a, c, g, or t
  misc_feature (485)..(485): n is a, c, g, or t
  misc_feature (507)..(507): n is a, c, g, or t
  misc_feature (519)..(519): n is a, c, g, or t
  misc_feature (550)..(550): n is a, c, g, or t
  misc_feature (554)..(554): n is a, c, g, or t
  misc_feature (557)..(557): n is a, c, g, or t
  misc_feature (608)..(608): n is a, c, g, or t
  misc_feature (636)..(636): n is a, c, g, or t
  misc_feature (660)..(660): n is a, c, g, or t
  misc_feature (701)..(701): n is a, c, g, or t
  misc_feature (750)..(750): n is a, c, g, or t
  misc_feature (752)..(752): n is a, c, g, or t
  misc_feature (754)..(754): n is a, c, g, or t
  misc_feature (758)..(758): n is a, c, g, or t
  misc_feature (808)..(808): n is a, c, g, or t
  misc_feature (833)..(833): n is a, c, g, or t
  misc_feature (876)..(876): n is a, c, g, or t
  misc_feature (925)..(925): n is a, c, g, or t
  misc_feature (950)..(950): n is a, c, g, or t
  misc_feature (956)..(956): n is a, c, g, or t
  misc_feature (968)..(968): n is a, c, g, or t
  misc_feature (1108)..(1108): n is a, c, g, or t
  misc_feature (1141)..(1141): n is a, c, g, or t
  misc_feature (1161)..(1161): n is a, c, g, or t
  misc_feature (1220)..(1220): n is a, c, g, or t
  misc_feature (1251)..(1251): n is a, c, g, or t
  misc_feature (1273)..(1273): n is a, c, g, or t
  misc_feature (1335)..(1335): n is a, c, g, or t
  misc_feature (1361)..(1361): n is a, c, g, or t
  misc_feature (1482)..(1482): n is a, c, g, or t
  misc_feature (1494)..(1494): n is a, c, g, or t
  misc_feature (1533)..(1533): n is a, c, g, or t
  misc_feature (1583)..(1583): n is a, c, g, or t
  misc_feature (1593)..(1593): n is a, c, g, or t
  misc_feature (1598)..(1598): n is a, c, g, or t
  misc_feature (1650)..(1650): n is a, c, g, or t
  misc_feature (1656)..(1656): n is a, c, g, or t
  misc_feature (1693)..(1693): n is a, c, g, or t
  misc_feature (1699)..(1699): n is a, c, g, or t
  misc_feature (1702)..(1702): n is a, c, g, or t
  misc_feature (1726)..(1726): n is a, c, g, or t
  misc_feature (1728)..(1728): n is a, c, g, or t
  misc_feature (1742)..(1742): n is a, c, g, or t
  misc_feature (1748)..(1748): n is a, c, g, or t
  misc_feature (1753)..(1753): n is a, c, g, or t
  misc_feature (1786)..(1786): n is a, c, g, or t
  misc_feature (1790)..(1790): n is a, c, g, or t
  misc_feature (1798)..(1798): n is a, c, g, or t
  misc_feature (1842)..(1842): n is a, c, g, or t
  misc_feature (1901)..(1901): n is a, c, g, or t
  misc_feature (1913)..(1913): n is a, c, g, or t
  misc_feature (1915)..(1915): n is a, c, g, or t
  misc_feature (1922)..(1922): n is a, c, g, or t
  misc_feature (1927)..(1927): n is a, c, g, or t
  misc_feature (1932)..(1932): n is a, c, g, or t
  Probeset Number=SeqID_13667
tttttttttttnccttnnncnntnnnnnnnnnnntnnnnnnntcnnngggctgtgtgtcgtctttcgctctttgcgtcctcctgttctgtctcgtngtctnccttcctcgttcctttctcctctgtctctctggctctncccatcgncctttctcttcntactctctcgacgtcctctntntattttgtggttctgnnttgtntcttattntttntctattttctatgtgtgtgtctntcgtgtggttgtgcctctgntgtgcggcgctgcgcntatatagcgcgcggtgcaggtgcgcgcttcncgancncacaccacgcgcgacctcatcatcaacaccacataaaactactcgcanatctacaacactcgacacncgcgagcganctncgtngtgtcacagcgccactgcacacacacacggcggcgcctcacactccagtgagatcgacngatactcacacacntnctctgcgtctacggntgaggggtgtgctcctgattgngggagtgggagncgccgcggcgccactccggactcccttgacncgcntgnctccgccgtcctggtagcgtcgtactgtaggagcggcttccgtcgtcgacnctactatatatcactcgtaactctcganattagcggagcagcgcgtacaatnctcactctcaccacagcctgaaacactcctgcccgtcacancactaccacacacacacacccccgcacacactcacccacatccctgcgncncngccncgccgccgcgccgcgacgctcgcgctatcaaccacgtctcacgtcaggangcgagtatgaatactcatcatcaanagcttcgatacacgatgtcgtgatcgctgtctaactgagcggncacattactactgcacatatgactctcactgtactcatagtcactaaantacaatacatcagatggtacgtatncatacntagcacgcactnattatattcgagtatgtaggagagtgtaggtagtattatatatacgagagcgatgacagagtgatatatagtgatgtatgtacgagtgcgatatagcaacaaatacggatcaggtgtatttgatgtgtatagataaacgnatattgctgtgagagcacgcacaccacgaagtncacacacagacgtaatatcnatgcagagatgcgtcatggttgcgcgtgttcaagtagcgatgctatatgtatatgtgangatgctgtctacggtacgtcgctcgtactcncgtactgacgtatgtatggttntgatagctacctacacatctctcacgcaactatatgagtgtgagtcatgctgatgatatcantcatgtgttcggcgacatcgtgcaanctctacgcttgaaagagggtgcgacacatatctctctcaacgactcgctcgattatctcgacataatgtactacgtaaacgctcgtccgacgacacaactctactctccactaccacaacnatataagtttgntatgacgagtgacgagtggatagagacatagttgctatnacactcgcgccaatatcacacacgactgccgcatacacatgcctactttnacactatacncaatncatatatactattatctatagatcccagcacgcgacttacgaacatatctgnatagtngacatcaacaagagagttataaacagtatataaactncgcgcntcnataccagtgctgcatgacttgacntntacacatctctctnctcgcngtgangtcgtgtgtgtctatttcatgcgtgatagtcgnacanacgcaagngaagaacgacgacacgacgcgtcgtcgtgatgaagcgacagtcngctgctgcagatagatggacgactcagcacgcagtagcatgcagactactaaaactacnctcgcagcgacnancaatcantcatncatangctatcatcgactcgtatatatactacattactaactaacgg

SEQ ID NO: 3889 - DNA, 751 bp, Glycine max
  misc_feature (693)..(693): n is a, c, g, or t
  misc_feature (696)..(696): n is a, c, g, or t
  misc_feature (731)..(731): n is a, c, g, or t
  Peptide Sequence Number=SeqID_8074
  Probeset Number=SeqID_13668
ttatattttccctaccctccttgtggatggagggccctttgggccgactttccagagattccccctttgtgggggccacttgggtatcttggcgctttggccaacccactttgtttttattaatagaaggcccctcccctgtttgcttctcccaaggggcaggatctccgacgtttccgagcttccaggccaagaagctcttcttgtgggtgtcggtctccggcatcgtcgcgctctccgaagagggcaccctcgatttgcaggtcgacttcgtctccgaggagttctccgcctctctattcgaccgggtgcccgtcatgcggcgacagccacggcgcgcagctacgcggcgtcgccgggttcatccaggagctcgacctgctccctgttgcagaggcttgagcttggaggatccgtccgttcgttccacttccagcaaattctccttggatcatattgtgaggttatttgttacgcgagtaatgatgataataagatatccggagcctgttttagctgcatggagaaaggaatcgtgttccatggtggtgttctgttggcaaagtgtatgtggtatactgtctctccttagtgaactcggattctgtgtagaattatacatctgtttcgctgcaactgggacctgtgtaaaatgtatgtagctcattcatatttccctaaaatatacccgtngtncttcttttcatgccggcattcttgtccgccacttntcacccataccccaaacaat

SEQ ID NO: 3890 - DNA, 756 bp, Glycine max
  misc_feature (523)..(523): n is a, c, g, or t
  misc_feature (567)..(567): n is a, c, g, or t
  misc_feature (609)..(609): n is a, c, g, or t
  misc_feature (612)..(612): n is a, c, g, or t
  misc_feature (624)..(624): n is a, c, g, or t
  misc_feature (638)..(638): n is a, c, g, or t
  misc_feature (701)..(756): n is a, c, g, or t
  Peptide Sequence Number=SeqID_8075
  Probeset Number=SeqID_13669
tagtcaagttgtgagcaaaaagcagatcatgattaagtggatgcctcctgatcaacggtggtataagcttaattctgatggtttgaaggtaggggatagtggaggaactggctatggtggtttgatcagagatgagaatgggagatgggttgtgggttttgtaaggaatctgggtattgcttcagcttatgtggctaagtcatggggtgtgcttgaaggtgttactctggctcgtcagagggggattgatttccttgagatcaacgtggattcgaaagttgttgctgatggactgaagggcgacaaacaagggtgtcttgagggctggacaatcgttggggccattaggaaagatggttagtggcttggagcaggtgaagattagtcatatctatagggaagcaaatcaatgtgcggatttgcatgtcaatcatgctcgtactcaacgaggaggatttgatgattttggagcatcctatagggctgttgaccccagttgttgcttatggattcttgtggagtngaaactcctcatgtagttggtggttagtcctggttttgtttttnggctttttacccccgttcaatacccaaaaaaaaaaaacctanacnccttttttattnaatacaccattacncatctgaattggaacttaacttattcctgatgccaatgaccaaagttcttctcattttcccannnnnnnnnnnnnnnnnnnnnnnnnnnnnnnnnnnnnnnnnnnnnnnnnnnnnnnn

SEQ ID NO: 3891 - DNA, 1628 bp, Glycine max
  misc_feature (1)..(1): n is a, c, g, or t
  misc_feature (28)..(28): n is a, c, g, or t
  misc_feature (72)..(72): n is a, c, g, or t
  misc_feature (98)..(99): n is a, c, g, or t
  misc_feature (197)..(197): n is a, c, g, or t
  misc_feature (200)..(200): n is a, c, g, or t
  misc_feature (368)..(368): n is a, c, g, or t
  misc_feature (413)..(413): n is a, c, g, or t
  misc_feature (425)..(425): n is a, c, g, or t
  misc_feature (474)..(474): n is a, c, g, or t
  misc_feature (698)..(698): n is a, c, g, or t
  misc_feature (1342)..(1342): n is a, c, g, or t
  misc_feature (1346)..(1346): n is a, c, g, or t
  misc_feature (1594)..(1594): n is a, c, g, or t
  Peptide Sequence Number=SeqID_8076
  Probeset Number=SeqID_13670
nctcagtgaacgactcgatgtatacatncgcatgaatactatgctacatgaagatgacacggagtcgctctnatatgaatgatagagtgatagtaaanntcgatcgacgtatgtatgacagtgatcgtctaacagagaggtagtgtctaccggaacatataacgagtcaagtatcgtactactcatatattcttgtntangatcgatctatatctatacctatgtatctcatgatctgtgtgtatgctgagtgagactagcccgtcgaatgtcatctgagcagacaagctattgtgtcgtgcatgctgtctcgtgattgtattgaccaaacagtgctggtaagctagagatagacactctacatagtnccatacagatacatgtcggtgtcgttaggtacattgagcagttgnttactagttacntcgatctctgtgcgtctcatctcccaccataacatatcatcgcgctctntgtgtttgtatgtaatagatatctcaacctcgcgcactataacagcgcctctcttgcctgtattactatcgtcgattattctattctcgacaatgttcaatcattagtatgcttgcgtcgctgcgcgcgacgttagtcacaattaacgaagcatctactacgagtaaccaacatacgtacgctacacgtcagacgtcacgccgtatcacacggatatatctagnacaacatcacataacacgacactaccacacaagcgaccactgcaccggtgcgactcggatacaatcactgtcaccatcgtcgtcgccgtgatgacgtatctgctcgaagcgaggtgttatgcagacacatataagagaatagtatgtgagtagaggcgtgagaagcatataagcccctacatatcgagaactatatatccacaacatgctacatgatcctaggctgtcattcaattaatgcctgtcatcacatccatatcctctattagtatgttcatggatatgaatgtcctatcctcatgactaatagtcatccgtggagttgcgccgtttctgtggttatcgtatctgattgtattgtcacaccgagtagcgtccagcggtccacacgacaatattgtatctttactgtctgatattctttcctcttagtacttctgcttcaatcattatgattatattatagtggacacgaacagatcgatggcgtgtcagcgtacacgatactaaccagtcatcgtctaggctcaacagagtacagaccggtatctcaccgcgcaccgtcgatgtcctaatccgtagttatataactcacgagtcgagccggtgaactcccgtaggaacaagtctgccctccggtgcgngccngtgcggccgcgtgtcgtcacgtgtccccggcctccgatcatatttattatatacaatctgcagacatacttagaatacatcaataaactccatattcactacaatattacaaccacctatcaccaccgcacacatgtagtgtagatttatgttataaatatatgagacaagctgatgtattagataatagagtatatatcttccctccagatgatacaccgccagatatgccgtagtcagtcgctgancacctcacactaccacactgaggttgcgggttaa

SEQ ID NO: 3892 - DNA, 1328 bp, Glycine max
  Probeset Number=SeqID_13671
gagaaaatgattaagaacaaaacaatgcatatgaatagttcctcattatatttacattacgataactttactccaacattcatacaacatgtctggtgtacaaatcatttgctgacaggacatatgcttgataagcgactgcgataactattggttcaatgactgagctggtaaggaaaattaattaagtgtctttgttaagagattggacgaacagcagaagctaccaaagatttagcttgcattgggaaaacattcaccacaaaagtattctgatcgcacataaatagtattaaaaactaaataatttacacgagacataggaatgatcgcgttcagaatcccttctgatacccacaagcagtgcaaacaatgcaagcaaatcagtaaaagtatttacaataaaacgtccaaaaagttgcttaaaatgagagtatgcaaaaagatagaagatgttttaaaacctcaaactccaggcctagaaagtgctgtggcaaggaacatttcatgtaaaaaacgtgtaaaatgagttcattccagttctgtcacagatccttttacccgtcagtcgcattcaagtcaaccgctttgacggtctgtcctaccagaggactcatgcttccctctaccctgttaccatcatccatcacaggaaatgggtcacaagtaagataaatcatgacaaattattttggagccccagttgatgctttactcacaatttacaaattaatttaatcaggtgatgtttaaatacaataccatttcactaaaatcaaaggaaagaagaacaggttctaacaattctacccaagctggaaatgcatccttccactgatcacaaaatctcagagcagatgtcatgtttacaacttgtgcagttctgaattaacaatcctgattttgataagatgctgacaactcttaaatcaattgaattctaatccttaagcacaagagggaaaggactgcctacttacaccagaaagaaatcaccaatttcaacagatatgcagacagttgatttgtttcaggttttcaagtccgccacaatactggtattattcaagcagtcccaaaacaaaatgcctgcgatgaaaggaaccaattttttgagttcatccataccattgttatgtccctgttatcacattgcagctagaatatctgttacatttcattcgtctaaaacaatttgcagtacattaatttttttatatcagatgcgtaaaatacttcaatgaaacagaatactaaatgtgccatttacaataaatgtacttaaaagtgttcaaccactttaaaaatatattactttctttttccat

SEQ ID NO: 3893 - DNA, 538 bp, Glycine max
  Peptide Sequence Number=SeqID_8077
  Probeset Number=SeqID_13672
gttttttttcttcctatcctatctagtgaaaatgaattgaagggctaaagcatgaaagatttgatattgatctcttggaatttgaaagtttagaaattggaaaatagtagtgagagtattgatgatgggcaagaagaagccacaaaaaactaaggaactttctgtggcaatagctgaagcatcatcaacaatagatgagaaagagcaacatgaagttcaagttcaacctcaacctcaagctcctcgaaagagatgtacacctcccaagaggggtggggagctggaacaaagtcaacagcaaaacggacaactgatacagcaaggacgagtccaaggcacacagagttcaatggaaaaacctaccacctaccaggaacaaggaacctcttcgctttccctcacccttacaacacaaccagaagaccttcttctttccacagcggactcttccacaacccacgtacgacccacaacacactcccaccagcccctacttattattctatcacccttgctcccttccctcccacctttccca

SEQ ID NO: 3894 - DNA, 1939 bp, Glycine max
  misc_feature (1)..(1): n is a, c, g, or t
  misc_feature (40)..(40): n is a, c, g, or t
  misc_feature (69)..(69): n is a, c, g, or t
  misc_feature (81)..(81): n is a, c, g, or t
  misc_feature (211)..(211): n is a, c, g, or t
  misc_feature (219)..(219): n is a, c, g, or t
  misc_feature (238)..(238): n is a, c, g, or t
  misc_feature (280)..(280): n is a, c, g, or t
  misc_feature (282)..(282): n is a, c, g, or t
  misc_feature (287)..(287): n is a, c, g, or t
  misc_feature (290)..(290): n is a, c, g, or t
  misc_feature (298)..(298): n is a, c, g, or t
  misc_feature (344)..(344): n is a, c, g, or t
  misc_feature (357)..(359): n is a, c, g, or t
  misc_feature (362)..(363): n is a, c, g, or t
  misc_feature (367)..(367): n is a, c, g, or t
  misc_feature (376)..(376): n is a, c, g, or t
  misc_feature (383)..(383): n is a, c, g, or t
  misc_feature (414)..(414): n is a, c, g, or t
  misc_feature (453)..(453): n is a, c, g, or t
  misc_feature (458)..(458): n is a, c, g, or t
  misc_feature (477)..(477): n is a, c, g, or t
  misc_feature (691)..(691): n is a, c, g, or t
  misc_feature (697)..(697): n is a, c, g, or t
  misc_feature (699)..(699): n is a, c, g, or t
  misc_feature (769)..(769): n is a, c, g, or t
  misc_feature (773)..(773): n is a, c, g, or t
  misc_feature (839)..(839): n is a, c, g, or t
  misc_feature (873)..(873): n is a, c, g, or t
  misc_feature (876)..(876): n is a, c, g, or t
  misc_feature (947)..(947): n is a, c, g, or t
  misc_feature (1003)..(1003): n is a, c, g, or t
  misc_feature (1013)..(1013): n is a, c, g, or t
  misc_feature (1048)..(1048): n is a, c, g, or t
  misc_feature (1140)..(1140): n is a, c, g, or t
  misc_feature (1146)..(1146): n is a, c, g, or t
  misc_feature (1158)..(1158): n is a, c, g, or t
  misc_feature (1160)..(1160): n is a, c, g, or t
  misc_feature (1182)..(1182): n is a, c, g, or t
  misc_feature (1242)..(1242): n is a, c, g, or t
  misc_feature (1270)..(1270): n is a, c, g, or t
  misc_feature (1284)..(1285): n is a, c, g, or t
  misc_feature (1293)..(1293): n is a, c, g, or t
  misc_feature (1310)..(1310): n is a, c, g, or t
  misc_feature (1336)..(1336): n is a, c, g, or t
  misc_feature (1357)..(1357): n is a, c, g, or t
  misc_feature (1361)..(1361): n is a, c, g, or t
  misc_feature (1363)..(1364): n is a, c, g, or t
  misc_feature (1371)..(1371): n is a, c, g, or t
  misc_feature (1379)..(1379): n is a, c, g, or t
  misc_feature (1390)..(1390): n is a, c, g, or t
  misc_feature (1397)..(1397): n is a, c, g, or t
  misc_feature (1420)..(1421): n is a, c, g, or t
  misc_feature (1425)..(1425): n is a, c, g, or t
  misc_feature (1428)..(1428): n is a, c, g, or t
  misc_feature (1430)..(1430): n is a, c, g, or t
  misc_feature (1448)..(1449): n is a, c, g, or t
  misc_feature (1573)..(1573): n is a, c, g, or t
  misc_feature (1582)..(1584): n is a, c, g, or t
  misc_feature (1605)..(1605): n is a, c, g, or t
  misc_feature (1644)..(1644): n is a, c, g, or t
  misc_feature (1648)..(1648): n is a, c, g, or t
  misc_feature (1674)..(1674): n is a, c, g, or t
  misc_feature (1681)..(1681): n is a, c, g, or t
  misc_feature (1684)..(1684): n is a, c, g, or t
  misc_feature (1687)..(1687): n is a, c, g, or t
  misc_feature (1689)..(1689): n is a, c, g, or t
  misc_feature (1692)..(1693): n is a, c, g, or t
  misc_feature (1706)..(1707): n is a, c, g, or t
  misc_feature (1725)..(1725): n is a, c, g, or t
  misc_feature (1727)..(1730): n is a, c, g, or t
  misc_feature (1734)..(1734): n is a, c, g, or t
  misc_feature (1749)..(1749): n is a, c, g, or t
  misc_feature (1780)..(1780): n is a, c, g, or t
  misc_feature (1808)..(1808): n is a, c, g, or t
  misc_feature (1818)..(1822): n is a, c, g, or t
  misc_feature (1824)..(1835): n is a, c, g, or t
  misc_feature (1854)..(1854): n is a, c, g, or t
  misc_feature (1878)..(1878): n is a, c, g, or t
  misc_feature (1895)..(1896): n is a, c, g, or t
  misc_feature (1903)..(1903): n is a, c, g, or t
  misc_feature (1906)..(1907): n is a, c, g, or t
  misc_feature (1913)..(1915): n is a, c, g, or t
  misc_feature (1930)..(1939): n is a, c, g, or t
  Probeset Number=SeqID_13673
naggtgcgacacagtcatctacatcattgtgtgagtgccnccctctagacatgtgtcagtgtctgtagnttgcgtgcgtcntatatcatcaacggcgcgcaggcatcagcacatacagagatgggcacagcaatcactatggcagcgcaggtgcgctatcgatcacacggatgtgtatccgacagcgacacactgtgtgtagtcacacacnaataccgnggagtagaggtcgtcgtgnggtctggtacgtgcaattatctagtagtggtgtgtatctgcncncaaantcnacaacgantactagtgcacaatatcacgcgtcactctatcatatatggtctgtnttttttcgtatgnnnacnngganaaagaatcnaatatanacacagtaataccagcgtcgtctggcggcantcaacaccatacgcggtcgcataggtcgcacacacaacnacacngcgaccacagccgacgcgngacagccactgcacacacgcctgctattatcgtgcgtgagtgtgagcacacacacacaccgtgcgtgtaggtgtggtagtaacataatcaaccatacactacgacactacacagctagcgcacgatccacatacatccatcacacatcagcgccacgagtcgctcttcttactcatatacaccacacgagcctagatgttcatgtacgatatcntaccancnatgcatatcacgatatgcgccatgacatgtcaggagtatgtgtgatgattgatgagttagtagattatcnactngatggtgtttggtacattcataatatgagagacgagcacacatcatacgacgtcattagacgaganagcatctggatatatacttatacgctctagtagncanacagtatcatatagatagaggtgtatgctcgcgtgcatgcagtgtgtccctcgctcttactctgcgtcgtntgtctatacatcatctttatagatatggcgtatggcttgtttagtaactacgccancatactaganatcggcgactctcatctctcatctctcttctcgcngtctcttttatttatatactgtagacaaatgtatcccgcgtcctcaacatatgtggcgttcatccctatcacgccgcccacatcacttgtcnaatganatctctatccgntncgactcatatgtcaatatacanaatcgatacattagagtgtgtgagagaagggagtctgtagttttatctccatcacgctgnatgatctgttcttgcttctctctctctnttctgtcgcttgtnntggagacnccacaattccacctacnaggtgtgattgtactctacattctancgtcacacacatatcaacatnttcncnnaccaccncatattcnttccgatatantatctanctagatgtgtacttcatgctcgnngcgntcncnatccctgaaatcctaacnnccaccctcatattatctcacgcatctcctctatacatacactacgacatacgcatcatagtatacatctcgccgtgtgtatcatagagtaccagctgtgtcgttgggtatgtgtgggagtcggnacacagtannncgttaatgtgaatctgtgtcntctatccgtactctcttctctgcttctgacacgcatacnaccncaaacaatactacgtgtgtcacgtgntatatanttngtntngtnnaattcatacactnnatatatataacaaaatanannnnggtngagataagtgagcgnacacagcacccaaccacacccatgaagaaanccacccgcgcgaggggccgcgccgcgcnttctagccannnnncnnnnnnnnnnnnacacagtggagcggggggnggcacacaaccgcgccctctagancgtacgccgcgcccagnncagtatnggnnccgcgnnncgtccctaccacccnnnnnnnnnn

SEQ ID NO: 3895 - DNA, 2120 bp, Glycine max
  misc_feature (43)..(43): n is a, c, g, or t
  misc_feature (45)..(45): n is a, c, g, or t
  misc_feature (72)..(72): n is a, c, g, or t
  misc_feature (75)..(75): n is a, c, g, or t
  misc_feature (83)..(83): n is a, c, g, or t
  misc_feature (102)..(102): n is a, c, g, or t
  misc_feature (115)..(115): n is a, c, g, or t
  misc_feature (121)..(122): n is a, c, g, or t
  misc_feature (203)..(203): n is a, c, g, or t
  misc_feature (222)..(222): n is a, c, g, or t
  misc_feature (237)..(237): n is a, c, g, or t
  misc_feature (245)..(245): n is a, c, g, or t
  misc_feature (355)..(355): n is a, c, g, or t
  misc_feature (421)..(421): n is a, c, g, or t
  misc_feature (437)..(437): n is a, c, g, or t
  misc_feature (544)..(544): n is a, c, g, or t
  misc_feature (597)..(597): n is a, c, g, or t
  misc_feature (609)..(609): n is a, c, g, or t
  misc_feature (880)..(880): n is a, c, g, or t
  misc_feature (891)..(891): n is a, c, g, or t
  misc_feature (940)..(940): n is a, c, g, or t
  misc_feature (1036)..(1036): n is a, c, g, or t
  misc_feature (1044)..(1044): n is a, c, g, or t
  misc_feature (1097)..(1097): n is a, c, g, or t
  misc_feature (1130)..(1130): n is a, c, g, or t
  misc_feature (1238)..(1238): n is a, c, g, or t
  misc_feature (1331)..(1331): n is a, c, g, or t
  misc_feature (1335)..(1335): n is a, c, g, or t
  misc_feature (1375)..(1375): n is a, c, g, or t
  misc_feature (1377)..(1377): n is a, c, g, or t
  misc_feature (1417)..(1418): n is a, c, g, or t
  misc_feature (1431)..(1431): n is a, c, g, or t
  misc_feature (1499)..(1499): n is a, c, g, or t
  misc_feature (1501)..(1501): n is a, c, g, or t
  misc_feature (1506)..(1506): n is a, c, g, or t
  misc_feature (1523)..(1524): n is a, c, g, or t
  misc_feature (1543)..(1543): n is a, c, g, or t
  misc_feature (1546)..(1546): n is a, c, g, or t
  misc_feature (1558)..(1558): n is a, c, g, or t
  misc_feature (1576)..(1576): n is a, c, g, or t
  misc_feature (1618)..(1618): n is a, c, g, or t
  misc_feature (1633)..(1633): n is a, c, g, or t
  misc_feature (1635)..(1635): n is a, c, g, or t
  misc_feature (1690)..(1690): n is a, c, g, or t
  misc_feature (1700)..(1700): n is a, c, g, or t
  misc_feature (1706)..(1706): n is a, c, g, or t
  misc_feature (1709)..(1709): n is a, c, g, or t
  misc_feature (1714)..(1714): n is a, c, g, or t
  misc_feature (1731)..(1731): n is a, c, g, or t
  misc_feature (1734)..(1734): n is a, c, g, or t
  misc_feature (1742)..(1742): n is a, c, g, or t
  misc_feature (1744)..(1744): n is a, c, g, or t
  misc_feature (1751)..(1751): n is a, c, g, or t
  misc_feature (1769)..(1769): n is a, c, g, or t
  misc_feature (1772)..(1772): n is a, c, g, or t
  misc_feature (1775)..(1775): n is a, c, g, or t
  misc_feature (1777)..(1777): n is a, c, g, or t
  misc_feature (1780)..(1780): n is a, c, g, or t
  misc_feature (1800)..(1800): n is a, c, g, or t
  misc_feature (1824)..(1824): n is a, c, g, or t
  misc_feature (1826)..(1826): n is a, c, g, or t
  misc_feature (1852)..(1852): n is a, c, g, or t
  misc_feature (1856)..(1856): n is a, c, g, or t
  misc_feature (1864)..(1864): n is a, c, g, or t
  misc_feature (1873)..(1873): n is a, c, g, or t
  misc_feature (1899)..(1900): n is a, c, g, or t
  misc_feature (1908)..(1909): n is a, c, g, or t
  misc_feature (1920)..(1920): n is a, c, g, or t
  misc_feature (1926)..(1926): n is a, c, g, or t
  misc_feature (1932)..(1932): n is a, c, g, or t
  misc_feature (1938)..(1938): n is a, c, g, or t
  misc_feature (1952)..(1952): n is a, c, g, or t
  misc_feature (1961)..(1961): n is a, c, g, or t
  misc_feature (1974)..(1974): n is a, c, g, or t
  misc_feature (1976)..(1976): n is a, c, g, or t
  misc_feature (1979)..(1979): n is a, c, g, or t
  misc_feature (2004)..(2004): n is a, c, g, or t
  misc_feature (2032)..(2032): n is a, c, g, or t
  misc_feature (2047)..(2047): n is a, c, g, or t
  misc_feature (2057)..(2057): n is a, c, g, or t
  misc_feature (2082)..(2082): n is a, c, g, or t
  misc_feature (2098)..(2098): n is a, c, g, or t
  misc_feature (2111)..(2111): n is a, c, g, or t
  misc_feature (2116)..(2116): n is a, c, g, or t
  misc_feature (2120)..(2120): n is a, c, g, or t
  Peptide Sequence Number=SeqID_8086
  Probeset Number=SeqID_13674
gtgttttgttatttgtgttgtgtgtgatgggtatttatatatngncagcggtgtgaattacgtggagagcanaanctattgcntctcattctattcaagtcnccaccccgccggncgtgcnncccctgccttccccactttgtgcgcccctgaccacaccgcgtctggcgtcgggtggtggacgcgtgactagcacacacgancatcataattcgggggggncgctggtgattcgcncgccccantacatatcaaactcacccctcacattcggtggcgcctctacctatacgtttgtgtgtctgtgtgtaccactgaattcctaatcacaagcacacacgatagctatattgcnggtggctgcccgcgcgctgctcgtcatcggcatgcgcatgcaactcgtggtcggcgcccgttgaanccaatccgtggagagntgcacgcgaaaacagggagaggacaatataaagactgtaagaggtatatataaagaatggaaagagcgagagaagaagacagatacaacaatcgtatgtggagtttntattgctgggcgttatgtatctatgtaatatctgcggctgtatatgtgttgtntatcatcttctnatattacttctattgttatatgctgacgtatcgtggggttctgtataattcgttgttcgctgtggagataggcgtgtagcacgagcgcatcctctgaccgttgcgtgcggtgatcgacactatgattctatctgagagacagagtataacacatgtagcgaaacgctgatctcatctactgccgcatccgtgtatgatgttgtctctagtggtgtgtgcagggcatgcgtgagctctatacgcgacgtaatccatacacgacggcagatangtgaggtgacnagctagctgttttctactgctactagaacatagtatctgcaactcagtnctatctcacatgatatgagactacaagatcagaggacgatgataatacgctgtatctatcgcatccgtgatgctcgcgatagtcgtagctgtaccnagattacngagagcgatatcacacgctgtactggcgtgtaacatacacgcgcgtctgcgtnatatgtatatatcatatttgatgtatgagttantactcgcacatctagatctagtactctatcatgtgtggggatcgctatcgtgtgctgtgtatgatactatatatgagcgtgactccttctagtcagatcgtatatctncgatatcgaggtcggtgtgtgcatgagtagcttgacgtcgcgatctatctgtgactatatgtataggagcagtccacgtcatacgtatcgtantgcnctatccatcgtatgtctcttgtgattattcgtgctatcgngntcgacacatctcagcacgctcagtgctttacggtctcgtnnatataatgctatnctgtgctactgtgtacgtgtcgactactcgtcaaatctgatgatgtagacgatagatgcatatttatnantgtgntatacgatatgatcacnngatcagaagcgatgaattngtngacagcgactgntgatgactgactcgagantctacgtggctgtgcgacttatacatattactgcagctctantgatgctgatgttgntnatcgatgactaattcgtagcactggtcgcgatgtagtgtataatactactgatcntcgacgatgnatgctnagncgctntacctcatgtctcgctnagntatcctgnantacgatnatcgcgatcgcagctacnaanganantantcgagatgcagcaacgttgntagtgcgtcatcgaactgacgcancngcgatgacacgactagtgacgtcatncgcngagtcaantctacacanctaaatagtcatcgatcgttcctacnncacgactnnatcgacgtcgntgatcntgctantactantcatcatgcagganaagtacaantcgcgacacggtnantcnacggaatgacgacgaacatagtagnagtcgattattgtatcggatgaacgttngtaacgattacgatncagaacgatnagttgtagagtgatctcgagtaaantgcatacagaatcagngtagtacgaaaancctgncgcn

SEQ ID NO: 3896 - DNA, 492 bp, Glycine max
  misc_feature (382)..(382): n is a, c, g, or t
  misc_feature (451)..(451): n is a, c, g, or t
  misc_feature (485)..(485): n is a, c, g, or t
  Probeset Number=SeqID_13675
ttttttttttttttttttgcaaataataaatagatttatttcttttttttttacaggtaaaaaacacagaattatttacatcattttttacaaaatttttacagcttttaaagcatctttttttatttaaaaaaaaatctaggacgatgattttttacaaaatgaaaggttatgtcttgcttttgacaattaatgtattctaatatttactacttacaaaattatattctattaatttattatcctaaatattttctacaatttcatttatatctttatttacatcttgatccaattgatcttcatcggcagtcattgaatagtttactagcggccttggttgatcaattagttgatttgttgatggattcaatgacattgngttttgactttgatatgtattctgatctaaatgtgatgattgctgttgctgttgttgctgatcgtttancatagcaaatatatttgatctattaaatggttgngcaaatt

SEQ ID NO: 3897 - DNA, 404 bp, Glycine max
  misc_feature (177)..(177): n is a, c, g, or t
  misc_feature (257)..(257): n is a, c, g, or t
  misc_feature (297)..(297): n is a, c, g, or t
  misc_feature (347)..(347): n is a, c, g, or t
  Peptide Sequence Number=SeqID_8087
  Probeset Number=SeqID_13676
tgtgagatgtgaggtgatagagtaatgtaagaaggtgggttgattgtgtagattataagagaaggtagagttgtagatagggagaagtaagaggagagaaagaggtgggaatgtttcatgagtgaggagtactttgattatgttagcgtgattatgtctggggcttttgctcgccanttggatgacggacggttatggcccgagattggagaggaaagagaagagagaaggcctttgagaggagagtatacaccttncagcccaaggggtacgagcggagcgataaggaattcatgntgggaggaaacgggaagagacgccccaattacgccaggccccgccttctncccccgcgcgttggcggattccactaattgcagctggccccggacaaggttttttcg

SEQ ID NO: 3898 - DNA, 1393 bp, Glycine max
  misc_feature (1)..(1): n is a, c, g, or t
  misc_feature (230)..(230): n is a, c, g, or t
  misc_feature (1078)..(1078): n is a, c, g, or t
  misc_feature (1342)..(1342): n is a, c, g, or t
  misc_feature (1345)..(1345): n is a, c, g, or t
  misc_feature (1372)..(1372): n is a, c, g, or t
  misc_feature (1377)..(1377): n is a, c, g, or t
  Probeset Number=SeqID_13677
nacgcgcagtaggacgagtagaaagtcagagaataatcccgcggacatcaccgagcgcagccagacagaacgcgccatataataagaccccgtccgcaccgcccacagcaatgcaagcgcgcgaagagaagcgaccgaaacgacagcgagcagaggaatcacaagcaaagaagagggaggagagggagaggcggggaggggcggggaaagaagaggagggcgagaggaanaagagaacggagggaaaggagtagagtgaaggggagaagcgggagggaggcaacaatggcagggaagctgcaggcgtgggtagaactggcgggtgaggaaagagggaggggaggagagaagaaggagagagaagagggagggaggcacaagtatacgggcgctcggtgaccgccgcccaggccgagcgggcgcgaggcagatcagtgggaggcaggaggacagacgttcccaggaacatacgatactcggagatagaccaaaaggcccgcaggagtccgcggcacggccaaagccgacaaacaaaacaccaagaggcacgagggagagcgaggagccaggcggcacgagcgccgccccccgccgggaaatctcgacccggatactaccacacgagacgtcccacgggggcggagaggagaaatggacaccaaaagagcgcccagcgaacgaagaaggagagaacggacgcgaccagacacaaaaaaacgcgcggatatatggcggagaggggagaggacagcagagtggagccaaacaacccctacaagcgccgagggagcactaccacacgcgacgcaccgcacacaaggcgacaccacgcaccgaaagagaggggcacgacagccggagaaaaaacagaagaggagagggaaggagaggagaagcgaggaaaagaggttgggcgggcggccgagggcgcggcgggggcgggcagggagagacgcaacagccacggggcggtgccgcccggcaggcgcgccgccgccgggcgcccctcccggccacacgcgccgccgcccccacctcccccccccccccacgcacccaatacggcgcgcacaaccgnaacgaggcgtcaccgcagggggaggaggacaaggtgggatcaggaccttcagaccagcggggggtcgccaaaggggcacaagaagcgaggggcgggggcggagccggccacgcggccgcgccggctgcccgcacgggccgcgcggcggaaaaaaaaaaaaaaaacaaaacaaaaaaaacaaccaacaaagcaaaaaagaacaaagaaagaagagcgaagcgcgccacgccaacccccgaagaacccacccaaatctatacatanacnacggggcggggagaggggggggggggnggggnggggggtggtgttgtt

SEQ ID NO: 3899 - DNA, 1572 bp, Glycine max
  misc_feature (11)..(14): n is a, c, g, or t
  misc_feature (17)..(22): n is a, c, g, or t
  misc_feature (25)..(38): n is a, c, g, or t
  misc_feature (47)..(47): n is a, c, g, or t
  misc_feature (97)..(98): n is a, c, g, or t
  misc_feature (101)..(101): n is a, c, g, or t
  misc_feature (109)..(109): n is a, c, g, or t
  misc_feature (258)..(258): n is a, c, g, or t
  misc_feature (418)..(418): n is a, c, g, or t
  misc_feature (487)..(487): n is a, c, g, or t
  misc_feature (504)..(504): n is a, c, g, or t
  misc_feature (957)..(957): n is a, c, g, or t
  misc_feature (1212)..(1212): n is a, c, g, or t
  misc_feature (1274)..(1274): n is a, c, g, or t
  misc_feature (1348)..(1348): n is a, c, g, or t
  misc_feature (1419)..(1419): n is a, c, g, or t
  misc_feature (1460)..(1460): n is a, c, g, or t
  misc_feature (1503)..(1503): n is a, c, g, or t
  misc_feature (1516)..(1516): n is a, c, g, or t
  misc_feature (1539)..(1539): n is a, c, g, or t
  misc_feature (1572)..(1572): n is a, c, g, or t
  Peptide Sequence Number=SeqID_8088
  Probeset Number=SeqID_13678
gggggggtttnnnnggnnnnnnttnnnnnnnnnnnnnnttatttaanttattgttgttgttgatattgtgttttgcacccccaaaccccaccctaanntanccccaccngccaataacgcaccctcgctaattaaaatgatatatagaaatatatgattaagggcgaagatagaaaaacacacacaagatcgtaaataagatgatataagagtatgagaacagaaacaactgaaagacccagaatttggattaacgcnagcggtgcatgtgtgacgataggctatacacgtccgctacttgctgtgagatatcaaatgcggtaattggtaatatatctgtagaatgcgtgacacagatcgctgtgacaacaatacacggtagaagcgcacagtccaactccacgacactcacggagangtaccatgaacatgtacaatcatgctaaaatacaaagcaaaacactacaaacacatccgcgcgcactcngcgattcacctcgttgnttctgctccctagtgtcaccgcgccgcttaagcatcactgctcacgccccccctgacacccctccccctaccctctcgttactcacccttatatcactcgctccgccgccccaactccaataccatatcacaaactcccgttcactccctttttgttcttttcatccatacctataagtctacgtaattaagtaatttcgagcgaacatccggttgtcggggtacgacctgcgctcaagtatcttatgtatgcccactcttatcgtgtattatataatacgatgataaagcagatgcgacgtcctacactatctatcgtgagtttttttgagtgactagaagcgttcgtgttggggtctatgcgcagacgtgtgcgtcgtgtagctgtagatagtcacctaggtagtatataagatagataaatagtacggtgaaccaacatatataataaancaacctaccaacaacatacaacaaaaccacaacacacccacatacaccacacacatagacactatctacactctcttagtatacttactatgtcaccttcaattgtgaagcaccgccgccgctcctaccacacgatactactctcatcccactcacttattcctctctccatcgcatctattcataatatactatcccgccactctatattgagagtatactatcaaacacactgtgtcacgtcatacaccatangatgctctaatctaatgacacactcgacacatcctcctccacacagatgaccacgcctatgncgcatacaccggcacacacacagccacacaggcaagtgcacaaagacacggtcagtagtgtgactcaatgatanctcccgtctcatatacctagtgacactcccgctctctctccaccactccccgtcgcctcacactccgcgtncatatatgatatcaacacaattagagagagtacatgtctancatgataataacattactatctctgcctgtccagtatcatatntcctacactcgtntcactatcgtacactacacaatnccacatatatatatgatcacatctcacacaacn

SEQ ID NO: 3900 - DNA, 1591 bp, Glycine max
  misc_feature (34)..(34): n is a, c, g, or t
  misc_feature (103)..(103): n is a, c, g, or t
  misc_feature (117)..(117): n is a, c, g, or t
  misc_feature (122)..(122): n is a, c, g, or t
  misc_feature (285)..(285): n is a, c, g, or t
  misc_feature (404)..(404): n is a, c, g, or t
  misc_feature (449)..(449): n is a, c, g, or t
  misc_feature (475)..(475): n is a, c, g, or t
  misc_feature (704)..(704): n is a, c, g, or t
  misc_feature (946)..(946): n is a, c, g, or t
  misc_feature (948)..(948): n is a, c, g, or t
  misc_feature (1076)..(1076): n is a, c, g, or t
  misc_feature (1113)..(1113): n is a, c, g, or t
  misc_feature (1118)..(1118): n is a, c, g, or t
  misc_feature (1158)..(1158): n is a, c, g, or t
  misc_feature (1358)..(1359): n is a, c, g, or t
  misc_feature (1436)..(1438): n is a, c, g, or t
  misc_feature (1481)..(1481): n is a, c, g, or t
  misc_feature (1483)..(1485): n is a, c, g, or t
  misc_feature (1487)..(1489): n is a, c, g, or t
  misc_feature (1526)..(1528): n is a, c, g, or t
  misc_feature (1531)..(1533): n is a, c, g, or t
  misc_feature (1536)..(1537): n is a, c, g, or t
  misc_feature (1539)..(1539): n is a, c, g, or t
  misc_feature (1558)..(1558): n is a, c, g, or t
  misc_feature (1575)..(1576): n is a, c, g, or t
  Probeset Number=SeqID_13679
ctcgtgtcttcttgtctctttctcatcagctcgntggtctccgccttcgcgctacagacagcatgacatatcttctcctccgcgatcatcataatatgatgtnatatatttactcanagtgngagtggatacggataatgagacggagaagtgcacggacatgtgagagaagaacagcgcgcatcatggagagtgcgcgggcgtgagcgcacatagagtcgatgcgaggagtggtcaggaggtgatggggagtatgtgtggtggagtagcggtgtagattgtagngtggattagtatgttctattcgtgttattatgtgatcgaggtgtaggatgttcgatagcgtggcagttgtatagtacttgtatatacaagtagacatctaagtgattaacactcccgcnccgatcatcatgcgcatatatagagatgttagacaggagatgagntagttgtgatataaaccatacaagtnatccgctatgacacagaccgcgcgcagcattattagtagatatagattcatcagaaggcgataagaaggtaaggtagatgtcaccaccgtcatgttaccaccacatccacccacacaacagcgcgttacgaaatatatttatagaagtgtgcaggaggttgaaatatagattagtattgaggcgactggcgcgcagcgcggcgaggcgcgctcgatcggttggatctgntggtgagtaggcgaagagaaacatgagtgaagcggcgcgaataagtcatacgaggagaaaggacggcatagactcatagtcagggtcggaaaacaggtgtggatgttgagggtcgagttgatatacaatcgtggtgcgatgtgcaacagttatagtatatagtgtctattaggtgcggcgaaaaatatacacctgccacagcaaaaagaccacaagcaggaagacaacagcaggaacacacncnatcacaccaccacctacccaccccacaccaggcgaagaaacgggcagctcacacgtagagtatacgtggggcggaacgagcgtatcgcgcgagggatgaggtgcgcgtgtcagtgcgtgctggccagntgtggacgggggtcgtgagcggggaagtgagtgtcgnagctngtcctccacataccctctcggccctcctcctcccgtcttnctctatcgtcgctgcctcgttggcccgcacgctgtctatgtggcggtgtgcgtagtacgcgaacgcatcattacaatatatgagtggggtatcgcgtataccccaatcaccacttcgctcgttctcgcgcctctctccacccttcctctcctttcccccatattccttgggcgcataagcgacagaggaaggagagatanntggtcctcagccgcggagggacagccagaaaattacgcgagagaaaatcaagataagaacgttataagaaataacannntagtataattgtatgaaaaacaatataaaataaaaaaaaactncnnngnnnaaaaaaaataaaaaaaaaaaaaaataaaagaaaaaannnaannnaannantaaaaagaaaagatttttntattttattatatattnnatttataattttttt

SEQ ID NO: 3901 - DNA, 291 bp, Glycine max
  Peptide Sequence Number=SeqID_8089
  Probeset Number=SeqID_13680
catctggtaaagaaactggaagcgacagcttgtcccacacagtggatagctcacatttagacaatattacaacaacatatctgaccagttattctggagcaggcagtaatctgataacagtgatctctggtggtaacttacaggaactagcgcaaatacttcgtctgaatcaaaccaagctcaaaatgacagaaggattagagcagagtggcaatagagtctctgaagaaaacctgcctggttctaactcaacagtccctgttgaaacagaaaaggaagatgcagctgcag

SEQ ID NO: 3902 - DNA, 1604 bp, Glycine max
  misc_feature (73)..(73): n is a, c, g, or t
  misc_feature (78)..(78): n is a, c, g, or t
  misc_feature (80)..(80): n is a, c, g, or t
  misc_feature (243)..(243): n is a, c, g, or t
  misc_feature (249)..(249): n is a, c, g, or t
  misc_feature (253)..(253): n is a, c, g, or t
  misc_feature (359)..(359): n is a, c, g, or t
  misc_feature (389)..(389): n is a, c, g, or t
  misc_feature (655)..(655): n is a, c, g, or t
  misc_feature (677)..(677): n is a, c, g, or t
  misc_feature (878)..(878): n is a, c, g, or t
  misc_feature (962)..(962): n is a, c, g, or t
  misc_feature (964)..(964): n is a, c, g, or t
  misc_feature (981)..(981): n is a, c, g, or t
  misc_feature (1092)..(1092): n is a, c, g, or t
  misc_feature (1178)..(1178): n is a, c, g, or t
  misc_feature (1317)..(1317): n is a, c, g, or t
  misc_feature (1439)..(1439): n is a, c, g, or t
  misc_feature (1550)..(1550): n is a, c, g, or t
  Probeset Number=SeqID_13681
tgtagagatacaggaggtacaagagaagtgcggagtcgtgtaagactgcaccgcgttatatatagagatggtnagtgngngtaagactgcagacgtgcctcgtgtcaatgatagtatcacaccgaatgagcagcagtattatcgcgcgtcgttatctagtacatggcagataaggcacaatgtaagacctgaacctcaagcagatctcaccgtacacgatgagtagtgatcagaaagtgagtngtagtntganaatgtccgcagataagataatcctagagagacgcctgtgaagagatcggagtctcaatagacgttgtgagtgcgatgagtagatgtagagtgagtataagcgtcantacaggcaaggaagtgatgctctatggaancacggtcatagtcagccacgcagtgagagatggctggcagaaggtcgagggagggcgcgtgaggtcgtgcgcagtcagatagaagcgatgaagagcggaggaagtgggtcgtggggttgtggggaggagagtgtagagagctgtgatggcatgagatcgactggactcgcgtgagcagacacagtcgcgtagaagagacgcgaggtttgtatcgtagtatatcgcattacacgctgcacagcgctagatagtcgactggttagcantgtagtgcggtgcggggcgtgntaggtagggtcagaatatacatccaatagtatgttgatataatggtgatatatgtgttttgattgtaattatcttatctaatctatctataactcatatagatatcctactattactcagtcgctgtaatcacggcctggagtagcattatgcgtactggcgatagaaatgctacatacgacagaccagcgaacgaacgcnggcagagacgtcgcagacgacgcaggacacgagcagagagcaggtaggcgcggtgagcggatatgcaggacggagcgcgagagntnggggggagcgcaggctngcgcgcaggcgcgaagagaaaagtacaaagtgattggacagtgggcgataagagcgacgtcaaagaacagaagaagtacaacgaagaatgaatacgaagatgcacgtatantagtatacaggatataaagtgcaacaagaaagtatatctccatacatatatattgcatttatatattattctttaataatgtttgntatgtgtagatagttaatgctattctataattactgatcttgcatcagtccatagcctctctgttgtattttgtattgactcatgtgctgtagatcatcataatacatatatattatagcgcatatatgtctatatatngaatagtaccttaagttaattaggggagaagggtaagtagtgagtaactgtggtggtcttctatcaattaattatatttgtatatattatgtatagtgtggtgtggggatcgtatactactntttccttgcgtattggtgataggtgtgagagagcagcagacttgcgaagcgaatagtgggatgcgatagtcgtggtctttcgacgaggtgtgtggttgtgtggtggtgtgntggtgagagtgtgatcaacaaatacaaaaccccagaagcacatatactatccac

SEQ ID NO: 3903 - DNA, 1550 bp, Glycine max
  misc_feature (1)..(1): n is a, c, g, or t
  misc_feature (13)..(13): n is a, c, g, or t
  misc_feature (21)..(21): n is a, c, g, or t
  misc_feature (68)..(68): n is a, c, g, or t
  misc_feature (83)..(83): n is a, c, g, or t
  misc_feature (137)..(137): n is a, c, g, or t
  misc_feature (186)..(186): n is a, c, g, or t
  misc_feature (196)..(196): n is a, c, g, or t
  misc_feature (266)..(266): n is a, c, g, or t
  misc_feature (271)..(271): n is a, c, g, or t
  misc_feature (339)..(339): n is a, c, g, or t
  misc_feature (363)..(363): n is a, c, g, or t
  misc_feature (540)..(540): n is a, c, g, or t
  misc_feature (545)..(545): n is a, c, g, or t
  misc_feature (557)..(557): n is a, c, g, or t
  misc_feature (584)..(584): n is a, c, g, or t
  misc_feature (602)..(602): n is a, c, g, or t
  misc_feature (706)..(706): n is a, c, g, or t
  misc_feature (709)..(709): n is a, c, g, or t
  misc_feature (820)..(820): n is a, c, g, or t
  misc_feature (1124)..(1124): n is a, c, g, or t
  Peptide Sequence Number=SeqID_8090
  Probeset Number=SeqID_13682
nagtgtgtgaggntggatgangagtactactatgcggcagatcgcattgtgactgtatagtctggacnatatgtgtgagacgntgttcattgtgtgaagggaaagagatgaataatgtagtctagtatgatgacgcncgtcgtttgtgtgatgtatcagtggcgaccgttatctttccgtgtggcngtgtagctgntatatgcgatgagttgggtcgcgcgagaatgatctctcagacgtgtagtatcctcgcgtattagagtggngtcanttatggaggaggagatactcgtcacacgatgtgtcgtcgtcgacgtgatctggtttcatctgcagttntattgattgtgcgcgacgagattntatggcgcgcacacccggcgtctgtgttgtacctctgattattgagtcactcgtgggtaggggtgtgggatgggcagatgagtgtatgtattgcgccactctgtataggtggtgtcacaatagattgtgtgtgtgtagtgtttatctctgttgcccgtagcctactgcgccgcgganggggngttgcagttatntatattcgcgccctatctcttgactancatctcctgtcgtggaanagaggagcctctgcgcgtgtaggttggcagagaagtatgtggtgagtgtggtgcgtgccgtacgatggtgcggcgagttgtgtgggcgctcattgtgattttanacntatatcatacgacatctatcagaataatataattgagccgcagtcgcggcagcgcagcgagagtatttgatcccagattttcgtatttatgtgttgagttaacagtcgtancggtgtgttcggtggaggcgttgtatattatatatatataccaagaagttgatgtgaagcagcgtttagttggtgcggtgttgtgtcaggccgccgttggttattgacggtaagaggagggtagagtgaggaggctcttgtttttgtgtgtgcttcttattacgccgcgggtttagggggaagttgtagggcgtggggtctgaataaattccggttgtgtgtgtattatggaaagagtattatgtctagatgaggtgtagtctatttgttctctgcgactctggttgaaggtgaatggtgccgngtggagggttgtctcacgggtgttgggagataggttttcggtttttaggttggagaaggatggattggcgctccgatcgtgtgttgggtttgcggcgtcaccagatttaatgttaaggtgaatggaggcaaataacagagagggaagtgatggccgcgcggtggattcggatagtaacaaggtaatacagttgagtttgttattcctaataagttatagctagtattatataatggtaggtgccccaagatggtgcaaccgaccccataatgaaaaagtagtctgctgtgtggatattttgtggtgtgggtgggtgtgggcggggtgggggggccctccctggtaatatgattggtgttttgggggtggtggtagggaagcagttgttatagatgagtattatgtgttttgttctttattagggga

SEQ ID NO: 3904 - DNA, 392 bp, Glycine max
  misc_feature (5)..(5): n is a, c, g, or t
  misc_feature (13)..(16): n is a, c, g, or t
  misc_feature (18)..(24): n is a, c, g, or t
  misc_feature (31)..(36): n is a, c, g, or t
  misc_feature (38)..(38): n is a, c, g, or t
  misc_feature (42)..(48): n is a, c, g, or t
  misc_feature (76)..(78): n is a, c, g, or t
  misc_feature (169)..(171): n is a, c, g, or t
  misc_feature (200)..(202): n is a, c, g, or t
  misc_feature (251)..(254): n is a, c, g, or t
  misc_feature (269)..(270): n is a, c, g, or t
  misc_feature (290)..(292): n is a, c, g, or t
  misc_feature (310)..(313): n is a, c, g, or t
  misc_feature (328)..(334): n is a, c, g, or t
  misc_feature (337)..(340): n is a, c, g, or t
  misc_feature (343)..(343): n is a, c, g, or t
  misc_feature (346)..(351): n is a, c, g, or t
  misc_feature (355)..(357): n is a, c, g, or t
  misc_feature (366)..(369): n is a, c, g, or t
  misc_feature (372)..(376): n is a, c, g, or t
  misc_feature (383)..(390): n is a, c, g, or t
  Probeset Number=SeqID_13683
atcgnctacttcnnnntnnnnnnnctgctcnnnnnngntgcnnnnnnngattatagagaaatgcagagattgagannncagctactggctaggcctctcttggaggagagcaggctgcgagggtattgcacgagctcctcatccgaaaagatggtagcttcggtgcttnnngagagactgcgcgttgtgataccaaaacnnnatcctactgtttacgcctttcaggagttcaagttcaattggcaacagcnnnntcgccgtagataccnngatgagttcttggacattgnnnagaacagagccaagggannnnatcaaatggactatnnnnnnntcnnnntantcnnnnnngagnnnagagtcttnnnnacnnnnntggcttnnnnnnnnag

SEQ ID NO: 3905 - DNA, 2482 bp, Glycine max
  misc_feature (18)..(19): n is a, c, g, or t
  misc_feature (21)..(21): n is a, c, g, or t
  misc_feature (24)..(26): n is a, c, g, or t
  misc_feature (28)..(30): n is a, c, g, or t
  misc_feature (36)..(37): n is a, c, g, or t
  misc_feature (39)..(39): n is a, c, g, or t
  misc_feature (41)..(45): n is a, c, g, or t
  misc_feature (47)..(50): n is a, c, g, or t
  misc_feature (52)..(52): n is a, c, g, or t
  misc_feature (54)..(59): n is a, c, g, or t
  misc_feature (61)..(66): n is a, c, g, or t
  misc_feature (77)..(77): n is a, c, g, or t
  misc_feature (84)..(86): n is a, c, g, or t
  misc_feature (91)..(91): n is a, c, g, or t
  misc_feature (104)..(104): n is a, c, g, or t
  misc_feature (132)..(133): n is a, c, g, or t
  misc_feature (137)..(138): n is a, c, g, or t
  misc_feature (181)..(181): n is a, c, g, or t
  misc_feature (187)..(187): n is a, c, g, or t
  misc_feature (189)..(190): n is a, c, g, or t
  misc_feature (195)..(196): n is a, c, g, or t
  misc_feature (199)..(200): n is a, c, g, or t
  misc_feature (202)..(202): n is a, c, g, or t
  misc_feature (219)..(219): n is a, c, g, or t
  misc_feature (245)..(246): n is a, c, g, or t
  misc_feature (256)..(256): n is a, c, g, or t
  misc_feature (258)..(258): n is a, c, g, or t
  misc_feature (262)..(263): n is a, c, g, or t
  misc_feature (266)..(266): n is a, c, g, or t
  misc_feature (280)..(280): n is a, c, g, or t
  misc_feature (283)..(283): n is a, c, g, or t
  misc_feature (286)..(286): n is a, c, g, or t
  misc_feature (289)..(289): n is a, c, g, or t
  misc_feature (293)..(293): n is a, c, g, or t
  misc_feature (295)..(295): n is a, c, g, or t
  misc_feature (303)..(303): n is a, c, g, or t
  misc_feature (312)..(312): n is a, c, g, or t
  misc_feature (314)..(316): n is a, c, g, or t
  misc_feature (331)..(332): n is a, c, g, or t
  misc_feature (335)..(335): n is a, c, g, or t
  misc_feature (387)..(387): n is a, c, g, or t
  misc_feature (409)..(409): n is a, c, g, or t
  misc_feature (479)..(479): n is a, c, g, or t
  misc_feature (491)..(491): n is a, c, g, or t
  misc_feature (493)..(493): n is a, c, g, or t
  misc_feature (495)..(495): n is a, c, g, or t
  misc_feature (504)..(504): n is a, c, g, or t
  misc_feature (509)..(510): n is a, c, g, or t
  misc_feature (543)..(543): n is a, c, g, or t
  misc_feature (555)..(555): n is a, c, g, or t
  misc_feature (567)..(567): n is a, c, g, or t
  misc_feature (572)..(572): n is a, c, g, or t
  misc_feature (593)..(593): n is a, c, g, or t
  misc_feature (612)..(613): n is a, c, g, or t
  misc_feature (620)..(620): n is a, c, g, or t
  misc_feature (624)..(625): n is a, c, g, or t
  misc_feature (630)..(630): n is a, c, g, or t
  misc_feature (681)..(681): n is a, c, g, or t
  misc_feature (696)..(696): n is a, c, g, or t
  misc_feature (698)..(698): n is a, c, g, or t
  misc_feature (711)..(711): n is a, c, g, or t
  misc_feature (716)..(716): n is a, c, g, or t
  misc_feature (722)..(722): n is a, c, g, or t
  misc_feature (753)..(753): n is a, c, g, or t
  misc_feature (807)..(807): n is a, c, g, or t
  misc_feature (815)..(815): n is a, c, g, or t
  misc_feature (855)..(855): n is a, c, g, or t
  misc_feature (863)..(863): n is a, c, g, or t
  misc_feature (904)..(904): n is a, c, g, or t
  misc_feature (922)..(922): n is a, c, g, or t
  misc_feature (986)..(986): n is a, c, g, or t
  misc_feature (1024)..(1024): n is a, c, g, or t
  misc_feature (1058)..(1058): n is a, c, g, or t
  misc_feature (1091)..(1091): n is a, c, g, or t
  misc_feature (1118)..(1118): n is a, c, g, or t
  misc_feature (1174)..(1174): n is a, c, g, or t
  misc_feature (1197)..(1200): n is a, c, g, or t
  misc_feature (1202)..(1203): n is a, c, g, or t
  misc_feature (1206)..(1206): n is a, c, g, or t
  misc_feature (1219)..(1219): n is a, c, g, or t
  misc_feature (1240)..(1240): n is a, c, g, or t
  misc_feature (1246)..(1246): n is a, c, g, or t
  misc_feature (1271)..(1271): n is a, c, g, or t
  misc_feature (1279)..(1279): n is a, c, g, or t
  misc_feature (1323)..(1323): n is a, c, g, or t
  misc_feature (1346)..(1346): n is a, c, g, or t
  misc_feature (1358)..(1359): n is a, c, g, or t
  misc_feature (1382)..(1382): n is a, c, g, or t
  misc_feature (1391)..(1391): n is a, c, g, or t
  misc_feature (1394)..(1394): n is a, c, g, or t
  misc_feature (1396)..(1396): n is a, c, g, or t
  misc_feature (1431)..(1432): n is a, c, g, or t
  misc_feature (1436)..(1436): n is a, c, g, or t
  misc_feature (1448)..(1448): n is a, c, g, or t
  misc_feature (1466)..(1466): n is a, c, g, or t
  misc_feature (1501)..(1501): n is a, c, g, or t
  misc_feature (1519)..(1519): n is a, c, g, or t
  misc_feature (1522)..(1522): n is a, c, g, or t
  misc_feature (1532)..(1532): n is a, c, g, or t
  misc_feature (1536)..(1536): n is a, c, g, or t
  misc_feature (1556)..(1556): n is a, c, g, or t
  misc_feature (1571)..(1571): n is a, c, g, or t
  misc_feature (1578)..(1578): n is a, c, g, or t
  misc_feature (1581)..(1581): n is a, c, g, or t
  misc_feature (1610)..(1610): n is a, c, g, or t
  misc_feature (1635)..(1635): n is a, c, g, or t
  misc_feature (1643)..(1643): n is a, c, g, or t
  misc_feature (1678)..(1678): n is a, c, g, or t
  misc_feature (1685)..(1685): n is a, c, g, or t
  misc_feature (1692)..(1692): n is a, c, g, or t
  misc_feature (1726)..(1726): n is a, c, g, or t
  misc_feature (1764)..(1764): n is a, c, g, or t
  misc_feature (1791)..(1791): n is a, c, g, or t
  misc_feature (1796)..(1796): n is a, c, g, or t
  misc_feature (1815)..(1815): n is a, c, g, or t
  misc_feature (1842)..(1842): n is a, c, g, or t
  misc_feature (1860)..(1860): n is a, c, g, or t
  misc_feature (1864)..(1864): n is a, c, g, or t
  misc_feature (1886)..(1886): n is a, c, g, or t
  misc_feature (1892)..(1892): n is a, c, g, or t
  misc_feature (1896)..(1896): n is a, c, g, or t
  misc_feature (1909)..(1909): n is a, c, g, or t
  misc_feature (1911)..(1911): n is a, c, g, or t
  misc_feature (1943)..(1943): n is a, c, g, or t
  misc_feature (1946)..(1946): n is a, c, g, or t
  misc_feature (1948)..(1948): n is a, c, g, or t
  misc_feature (1953)..(1953): n is a, c, g, or t
  misc_feature (1962)..(1962): n is a, c, g, or t
  misc_feature (1979)..(1979): n is a, c, g, or t
  misc_feature (1984)..(1984): n is a, c, g, or t
  misc_feature (2025)..(2025): n is a, c, g, or t
  misc_feature (2036)..(2036): n is a, c, g, or t
  misc_feature (2040)..(2040): n is a, c, g, or t
  misc_feature (2045)..(2045): n is a, c, g, or t
  misc_feature (2053)..(2053): n is a, c, g, or t
  misc_feature (2057)..(2057): n is a, c, g, or t
  misc_feature (2059)..(2059): n is a, c, g, or t
  misc_feature (2065)..(2065): n is a, c, g, or t
  misc_feature (2077)..(2077): n is a, c, g, or t
  misc_feature (2121)..(2121): n is a, c, g, or t
  misc_feature (2123)..(2123): n is a, c, g, or t
  misc_feature (2274)..(2274): n is a, c, g, or t
  misc_feature (2310)..(2310): n is a, c, g, or t
  misc_feature (2363)..(2363): n is a, c, g, or t
  misc_feature (2406)..(2406): n is a, c, g, or t
  misc_feature (2409)..(2409): n is a, c, g, or t
  misc_feature (2430)..(2430): n is a, c, g, or t
  misc_feature (2481)..(2481): n is a, c, g, or t
  Peptide Sequence Number=SeqID_8091
  Probeset Number=SeqID_13684
gggggggggggcccgtgnntngtnnncnnntggggnngncnnnnncnnnntntnnnnnntnnnnnngtcttccttgncctcccnnntcccntgctctctccccnctctgtgctcgctctgtcgcgtgctctnngcgnncgctctctcctctctctgttgctcgctgtctctcgtcccacancacacncnncggcnncannanctcgcgcgaccacgtgnggcgcacaagcccatcggcgtctacnntgtacatacnanactnnttntttttcatctgtantantcnccncgcnangttcttcntctgcctcncnnngattaactacttatnntgncatactctgtgattactcatagatgtatatgttacaatcgtagtctagtcgnctacggattatacagagatctngtctctatcgacacactcgtccgtctcatactatctctcgtcatctctctcacttcgaacgcgacgagtnggtctatcactncncngacataganatgcnnttcgtcattatgtaatcatgatactttgactgngctatgtgctgngtcgattccatngatgntacgccgatgtgttcacgggntgtgtgtgtgtctttcctnntgtctancctnnccgtntcacgcgtcttccttgctctctccacaccttctatgctcatctcacgcttnttgctcgcgcacatntnctactcgctcgcnattcntgtatnactctgtgtctctcgtcatacgtttcactanttctctttctctctcttttgctcagcatcgtacgacgacgacgactcatcacgngacgtatntatatttatatatgattaaataatataaataatatcttcntcactgtntatctatcaatataaacactacacatcgctcactatacaantatatgcatgcatgatangagctgatgtgtgcgtcatctagtgtgagtgagctacagaacatgacagctgacgtaggcgtgntcactactcattgctatcacgcgactgatatatcctgngacagctgatagactaacgatcactatgcaactnaacgacactctcgtgatcgcacgcctactcgcnatcacacgactacgcacaccgcgccgncagccactcgtcgcgtgatgcgcagcgacattgcatctctattaagtctactggancgtcattgaacgtaaccaacacnnnncnncanctctcgcacacangcatgcgacgacacatgaatnctaccncttcactaatcaatacgagcgaagnatacgatncgaacagacgacacatcattactcaactatatctatccgccacntactactaactccgtcagctcgnctacatcgatannactttgtagtatgcacatcaccntacacacanccnantccagtcgacgatagatgatcagtatgcagatatnnaatngtatcctgctgntgtgcagtcatggtcatntgatgtctgagatctagcatgatacaccaaactcngacaactcatgagagtantanatatgatgcntagnacgcgtagagcaagacgcancgccgccacctacanccactcncancgatgctagtagtaggctgtcgtgctagnatcgttatccgctcgctactcccangcatgtgncgcactccacgagcgtacgacgcgaccgtcgccancgcacgnctgtcgncggctgacagactagacgacctaagtacccgaangagtgcgctgcgtcatagctactgactatcatcatctncgatcactactccatcactactctcgntctgnatctacgctgcgtactgantctacatctgtacgcagtgtagtgatntgatagtagcgcatgcancaangactacagatgacgtcgtcagntgcacntgtnctgcgcatcatcngnatcgcactcctcgctcacggatagcgtccgtnctncngactnatgcatacnacacaacctcgcagtcnagcangtgtcatacagagtatcggcagagcgcgctgacagagaccncgtaccgtgtnggancgacngtactagncccnanaccatncacaactgacangacgtcactttagtctcatcccgttcactctactgttatacatnanactctatcatcacctagatgatactctccgtcacgtactcacacttcctgctgcatctcctactactagtctctatcatctataatacatctcgttctatctcgatctagtactacataaatgacgtatcatcaatgacacgaccgacacngtctgctacaatgatcatactgctccgcgtgtctancctactacgcgtcatcctacacctcgtcttcaattctctgcatgccacattcntcatcagcactcagctccacaggatccatgagatcagaacacnatnaaaagataaatcattattatncccaccccgctactcgatgctcgttgttgcgtgcgacgtactcagtgtggng

SEQ ID NO: 3906 - DNA, 1458 bp, Glycine max
  misc_feature (449)..(449): n is a, c, g, or t
  misc_feature (535)..(535): n is a, c, g, or t
  misc_feature (788)..(788): n is a, c, g, or t
  misc_feature (910)..(910): n is a, c, g, or t
  misc_feature (933)..(933): n is a, c, g, or t
  misc_feature (1013)..(1013): n is a, c, g, or t
  misc_feature (1038)..(1038): n is a, c, g, or t
  misc_feature (1140)..(1140): n is a, c, g, or t
  misc_feature (1151)..(1151): n is a, c, g, or t
  misc_feature (1215)..(1215): n is a, c, g, or t
  misc_feature (1225)..(1225): n is a, c, g, or t
  misc_feature (1277)..(1277): n is a, c, g, or t
  misc_feature (1297)..(1297): n is a, c, g, or t
  misc_feature (1343)..(1343): n is a, c, g, or t
  misc_feature (1346)..(1346): n is a, c, g, or t
  misc_feature (1348)..(1348): n is a, c, g, or t
  misc_feature (1350)..(1350): n is a, c, g, or t
  misc_feature (1368)..(1368): n is a, c, g, or t
  misc_feature (1373)..(1373): n is a, c, g, or t
  misc_feature (1376)..(1376): n is a, c, g, or t
  misc_feature (1390)..(1392): n is a, c, g, or t
  misc_feature (1395)..(1395): n is a, c, g, or t
  misc_feature (1398)..(1398): n is a, c, g, or t
  misc_feature (1417)..(1417): n is a, c, g, or t
  misc_feature (1422)..(1423): n is a, c, g, or t
  Probeset Number=SeqID_13685
cgccctaatcctaccagcgcagcagacgcatgcgcgtcgtagcgctcgaaatgtcttgaatacagcagtcatgcgcccacctacatcgcacctctgcgcagatacatgtagagataaatcatggcggacgcgcgcggcgagaggcacacgcacacatgcgagatgcaacgtggagagcaagcatggatcgagacttatctcacgtggtatcagcccattacgttaatatctagtatcactcacattacactctcatgaaagcatatgctcaacatagagaaagattatagaagagtagcacaaagagatacagaagatgtgcatagacgaaaggggcgcgagagagaagcgcggccgagcagacgctccgacccacgcgtagtactaacgtcactcctcatacatgcaccatcatagcactcaacacacgcgcagtccacagtagatgntaccacagggaccacacagccgacgacggcgtaccgtgcagacgcgcgacacaccagcgcaggacgaaccgcgagacatagcgagngacagggcagtcagtggtgtcagtcagtggcggtgggtcacgacgcagacactccgcacgcccgcgtacatcagccagtgtctcgcggcgtaccactctgcgcccagacgctgtgggcggtcggcactagcacgcacacgcacaatctctctatcctggtgctacgcactggacttacataagaccaatcacaaatcaactaatagcacacgagcccacacagaaccacacgccagccaataaatatataatnaaagagatagaatagaataaatattataacattgtgaagagtatggcaagaggcacacacaagagcgaaagggagagacgcagacacgacgcacacgggggtgcggaagagcgcggcggccngggacgacgcagaggcgagcacngcgaagtgtacattagccgataatccagcacacatggaagtaggtctctgctagtctccacaccagacttaatatcgtantcattcaatgtatatacagtacggngctatcccaatctcctcgtcaccactactctatacataatcctcataataacaacacacaagcagcgcgcggtgcgcgcgcagggtgcggaggggagcaggntgggcgtgtcngcgggcgcccccacgaacgacaaagagcaacagcagaagagtaagacgctcaccagagacagcnagcatatggntgatagtaatttgcgagtgttatgtaatcaattatacaggcggcgacgatgntgaggagagggtgagatggntagatagaagcacagcgcaccacgaatcaccgcccaacgcgacaanagnananaactccccagataaaatnaatanaangaagccgggaagannncancancaccaaccacaacacacanccaanncgaggggggggggagacgggagggcgcacgccccc

SEQ ID NO: 3907 - DNA, 1418 bp, Glycine max
  misc_feature (1)..(1): n is a, c, g, or t
  misc_feature (176)..(176): n is a, c, g, or t
  misc_feature (296)..(296): n is a, c, g, or t
  misc_feature (300)..(300): n is a, c, g, or t
  misc_feature (419)..(419): n is a, c, g, or t
  misc_feature (511)..(511): n is a, c, g, or t
  misc_feature (516)..(516): n is a, c, g, or t
  misc_feature (523)..(523): n is a, c, g, or t
  misc_feature (574)..(574): n is a, c, g, or t
  misc_feature (846)..(846): n is a, c, g, or t
  misc_feature (916)..(916): n is a, c, g, or t
  misc_feature (969)..(969): n is a, c, g, or t
  misc_feature (1332)..(1332): n is a, c, g, or t
  misc_feature (1334)..(1335): n is a, c, g, or t
  misc_feature (1340)..(1340): n is a, c, g, or t
  misc_feature (1345)..(1345): n is a, c, g, or t
  misc_feature (1382)..(1382): n is a, c, g, or t
  misc_feature (1384)..(1386): n is a, c, g, or t
  misc_feature (1389)..(1389): n is a, c, g, or t
  misc_feature (1395)..(1397): n is a, c, g, or t
  misc_feature (1400)..(1402): n is a, c, g, or t
  Peptide Sequence Number=SeqID_8092
  Probeset Number=SeqID_13686
ntaggagagtggtgacagaatagagtgcaatagagactcacgtcatgatagtcgtctctcgcgaccgatgcttctcacggtacccagtgatctcacgagaggcagtagtcgtgatctcgcatcttcacacattccgatacagtgccgcgcgcgaccactcacggccccgctgccgngacccacggcatgcgcacagctcatgtctgatcacagctcgattatcgcattcgttctcgtctcgtttctgtctaacgactctttatgtatctcttctattacatctcatccgcttggcntcgngcgcgcgaccaccacacgcaccctcaccgacgtaagtgcgttgtgggtgcaatacatcagagacgtggttggcggtgtgcgatactcctcacactccacgcgctaaggagcaggcgagncgcctgctacgcacagtcgactaatcatactgtatgcgggcgcggataatcctcagcgtacggctcatcacttcctgctgcctgctgcgctntctantcatatncactcagaacttcactgatgcgacgcgcgtcattgagtcgcagtctacacnacgataggagctatttctaacaattacattagcttcgatgcgaaggaatagtagggctgagcgcagactctgtccgtgtcggcgtgcaggtcatcatctaacatacattcaatactcctactacattcgcggggagaggcagtacgatgcgagtcggagtagtatgaatcactcctatatcgcagtcttatctacctcgatgtctcattcggtctatctgataaagacgcgattattaacatatcatcctctacacatcgccggaaacacanacaaagcacgacgccaatctatacagccaccaccacatccaacaaccatcattcaataacatctctattnttatacttctcaatatattataattaatgtacaatcaactattcttctatganttgttgttgtaactgtattatattgtaggatcttgttgctcactataactatatttttcttttcttctataatctctctcttctctttcctattttctctgtgtatagatgtagcctctcctctagccactctcacctcaatctgactaagtcatcttgctgttcatgatatatgacaagcgtgggctgcgccccacgcccccaactcagcgtcttcttctcttttttaccacactcaccacactacctcattattataacataatatcatactaatctcctacattctaactcacttctggccttaccttcgtattcgacatattacacatagatttaatattaatatgatatcatgatctnannacacnaccantcaagcacaccccctctctccatccacaccacgcggngnnnggngggggnnnggnnnggccaccacacacccc

SEQ ID NO: 3908 - DNA, 1545 bp, Glycine max
  misc_feature (109)..(109): n is a, c, g, or t
  misc_feature (153)..(153): n is a, c, g, or t
  misc_feature (183)..(183): n is a, c, g, or t
  misc_feature (244)..(244): n is a, c, g, or t
  misc_feature (375)..(375): n is a, c, g, or t
  misc_feature (467)..(467): n is a, c, g, or t
  misc_feature (479)..(479): n is a, c, g, or t
  misc_feature (481)..(482): n is a, c, g, or t
  misc_feature (600)..(600): n is a, c, g, or t
  misc_feature (604)..(604): n is a, c, g, or t
  misc_feature (647)..(647): n is a, c, g, or t
  misc_feature (722)..(722): n is a, c, g, or t
  misc_feature (1141)..(1141): n is a, c, g, or t
  misc_feature (1223)..(1223): n is a, c, g, or t
  misc_feature (1271)..(1271): n is a, c, g, or t
  misc_feature (1275)..(1275): n is a, c, g, or t
  misc_feature (1391)..(1391): n is a, c, g, or t
  misc_feature (1399)..(1402): n is a, c, g, or t
  misc_feature (1514)..(1514): n is a, c, g, or t
  misc_feature (1516)..(1516): n is a, c, g, or t
  misc_feature (1521)..(1521): n is a, c, g, or t
  misc_feature (1525)..(1526): n is a, c, g, or t
  misc_feature (1545)..(1545): n is a, c, g, or t
  Probeset Number=SeqID_13687
cgagtcggcgcgtcgcgagacgtgagacgatagctcatgtgtgaagtttcgtctacacatgtgatcactcgacgtcaggactaggccgagtgaagcgcacatgacgtgngggagagcgcgatgtgcagcagtgtagagagcagttcagcggtngcagtaatcctcacatgcatctcacacacntgcgcgcgacgaccgtagtgcgctctcgacgatgcgatagtagtatgttggacatattcgngagacgtacgatcaacgtgtatttcacgtagtcgcgtcgcttcgctgatgagctagatagaagactgtgcaatgtagagctgtcgtagtgcgcaacttctgtgtgtgtggcgttagacttgtgttggtggnggggcgcggaaggcgtgtatgtgtctgatacgctagtgtgtgctcgcacgtctcgcgaagtgaccgtgttgtatcagtatgcagcgtggtgncattggtgtgtntnntcttttcctaattctctcaatgcggaggttatgtgtagaggcgtaattagtgctgcgatatgatgcgcgtgtgcgcactgatgcactcgacacggtatatacacacttgttctgctanagcntagagtaacgagtgtgtcgacttgggaagaatgctagtgttcngcgcgagtgatcgcatctatctatcgtcagagtcgatacgtgagtgtgttcgtatgcagatttagatgttagcgnaatgttgtacgttctgtacgttggctacgtacagatgtgtcggccggtcgagcgagaggcagaacgaacgactgcgcggattcagagccgggccggacgaagagacagcgtccaccgacaccacacacagacataggaggattcggacgagcgcgagagagcgcgagtgcggtcgccgtcgcgactggggcgcacggtacgccgcatatacgcacgtgagacgatatggacgatgcatgtcgacgtcgcgccgcagtagattgtgactgcggggctgtgcagtactgagtctgcggctcagtagtgcgtgtcgcttatactgatgctcttcatacgcagcagcccgagctccctgacgcagttaattgtacttgcgtggcttgtcgagcggcgcgaggtgttagtcagtacagagacgngtgtgtgtatggggaggtctctcgatcgagttctgccacatgatagtgtgtgatgtcgcgctacatcataacagtgatcatngaggtcactctcgtctctttgcgtgtagcagcaagaacagcggcgcgnccgngacgtgggtggagtccaattgtcggtgatggttgttgttcacggtcattacaatacaatcacccacaccgagttgtccgggccaagtgggttcgcgtcgtcagcgtctggcgggangagagtgnnnnggtctatgttgcagctgcatgttagagtagtgcgtgcagtatgctgtgcggtcgtctgttcgaagttgtggaagtagcgcgcgcgagtgtgaagtaggcggacgtgttaggngngtttnaaanntcaattaatccacaaaaan

SEQ ID NO: 3909 - DNA, 542 bp, Glycine max
  misc_feature (347)..(347): n is a, c, g, or t
  misc_feature (466)..(466): n is a, c, g, or t
  misc_feature (468)..(468): n is a, c, g, or t
  misc_feature (475)..(475): n is a, c, g, or t
  misc_feature (478)..(478): n is a, c, g, or t
  Peptide Sequence Number=SeqID_8093
  Probeset Number=SeqID_13688
gaatatactccaccatcctccttcatcaacggcagacaatatcctcaccccctctctcttttttattctcatcattaatatataaatctgatccttccgccaatcttcatcttttcctccaataccgcctccacccctttatttctctctgtctctctctctctctctcacgattatttcgctttgaagagtgctgaacgaccaacatggcaaacgaataccatcgcaagagagagttcatgggagattacgccaccatgaagaagctactgctactcgtgatgcatggaagcgattctgacgaatatcaccagatgcttatacctttctcctggagtgacaaagantcgtgctatggatcaagggggttagcgcagtcgtctctaggtgtgaaagacggctgtgttcaacagatgcaggcccacacgcgcgtactattggagggctgggaccgacagttacaaangntctgggncgncaacaccactaccacgccggcatatctaaggctactgcgaaccagtggatacactggcaactct

SEQ ID NO: 3910 - DNA, 1292 bp, Glycine max
  Probeset Number=SeqID_13689
accgtagccactttggctcaagctgctaatcgtgctgcatgccatccaagttttgtggcaattgcggcatcgtgcaggatccctgcaagccgtacacgcatttgcccaactgtccgttgcatcgtcagcatggccatccgtccatatcagcgcccagtatatccatcagtccgtctaaaactgctgctagcagcagcagcagcaacagtcaccaccgaatagcgtacctcatgaaccgtacttcgccgccagtgtctccggcacacgttcttcttgacagcgaacaagtcaaactcaacggcttcgtcaactcagtgctgaaccaagcctcgtcactgggactgtcttccaacaagcctccgccgccggccaacaacaccggcttgccatcgtcccaatccgcaagcctgtcttctgacagcgccaaagaaatcccgtatctcagacggcatgttgaggttctaagccaagcactagtcggagtgtgcgctcagtggatcaattccgcatccatgaccgcctatggaggccaaccattacaattgacatccgatggagtttcaagattcctcctggaataccttcatccatgtcgaggactgagccacgaggtcgaagagtgcttcagagacatctactacaccgcgggcacccaacgcgtgaggccctgtctggtgcccccgccgcctggagaacctccactgtatgcggacagcccgaaatatcaagaccacgaacatgccgccagctcaagtcccatccggcatggccctgagtggtggagagcctcagttggcatcaaccaagccacaggcagagaaggcgatgctgctcgacctctggctgaagccgtgcgctcccttttggcagacattctcggaatcacagcccgcagagtcgacgtgtacmccacaaytcccaccgaactcrccgtggccgtytacgacagsgacgawccgtccgccaaaacctctgtccaggcgctcaaggaattctgtgacctgcasagattgcgcagcttcggctcaagactaaccgacagtcagttcggcgcctgggaagacctcgtggagctcatcgacatgccctcttggcaatttctaggcatggccgatgaggtggcccagatgcacaccacgtccatgcataaagccggtcagtacaaagacggcgcggtacacgctcagcaagcagtggaaaagtatcacccgcaccacacaagagtttacaaagattcaagataagaaatgtaagacaatcatgagcatgacttttagacataagaagacttt

SEQ ID NO: 3911 - DNA, 480 bp, Glycine max
  Peptide Sequence Number=SeqID_8094
  Probeset Number=SeqID_13690
cggctgcgccatgacgtctgacttctcaattaggaatcgagaaatataataagatatctatctatggcagtttgaagctttgccaatttttgcttaatctttcgacgatgtggctttgcattagtctcttattttatacgcactatatcatcgtcagaagatgcccctcgtcaattgcggactgtgatattcatatccccggtccagagctggtggcagacgcgcaatacatcaatcaaagctggatgcaggctcgcagttcatgatatgaactctgatgttctcgagatgttctctcagatgggagttcccacaaagaaaacaccttatgaagtttcagaagcaagtgatgttgtaatcacaatgctacctaattctgcccatgtgagtatggccattagttccaaaaggcattcccctacatgtgaaagcattacatcatttgtggcttcaatttcttttatagttcttcaacaattt

SEQ ID NO: 3912 - DNA, 1438 bp, Glycine max
  misc_feature (17)..(17): n is a, c, g, or t
  misc_feature (47)..(47): n is a, c, g, or t
  misc_feature (120)..(122): n is a, c, g, or t
  misc_feature (125)..(126): n is a, c, g, or t
  misc_feature (129)..(129): n is a, c, g, or t
  misc_feature (220)..(220): n is a, c, g, or t
  misc_feature (224)..(224): n is a, c, g, or t
  misc_feature (1039)..(1039): n is a, c, g, or t
  misc_feature (1280)..(1280): n is a, c, g, or t
  misc_feature (1298)..(1298): n is a, c, g, or t
  misc_feature (1382)..(1382): n is a, c, g, or t
  misc_feature (1438)..(1438): n is a, c, g, or t
  Peptide Sequence Number=SeqID_8095
  Probeset Number=SeqID_13691
agaggaaggaggatagnataaatatttgcattatcgtctcatatgcnacggccgacattaacaccactaacacacaaaaacagaatggagagatttgagtggagaatatccacccccccnnncgnnttntttttatgtctgaaatatggaggtaaaggagagcagcccgcctcttcccaagaggacgggaagggagcagacagaactacaggcatataanttgnttgttttattgtatatgaggtgaagagacagggtgatgtttaccgccactataatgtgtgtgaagtgtatgagaatgcacagttagtatttatgaggccgcacacacgacacagaggaaggtagagagataatagaggagaaccaccgggggtgccagagtggagagtatatttagacaggcgaggtgttgtgggagctggcatgcgtcgagcatgacagagccgatatataatatagaacgagtgagtgagggggacggtggttggtgtgctgatggagaatgagtgttaaggaagcgagaatgtacgtggtagtggtgctgttgagtcgggcgctagatgatgactcgagcgggagtgtgtaggagatacccgttcatgaatcgtcgaccgtattgtttcatctcgacaatgctaggttacgcggtagctgagaccaataagatagtataaggacgagttgtggggatagtgtgaatcagggacagggcatactctataataaaagtgcgtgattttttgcagaagagtaggctggcaatcatctgccatctaagaagtgtgagtcggcgacatacataaacgccacgcgcgcaaagcgcggatattaaattgctaaatgtacaagatagaatatatgcaggaggctggtgaatgaagggtggaggagtgtgagagagatgggagtgagagtagaacgattaccatcacacactaaccacagtatgaggcggaaacaccacaatataccatacgtcctgtgtcgcggtggagtgacgcggatagggaagacgctgcgaccatcctaagagtgncgctgcggtgagcacacgagagtctgtgcggtaagaagagtgtgtgtgtgctcgtccctgctctgggcgctgtcctagcgactggttgtcgatgtgccctcgactagtacgctcctatgtgaatatcagagaaaggcatgctaacaatggagaactgacacctatactgcctgcaggtatgacacacactgagggcgcagagccgaaatggtgataagagtgtaaactaagcagagagagngactaaatacaaataggnacacgaagtggcgagtgataatcatgtcacgcttgtagtcagtcgcacggcgtcaggcgtccagagcgtggatggtgtgcacancacatcatgtaatgtatcgctcagatgatcactcacactatcatatcgacgagcgn

SEQ ID NO: 3913 - DNA, 1518 bp, Glycine max
  misc_feature (37)..(37): n is a, c, g, or t
  misc_feature (73)..(73): n is a, c, g, or t
  misc_feature (117)..(118): n is a, c, g, or t
  misc_feature (121)..(121): n is a, c, g, or t
  misc_feature (123)..(124): n is a, c, g, or t
  misc_feature (128)..(128): n is a, c, g, or t
  misc_feature (686)..(686): n is a, c, g, or t
  misc_feature (869)..(869): n is a, c, g, or t
  misc_feature (917)..(917): n is a, c, g, or t
  misc_feature (942)..(942): n is a, c, g, or t
  misc_feature (1164)..(1164): n is a, c, g, or t
  misc_feature (1236)..(1236): n is a, c, g, or t
  misc_feature (1292)..(1292): n is a, c, g, or t
  misc_feature (1343)..(1343): n is a, c, g, or t
  misc_feature (1404)..(1404): n is a, c, g, or t
  misc_feature (1478)..(1478): n is a, c, g, or t
  misc_feature (1480)..(1480): n is a, c, g, or t
  misc_feature (1518)..(1518): n is a, c, g, or t
  Peptide Sequence Number=SeqID_7743
  Probeset Number=SeqID_13692
aaaacaggaagaaggtaaaataaataattatactatntccgctacaccgagacagtaactccacctacactcncgccaacacccaccttatgtgatgtagttatattgtggggtatnnccnanngggngccgcccgccgccccctccaccaccaccctacagacaaagtaaccacctctcacttcaaggtaggacagctacagcacactaatgtcatgttcactccgcactgaacgcagggatgactagctcattcttcggccgatagagacccacaccgcccactctaaggtatgggcttctaagatcgtgtaagtgaattggccacaccactacgtacgcttactgaattcaaccatgatgtatgataaataaagaatgtctcaatccaaataccacaacgcacgacatagctttaacaagatcaggtaaagtgcatcattccgattcttgagagcatcacctacataaaacactaataagccacacacaccagcgactcacaccacgacctcgtcccctcggattgtcacttgcagatgtggccacactctctgcacaccaatagcgtcgcggatagaatgtatatattggtaatctctcgctacgcatatcgtctacttacacgtaacaaccatataccacaaaaagtatagaccagcacaagagtaatatataactgaganctcctcctatggcactattcacaaacatagtccagtctacttcaccaacataggcagaacacaggacacaatttacatctacggacatcgcaggaatctttgtcacaatggtcaacgcgacactcaacagcactagcacacacaactgaccacagacagtataacacgagatgtacttcatcnatacacaaagctgttcaagatataagcatgaggtagctcgttacagangactcatgttatgacatagtagagnagataaacaccacataatgcccaatactcgcccttacaatagtcgcattcactctactacctacgcgaatgctcactgagacactcacatgcgcaagccaatgcgcacatatgaactcgttttataccatccacctctctaagtactcacacgcgccaaacactatcgcaagccgcatatcctctaccgctatcacccttgtcactcacacatctaccacancacacggcacaccaacatgcgtcgcgcacgacattcaatacgacgaatctaccatacgcacacaacacggcnacgcactaggctattcgcgtatctctacacacgcgcgaacgaccctactactaccnacacaagtagacacatgatctgatgacatactaacgcgatgcagctctatnactgccacacctcgctcactatactatatatgcaacacgaagcctctacgcacactacatncatcccgcttgctcgatgcgcgtgatgcctcgtctacgagaatcatacagcgtggcgtatatcaacatccggtnantacagtatcactcacacctgagtagcaattcacaccan

SEQ ID NO: 3914 - DNA, 1934 bp, Glycine max
  misc_feature (8)..(12): n is a, c, g, or t
  misc_feature (18)..(18): n is a, c, g, or t
  misc_feature (87)..(87): n is a, c, g, or t
  misc_feature (89)..(92): n is a, c, g, or t
  misc_feature (94)..(94): n is a, c, g, or t
  misc_feature (96)..(96): n is a, c, g, or t
  misc_feature (102)..(103): n is a, c, g, or t
  misc_feature (144)..(145): n is a, c, g, or t
  misc_feature (149)..(149): n is a, c, g, or t
  misc_feature (151)..(151): n is a, c, g, or t
  misc_feature (214)..(214): n is a, c, g, or t
  misc_feature (230)..(230): n is a, c, g, or t
  misc_feature (232)..(232): n is a, c, g, or t
  misc_feature (476)..(476): n is a, c, g, or t
  misc_feature (522)..(522): n is a, c, g, or t
  misc_feature (560)..(560): n is a, c, g, or t
  misc_feature (562)..(562): n is a, c, g, or t
  misc_feature (687)..(687): n is a, c, g, or t
  misc_feature (700)..(700): n is a, c, g, or t
  misc_feature (745)..(745): n is a, c, g, or t
  misc_feature (818)..(818): n is a, c, g, or t
  misc_feature (836)..(836): n is a, c, g, or t
  misc_feature (874)..(874): n is a, c, g, or t
  misc_feature (965)..(965): n is a, c, g, or t
  misc_feature (983)..(983): n is a, c, g, or t
  misc_feature (989)..(989): n is a, c, g, or t
  misc_feature (1027)..(1027): n is a, c, g, or t
  misc_feature (1041)..(1041): n is a, c, g, or t
  misc_feature (1088)..(1088): n is a, c, g, or t
  misc_feature (1280)..(1280): n is a, c, g, or t
  misc_feature (1301)..(1301): n is a, c, g, or t
  misc_feature (1322)..(1322): n is a, c, g, or t
  misc_feature (1378)..(1378): n is a, c, g, or t
  misc_feature (1405)..(1405): n is a, c, g, or t
  misc_feature (1455)..(1455): n is a, c, g, or t
  misc_feature (1523)..(1523): n is a, c, g, or t
  misc_feature (1673)..(1673): n is a, c, g, or t
  misc_feature (1883)..(1883): n is a, c, g, or t
  misc_feature (1934)..(1934): n is a, c, g, or t
  Probeset Number=SeqID_13693
tttaaaannnnntcaccntcattagcgagctgatgtgtcaccgcagctagcgcagagcacggcgaccgcggcggctcgccgcgcacncnnnnananataaanncacacgcagtatctcgtgtgatgtagtcttgtggtgacgtnntcgngngttggtgcggtacaccgcggagtgtgcatcgggagctcagcgctccacggcaccggtgcgtgngagacggctgtgtggntntatatatcgcgcatgtactctcgttgctccgcccacatgtgctagaccagttagagtgagatgatgagaggttatctacttgatcataagcacgactaatgacaccacagcactagagcacacattgcactatatgtcagtcgctgtcgcgccacatgctgagttcgcgtcgccgatgccggcggtctcacgtcctcactgcgctcctatggtcgatctattatatactttatcagtaaaagtntatgtagtgagcgagactcgagcgcgcagagagcgagataccgagnagaacaaaatcgacggagcggaggggcgtgtgcgtgcnanacgagcacggtgatgcgcgctatagagcgtggccgcatgtggcgccgcgcagtggtgcgacgaggagcgatactttatattattagtgtgtcaccacgcgacgcgcgcggcgtagtatcagcggncgtgtctgcgcgnattatcgcgcgctacgcgtgtgtattgcgtacctatcgacgcgcncgttgctatgctggcgtcgcgtcgctgcgcgagactctgtctcgtcgctctgtcgctcgtactcgtacagagngcgacgtgtacgtcatgncttgacgtgatacagcctaacgctgcgcggcactgtcnacgtgccagtaagcatcggtggattatgctactgacgatcatcactacactaacctcaccttgacgacataccgcgtcgtatctatctatnatatagtattacgatgcntatatnatataggacggatagcgtcagtatgacggactgagtgncgtctgcgaccgcngcgctctgcaggcgcgcgtgactcgccgtctgtgctcatccgctccntactctgtctccgagtgacgcgtgcggcgctgcttgtggatcatgacgtcgtacatcatcgcacaccctatactcggagcaattcgtgactgtcgccgtgatcgtgatccatgtctgtgtactaggcgagcgtgcgagatgtcacgtgatgctgacgtgtcatctatgcgcggaagtcatagcgtgctgtanctgacatacgtgatgctcgtnattgtgcacgacgtcgtgtgnagcgcggactgtcgctcgagagtgtgtagcgcgtcacgtgcgtgtatcgtagtggnatctgttatcatcatatcgttattganagttcagagcgtcgacgcacaatatacacgcctctgcggtgcgcgacgcngcgctggatgacgcggtgcctgccggtacgctcgtcgcgtgataggcacgtgacgactgatgtagctngcatatgtaagtacgtacacacgacatcgtcgagcgcggcgtgtacgtactgagcgcgagacacacatcattacgacgcgacgcagatatatgctctgcgccgcccgcgctcgcgtgtgctatgcgtactctcaccacactctgctcacntcactcacgtgccgcgtgagtcatcatcgtgtagcgcgcaatctgccgcgcgacgtccgctcgcgcaccgccgtgatgctacagatgtgtgtgcgatgagtcgtcgactctcgacatcgtctgcgtcgtgacctctgctgcgacagcgcagcgcacgcagatggcgatgagcagtgtatgtactcatcgacatcgtgcatacgacgatgncaggctctgatgtagtcgctcttctactatctgtgcatgacgtccggtcgn

SEQ ID NO: 3915 - DNA, 1702 bp, Glycine max
  misc_feature (14)..(14): n is a, c, g, or t
  misc_feature (16)..(17): n is a, c, g, or t
  misc_feature (39)..(39): n is a, c, g, or t
  misc_feature (42)..(43): n is a, c, g, or t
  misc_feature (45)..(48): n is a, c, g, or t
  misc_feature (51)..(53): n is a, c, g, or t
  misc_feature (58)..(59): n is a, c, g, or t
  misc_feature (61)..(61): n is a, c, g, or t
  misc_feature (65)..(71): n is a, c, g, or t
  misc_feature (73)..(73): n is a, c, g, or t
  misc_feature (77)..(77): n is a, c, g, or t
  misc_feature (81)..(81): n is a, c, g, or t
  misc_feature (83)..(83): n is a, c, g, or t
  misc_feature (94)..(95): n is a, c, g, or t
  misc_feature (142)..(143): n is a, c, g, or t
  misc_feature (146)..(148): n is a, c, g, or t
  misc_feature (150)..(152): n is a, c, g, or t
  misc_feature (237)..(237): n is a, c, g, or t
  misc_feature (291)..(291): n is a, c, g, or t
  misc_feature (299)..(299): n is a, c, g, or t
  misc_feature (347)..(347): n is a, c, g, or t
  misc_feature (437)..(437): n is a, c, g, or t
  misc_feature (461)..(461): n is a, c, g, or t
  misc_feature (502)..(502): n is a, c, g, or t
  misc_feature (569)..(569): n is a, c, g, or t
  misc_feature (595)..(595): n is a, c, g, or t
  misc_feature (629)..(629): n is a, c, g, or t
  misc_feature (734)..(734): n is a, c, g, or t
  misc_feature (739)..(739): n is a, c, g, or t
  misc_feature (888)..(888): n is a, c, g, or t
  misc_feature (1055)..(1055): n is a, c, g, or t
  misc_feature (1256)..(1256): n is a, c, g, or t
  misc_feature (1458)..(1458): n is a, c, g, or t
  misc_feature (1482)..(1482): n is a, c, g, or t
  misc_feature (1495)..(1495): n is a, c, g, or t
  misc_feature (1526)..(1526): n is a, c, g, or t
  misc_feature (1567)..(1567): n is a, c, g, or t
  misc_feature (1569)..(1569): n is a, c, g, or t
  misc_feature (1604)..(1604): n is a, c, g, or t
  misc_feature (1642)..(1642): n is a, c, g, or t
  misc_feature (1647)..(1647): n is a, c, g, or t
  misc_feature (1695)..(1696): n is a, c, g, or t
  misc_feature (1702)..(1702): n is a, c, g, or t
  Peptide Sequence Number=SeqID_7744
  Probeset Number=SeqID_13694
ttttttttttggtntnntgtgtgtgtgtggggggggggnaanncnnnnaannnggggnnangggnnnnnnntntttncttntntatgtggaaanntctgtgcgtgtgggtgtttgttggggagtggtcattccattgtcgcnngannncnnnccgcccccccatctctgctggcacacctctcctccagaataaacacaccaaatggaatctggagatgtgtcatgattctattttnctctgaggtatctgtgtgatgccccacaaccactcatgttttaagactacacanctcacacngaaccaactcgcacaacataatacttagcttcctatatctctcagctnctaaaatcacactccactaacacagcacagagatcagaagaccgagaaacatcaaaacagaaaagaactaagcgctgtatgatgaagaanatataacactctcactcgtcttantccagagcgtaggtgtatgaagcagtagatagtagctgttnatggatgtgccacttagagctaccatgtaccttacgcccacatacagacatactcacgtcatactangcaccgccgcgaaccacacgctgacntacatagtatcacgaccaactattcgccaccaangcattcactcacacttacacgtatcactattgcgactcgctgtcgtgtgcgttcggcgcgcgcgggtgcgagcttgttgtcggttgctgagcgtaggtcgccgtntatcntactgccaagcgagctgatgttggtgggtgggatgtgctcacgatagatgatatagagagcaaccagggtagagaaatagaaaagagaaagaacaaaacaccaccacgaacccaccaataaaatatcacaaacacaacttatatatggnatgaacgattcatcccatattagctggatgcgacatgtgccggtcggtaccctcgcggtgctacatagacgaatcacatactagcgactagaaatatgaatagtgaatacgagtgacatggcgcttattcatcctagaccagacacacccaccacacataccacaanaaaataatctcactgacgacgtgtcgacgccgctgagaagaggcacacgactctgtcactcgttgctatctcctgctctatgttatctacatatctgactccacttccacgacgtctgctctcctccgacacccacagcacatcgctcgtatacgtttccactcgtgttctgcgcactatagcgcattgtagtagcctggngcacctgccgcagcacactgcctccgaccaactcgtacgtgactatatacctctcatgctcataccacgtcgtctgcagcctacagtgcacgctaaaactgtccactcacctcctacacacctccatacacagtgcctcaatcgctacacacatctatatcatatatctagaggacatatacttagagtcaatagctagaanacgcatgagatccattacaacctnatatcttgaactnctctcacggtctacacaacgcacagcactanattgtcactcgatgagtcctcgcacgctattgctggtgtcntngctgtatgactttatatttgttcgatgtgctccgntttggttgcttgttgctgtgtattcgcataatcactgnctganatcgtagtatcaatcatgctgccatgactcgccgaacgacgcaatcgnngttctn

SEQ ID NO: 3916 - DNA, 1536 bp, Glycine max
  misc_feature (19)..(24): n is a, c, g, or t
  misc_feature (28)..(28): n is a, c, g, or t
  misc_feature (31)..(31): n is a, c, g, or t
  misc_feature (33)..(34): n is a, c, g, or t
  misc_feature (71)..(71): n is a, c, g, or t
  misc_feature (173)..(173): n is a, c, g, or t
  misc_feature (259)..(259): n is a, c, g, or t
  misc_feature (266)..(266): n is a, c, g, or t
  misc_feature (348)..(348): n is a, c, g, or t
  misc_feature (390)..(390): n is a, c, g, or t
  misc_feature (451)..(451): n is a, c, g, or t
  misc_feature (533)..(533): n is a, c, g, or t
  misc_feature (539)..(539): n is a, c, g, or t
  misc_feature (914)..(914): n is a, c, g, or t
  misc_feature (1005)..(1005): n is a, c, g, or t
  misc_feature (1103)..(1103): n is a, c, g, or t
  misc_feature (1105)..(1105): n is a, c, g, or t
  misc_feature (1163)..(1163): n is a, c, g, or t
  misc_feature (1181)..(1181): n is a, c, g, or t
  misc_feature (1264)..(1264): n is a, c, g, or t
  misc_feature (1433)..(1433): n is a, c, g, or t
  misc_feature (1476)..(1476): n is a, c, g, or t
  misc_feature (1486)..(1486): n is a, c, g, or t
  misc_feature (1536)..(1536): n is a, c, g, or t
  Probeset Number=SeqID_13695
gttggggggaggggggggnnnnnntttnaantnntcatgactactataatcatctaccacattacgaccanctacatcacacacctcgacagacagcgaagaagcgtgacccgccagcgcgacggcgggcgaggcgcggcctgttacttaagtgaagagagaggagaacaccncgcgccgagcgcgcgaggaggaagaaagacctatcatcatactacaaccgtcctctcgcccgcgccacctagcacaacagcggagngattggngacgagtcctatactatctgcgtagtgcttctcctatgcagacttactgcagagcacaaggtcgcgacgaggtctgagttgntaggatagatgcacgctagagttcttgcgacacaacacctcncattatataatagatccttgctacgcgctctgctctactaacatcataggatgacgctagntccctgtagttccactcatgcttgcttcagtgctcatacacctgcgatcatcaacaccctcccgcgcttcacagcaacaccngacacnactccgtcacactgacctactatctctcctcactcacacacacgacatgcgctagaaagcgaggcggaggtgctgcattccttcttgcgtcagcatctcctgtagagagacgtactcgtgtcgccaggtagagtatctgatctaacatagacctagccctcatcgcccgcagtccgcatgtctgctctatctactctaggcgttgtacaggaaagatagaaagtgatggcgcgtacctcactcagcaggtctaggtagtgccgtggagcccgcacatcatagcatgcggacacgtatgtcgatacgtgtcgtgatctctatcacgcgctgcgctcaccagctgcgtctccgatagcaaacacagcagctcgtggncattacatcacgctaagacacaagagctacgatgaccctctcgccagtagatacagcagagtcgagactatacacttgcagcgtagtaccngaatactcctcaacgactgtagacgacacctctgcgtatcctcatcatgcgtcgcacggtgtctcatagcggaaacgacttatcacgctctcgagcangngactatctgccatcttagtgatatattcctggtctgcattccgcacacatactacgantgcgcctcgaattacatnctcgactcgtgacatacacacgactgatgtcacacaccacaactctataatatggtgaaggcgcggcgctcctatcaagacanacagatgcgacagtactcgactacagaccataatcagcacgcaatgaagatgtagacagactcctctgaccatcatatataacgtaatgacgcacgtcgtattgtatatctgacgcagtgacgcaccgaccactgctgctgactctcccgtcctattgcagaggagccntctgaagccgagtcctatgttcatatagcacacgaccaacatntgctatatgntgttacaccggcgagttttttagtcgcagcacacacaacatcgagtacgn

SEQ ID NO: 3917 - DNA, 2343 bp, Glycine max
  misc_feature (48)..(48): n is a, c, g, or t
  misc_feature (81)..(81): n is a, c, g, or t
  misc_feature (96)..(96): n is a, c, g, or t
  misc_feature (108)..(108): n is a, c, g, or t
  misc_feature (125)..(125): n is a, c, g, or t
  misc_feature (127)..(127): n is a, c, g, or t
  misc_feature (173)..(174): n is a, c, g, or t
  misc_feature (197)..(197): n is a, c, g, or t
  misc_feature (201)..(201): n is a, c, g, or t
  misc_feature (204)..(204): n is a, c, g, or t
  misc_feature (209)..(209): n is a, c, g, or t
  misc_feature (213)..(213): n is a, c, g, or t
  misc_feature (215)..(215): n is a, c, g, or t
  misc_feature (221)..(221): n is a, c, g, or t
  misc_feature (246)..(246): n is a, c, g, or t
  misc_feature (260)..(260): n is a, c, g, or t
  misc_feature (275)..(275): n is a, c, g, or t
  misc_feature (329)..(329): n is a, c, g, or t
  misc_feature (332)..(332): n is a, c, g, or t
  misc_feature (346)..(346): n is a, c, g, or t
  misc_feature (356)..(356): n is a, c, g, or t
  misc_feature (370)..(370): n is a, c, g, or t
  misc_feature (395)..(395): n is a, c, g, or t
  misc_feature (411)..(411): n is a, c, g, or t
  misc_feature (429)..(429): n is a, c, g, or t
  misc_feature (433)..(433): n is a, c, g, or t
  misc_feature (435)..(435): n is a, c, g, or t
  misc_feature (437)..(437): n is a, c, g, or t
  misc_feature (453)..(453): n is a, c, g, or t
  misc_feature (477)..(477): n is a, c, g, or t
  misc_feature (482)..(482): n is a, c, g, or t
  misc_feature (498)..(498): n is a, c, g, or t
  misc_feature (500)..(500): n is a, c, g, or t
  misc_feature (503)..(503): n is a, c, g, or t
  misc_feature (510)..(510): n is a, c, g, or t
  misc_feature (513)..(513): n is a, c, g, or t
  misc_feature (563)..(563): n is a, c, g, or t
  misc_feature (757)..(757): n is a, c, g, or t
  misc_feature (977)..(979): n is a, c, g, or t
  misc_feature (986)..(986): n is a, c, g, or t
  misc_feature (1099)..(1099): n is a, c, g, or t
  misc_feature (1112)..(1112): n is a, c, g, or t
  misc_feature (1120)..(1120): n is a, c, g, or t
  misc_feature (1142)..(1142): n is a, c, g, or t
  misc_feature (1207)..(1207): n is a, c, g, or t
  misc_feature (1293)..(1294): n is a, c, g, or t
  misc_feature (1309)..(1309): n is a, c, g, or t
  misc_feature (1327)..(1327): n is a, c, g, or t
  misc_feature (1361)..(1361): n is a, c, g, or t
  misc_feature (1386)..(1386): n is a, c, g, or t
  misc_feature (1467)..(1467): n is a, c, g, or t
  misc_feature (1471)..(1471): n is a, c, g, or t
  misc_feature (1494)..(1494): n is a, c, g, or t
  misc_feature (1500)..(1500): n is a, c, g, or t
  misc_feature (1549)..(1549): n is a, c, g, or t
  misc_feature (1551)..(1551): n is a, c, g, or t
  misc_feature (1563)..(1563): n is a, c, g, or t
  misc_feature (1565)..(1565): n is a, c, g, or t
  misc_feature (1588)..(1588): n is a, c, g, or t
  misc_feature (1606)..(1606): n is a, c, g, or t
  misc_feature (1629)..(1629): n is a, c, g, or t
  misc_feature (1641)..(1641): n is a, c, g, or t
  misc_feature (1700)..(1701): n is a, c, g, or t
  misc_feature (1711)..(1711): n is a, c, g, or t
  misc_feature (1781)..(1781): n is a, c, g, or t
  misc_feature (1832)..(1832): n is a, c, g, or t
  misc_feature (1840)..(1840): n is a, c, g, or t
  misc_feature (1866)..(1866): n is a, c, g, or t
  misc_feature (1869)..(1869): n is a, c, g, or t
  misc_feature (1877)..(1877): n is a, c, g, or t
  misc_feature (1897)..(1897): n is a, c, g, or t
  misc_feature (1899)..(1899): n is a, c, g, or t
  misc_feature (1922)..(1922): n is a, c, g, or t
  misc_feature (1928)..(1928): n is a, c, g, or t
  misc_feature (1980)..(1980): n is a, c, g, or t
  misc_feature (1991)..(1991): n is a, c, g, or t
  misc_feature (2022)..(2022): n is a, c, g, or t
  misc_feature (2048)..(2049): n is a, c, g, or t
  misc_feature (2052)..(2052): n is a, c, g, or t
  misc_feature (2109)..(2110): n is a, c, g, or t
  misc_feature (2162)..(2163): n is a, c, g, or t
  misc_feature (2166)..(2167): n is a, c, g, or t
  misc_feature (2174)..(2174): n is a, c, g, or t
  misc_feature (2176)..(2177): n is a, c, g, or t
  misc_feature (2206)..(2206): n is a, c, g, or t
  misc_feature (2208)..(2211): n is a, c, g, or t
  misc_feature (2213)..(2213): n is a, c, g, or t
  misc_feature (2217)..(2219): n is a, c, g, or t
  misc_feature (2222)..(2222): n is a, c, g, or t
  misc_feature (2227)..(2227): n is a, c, g, or t
  misc_feature (2245)..(2245): n is a, c, g, or t
  misc_feature (2251)..(2251): n is a, c, g, or t
  misc_feature (2293)..(2294): n is a, c, g, or t
  misc_feature (2298)..(2299): n is a, c, g, or t
  misc_feature (2303)..(2303): n is a, c, g, or t
  misc_feature (2319)..(2320): n is a, c, g, or t
  Peptide Sequence Number=SeqID_7745
  Probeset Number=SeqID_13696
ggtcctgtcggtccaggcatcctcttttgtgcttcggtccgcgctctncatagctgactcatcttcacgcgcctcgcggtncggcggcattccctncgacggcagcantcgttggcgtcgaatgntngattcattgtcttcatcgtgtcgtgagtgcgtgaccgcgggagggnnggcgagcggacgatatcagtcgngcgncancacancgangnatcgcncgtcagatgtggcggtagttggtancacgttgcagcgancggggagtggtgtcntacatggaacgctgctggtacgcgggtgtgtacgtcaggtagagtcttgttgcnttngattggacgtagangttcatctangttcaattatgcanactgatgtatactacatgattacantgacagagatcgctgnacgtgagtagagagacgncgananancgtgagattcgactcnatcagcaatcatggtcacggatgnggcgntgatgtcagtgggtangngtngaacgantgnagactgctgctggagatcatatgcgttagatagtgataggagagagagantgagacgtgcgtacagtgtgctgggtcacggcggcgacacgcgcagcacggatgagcgcgctcggacactgagcatcgagcggtcgtgcgtgaatagcagtatcgttggtgcagcgtgcgcgcggacatagtgctatcactggtgagcgtcggcgacagagagagagcagttagaggacagcgtagcatatagntagggtgtggggtaatcgcgagggagtgtgcgagtggatcctaaccgcggagtacatcgagttacgctgcagatgtgatagcgactggtcggcgggcgcgcgtcgctgtgatattgcgcgcgcgcgtggcgcagctgaacttgccgctgccacatcccgcgctgtctgtctctctgcgactcgcggcagctgcgcgtctctaagtgcaagttgtgtgtcnnntgtagtnggacagtactgcggtgagtgcgtgtgtgtatgtgtagagtcgtgtaatgtcgcgcgtatgtgtgtagtttgagcgatgtcttgctgttgttatgatagatgataatatgaggntgtttgatgacgntcacagantgcgcagtgggttgcgcgtagnggagatgatagacatgcagcgcactacgcgtggttgctgcgactgcggggtgtgcgcagacactnaatcccgtggtgatggacgagcgtgtcggcgactacgtgatagtccattcaccgcatacatcgcacacctcctcactagactcatnngattattgttattgntgtgtcgtatctgtgtantacgtgtatgcagactctcacacatatatagatntatcggagacgcagacatcagcaantagtgtggccgcgcggacggccgccggcgtcgcccgcgcgaggagcgtggaggcaaaagacatgagctcagcggcgtgtgncacncacgcgacggcgtgggtcggcgnggtgcntgtccgtggcggtgcgtgccgcgtcgtggctgctcgcacactggcgtcntnggtcgcttcatntnggatgtcttgctgtgtgtatatngtcatgtgtatgaatgtnctatatcatctcttcgtattcantcgagtgctgcngcgcgtgtatgtgagtatgctctcgcgaatccgtagttctctacacattctcgccacgnntccctaaaanaaactattacagatgataagcacgtgtacacgaacggcacctagctccagcacaggcaggcacgcccacntatacactcatacccgccaagcgccacggcagcgccacaccactccagtcncacacacngcggacgccactatcgacaaacactnatntgtgttgnttgtcgtgtgtagtgtgtgngnttctaagagtggcgctagccgtncgtcgncgcgcgcgcgctgcgcgtgtcgtgcggtcactgtcacgactcctctcgcatngcatctggtgnctccgttgcgcgtgtgctgtgcgtgcgctcncgcgctcgtcgcgtcgcgtgccttcnntgncggtgtgtatggatgtcagtagatgtttattaaagttttatatacaactacataggnnctgtcctccagtcgctgcgcctctcgtgagaagggctgtgcgtcggttcatnnttnnctctttntnntactatatacacttatcgcgtgtatatanannnnangtgnnngtnagggngtaggggggggtcggagnggggtntgtgttagggaggtgtgcgcgcgggtctcggcgcggcctttnngcgnntctngttcttttattttaannataataattataatttgctagga

SEQ ID NO: 3918 - DNA, 302 bp, Glycine max
  Probeset Number=SeqID_13697
tcaatgatggtcctgttagtggacctctatctggttggatatcacctagtttcatacttaaaaataaacaaatgcttgctcaatgaatttgtaagtcagaatcaggaacttgaccatgttgtagaagaactcgagaaaatcgctgtggtgaatctcctacagaatagatccatcatctctctcattggaaatgttcagagatcatcactaatattggagaagctgatattggaaaaaaaaaccactggttttataatgtattttttaaatttaggcacaagttaattcatgtcaacctgcag

SEQ ID NO: 3919 - DNA, 1692 bp, Glycine max
  misc_feature (1)..(1): n is a, c, g, or t
  misc_feature (60)..(60): n is a, c, g, or t
  misc_feature (96)..(96): n is a, c, g, or t
  misc_feature (126)..(126): n is a, c, g, or t
  misc_feature (128)..(128): n is a, c, g, or t
  misc_feature (134)..(134): n is a, c, g, or t
  misc_feature (165)..(165): n is a, c, g, or t
  misc_feature (180)..(180): n is a, c, g, or t
  misc_feature (191)..(191): n is a, c, g, or t
  misc_feature (210)..(210): n is a, c, g, or t
  misc_feature (232)..(232): n is a, c, g, or t
  misc_feature (243)..(243): n is a, c, g, or t
  misc_feature (256)..(256): n is a, c, g, or t
  misc_feature (275)..(275): n is a, c, g, or t
  misc_feature (460)..(460): n is a, c, g, or t
  misc_feature (582)..(582): n is a, c, g, or t
  misc_feature (848)..(848): n is a, c, g, or t
  misc_feature (911)..(911): n is a, c, g, or t
  misc_feature (966)..(966): n is a, c, g, or t
  misc_feature (1064)..(1064): n is a, c, g, or t
  misc_feature (1123)..(1123): n is a, c, g, or t
  misc_feature (1264)..(1264): n is a, c, g, or t
  misc_feature (1521)..(1521): n is a, c, g, or t
  misc_feature (1569)..(1569): n is a, c, g, or t
  misc_feature (1618)..(1620): n is a, c, g, or t
  misc_feature (1632)..(1632): n is a, c, g, or t
  Peptide Sequence Number=SeqID_7746
  Probeset Number=SeqID_13698
naagagagcgctctatgtgttgtctcgtgtgtgacgatcattgagcgatgaacggatcgncagcgtctgatcgcgctcatgatactctccgtcgangagcaggtcctatgtgagcgagatcctcgngntgtccnggggagattgtgagtgcatcgcgtcgatagngcgacgattcgacgnatgtgagtagncgtcactaggtatcattantttgaccgcaggtatgtctagntcatcgtcctnattaatacatgancatattgtatgctaatgantgctcgatcagagtaccgtctgtgtagactacatcgctcatacgcgcacggcgttggacgtatatatcaaagaggtgaagggcgagtcggatcatatactgcatcatctatatgcctgagtctgtatctggaagagatcgccgcgtgatataagagatagtgtgtatatagtactggtagtcctnagcgcgcttctcatcatgagtaggtggctgcgtatagctctgtatactatcagcggtgtgcggagcggtcagacgcgcgtaacgagtcttgtgctgttactcatgactgatgtgagctgacnctgcgtctgtagcatcacagggagatgacgtgtgttagaagtgggcgttggcggagcgtatcactgtcgtgaggtgaaggtggcacgtgcacgatcatcttatcgaagatatacggtgatagtcttctagatgatcgcgcgttctgttggtgagttggggtgaggctgcacgattttatttcaacatatatagccatacggtgaagatagaatattgtggcctgctaagagtctggagtagtctcgagtttggcaggtacactatngtgttcactctccacggcagcttatattagcgaggtccctcaatcccagtgataatacgcagngcctgtgtggtgtacatgaatggtagcttatgtatatcgaggctagtgtgtggantagcgtctcgcgcctcgcgcttatcatcatgattcaccgattaattacttggtggtgattttgtgtagcacgaatcgtcgcgtggggagagcctatgnatattatacgctggcgtttctagtatgacattgtggtagaggtagctgtatgatgtgtngacttatttgtgtgtttggcatagtatgttatcagtgtctagcatgagtgctagcatcgcagattgagaagtgatatgaggcgctttgtggtgcctattttgctctcatgaggacacattctatttagtatatgacgaganttgtgttgatgagatgcggctttggatcttataagagattacagcagccacgttcgcttatgaaggcatctttgttgtgattgtcagagatacgatacggcagggtcttagatagtaggagacattgtattcacactacacttacttgtatgagatcgctactatgtagcatttgttcactactacctcttatatattatggtatagaaataaaagagaagaaaatacaatagagtactatctctccgcgacacgtncgcgcgggggatgtattctcctcatatgtctatgtgagagcggcgcgncacgcttcaccgcggtggggtggtattctacccattagttattggggannnattaatacaagntagggcatgaagtctgactgtatacgctgggcaccagccgacgaggggggggcagcggca

SEQ ID NO: 3920 - DNA, 489 bp, Glycine max
  Probeset Number=SeqID_13699
atgtcctagataagctccaccgcaatccgccctcctccgccatctcctttcctttctctagcgagcatcttcgcgtgagcatttttcctttctcgcggatccatgaccggaggtgctcgcaggcatggcggccgtggcaggtcaccgccgcgcaagttcgcccggcatgacgcagccggcagctccagccggtccgccatcgagtcgtggcggtctaagcatgggtgcgaacacggccgcctctcctgcagcaacgaccagagtgcgtgggctgacttccacgagctccaagaggtgcttttcccgcacaccaagaggtgccgggaggtggatgaggagctcctcgccacggagcgcgcggtggaggccggagaagaaggcatcgccgacaggctcgttgccgcaaagaaggaccacacctacgcccatgcttgccgcaagtcggcagagaagttctacctcggcctcaacaactgagtcggtcgtccc

SEQ ID NO: 3921 - DNA, 1688 bp, Glycine max
  misc_feature (1)..(1): n is a, c, g, or t
  misc_feature (23)..(23): n is a, c, g, or t
  misc_feature (78)..(78): n is a, c, g, or t
  misc_feature (96)..(96): n is a, c, g, or t
  misc_feature (102)..(102): n is a, c, g, or t
  misc_feature (165)..(166): n is a, c, g, or t
  misc_feature (170)..(170): n is a, c, g, or t
  misc_feature (292)..(292): n is a, c, g, or t
  misc_feature (294)..(294): n is a, c, g, or t
  misc_feature (337)..(337): n is a, c, g, or t
  misc_feature (471)..(471): n is a, c, g, or t
  misc_feature (477)..(477): n is a, c, g, or t
  misc_feature (569)..(569): n is a, c, g, or t
  misc_feature (883)..(883): n is a, c, g, or t
  misc_feature (916)..(916): n is a, c, g, or t
  misc_feature (920)..(920): n is a, c, g, or t
  misc_feature (1004)..(1004): n is a, c, g, or t
  misc_feature (1021)..(1021): n is a, c, g, or t
  misc_feature (1092)..(1092): n is a, c, g, or t
  misc_feature (1194)..(1194): n is a, c, g, or t
  misc_feature (1240)..(1241): n is a, c, g, or t
  misc_feature (1292)..(1293): n is a, c, g, or t
  misc_feature (1516)..(1516): n is a, c, g, or t
  misc_feature (1578)..(1578): n is a, c, g, or t
  misc_feature (1580)..(1580): n is a, c, g, or t
  misc_feature (1591)..(1591): n is a, c, g, or t
  misc_feature (1653)..(1653): n is a, c, g, or t
  misc_feature (1658)..(1658): n is a, c, g, or t
  misc_feature (1670)..(1671): n is a, c, g, or t
  misc_feature (1675)..(1676): n is a, c, g, or t
  Peptide Sequence Number=SeqID_7747
  Probeset Number=SeqID_13700
nattcactatacggctcgcgagngggtcgttgcatcggctctgctatagtgtctgtgttgtatgagcgctcgtagctntcgtataagtatgattanctctanacatacacacatacgtgctctgtcactatagcgtgatttatcgtaggtcgctagcgatgaaannaatnaactcacaaattagtatcgaacgtgtctcacgctactcgtgtggtggtgtaggagtgtgtgatcttatcgcacacctcgtgtacgatgctctagtgcatatcacactgatcttcatcgcacnanatacggtcagatattgtgttgtgtcgagtagttgtcgcgtgantgagagtagtcagtgagagtgagcgtcgtgtagtgtggtagttgggatacgtcgatatgtggctgcttattacgtccgtaccgtgtgttgttatctactattagtatgtatatctagagtgttctcttctctcnttcctncctactattcatcatccaatatctatgtgagtatcgcaacctcatgaccacatctctcgttgactcagtatcacaccgtctatgtacgatgntcaatatgtatgtcgtagtaagttactgtcgctcacggtatagtagtagcctctctgatattggttagttattatgcggctgtcgtgccgacgagtgcgcgattatggctgttcgagaggtatgtcttcatgatatcgagttctcaacggagctctgtagatcagtctaagtacgacgtcgactgtgacattgattgtgttagtaatctgtgtatctgactcttatattcatactcctaactcgcagcatgatgtcgagacagcacacgagcgcagggcgagcgctgggcggcgtgggtagtgcgtcgttgtgngcgcgtcggtgtgtggtgtggctagcgccagcncgcnaggatacagagtggatgtagtacgttgtaatgagacgagagatatgtgtatgagctgtttctatattagtgtgcgagagtcacngttggttgtgataatgntgcggtgtgcacagcgataagtgcgagacggtcatccgttcttttactcatctatgctactgattgtatcnattttgtcttgtattctttgaattgtgcacattcttttacttatatgtgtctgtgttgtagattattctgtatatctttctgtttgttcgtgttatcatacnaaaatatatagaggtatactttctgctgtgtgttggtgtgcgcgcnncggcgcgagcgacggggggagatggggagtgggggggtttgttctcgtgtnngcgtggtggagttgatcaagtgggtggtgagatggagagtggtcagtgagagtagatgagtgagagtatagtgagtcttgaaatgagaagagtgagagagcacgcgcggcatgcgcatttccgatacgcgcaggaccacgcgcttgttgtcctctttgttctgtgctgtgttttgtcgttgtgtttagcgcttgtcgtctgtctgtagtgtgcggtattaacnttttagcgactcgctatcgaggttcagcgcagataagcacagattagatagtctataatatntntatatatattntttcggctaccgctcatgtgctctctgtgacgtgtcgtcgtagccactagacatcccacacncccanccaaccacccanncacnnccaacacccccc

SEQ ID NO: 3922 - DNA, 578 bp, Glycine max
  misc_feature (263)..(263): n is a, c, g, or t
  misc_feature (383)..(383): n is a, c, g, or t
  misc_feature (502)..(502): n is a, c, g, or t
  misc_feature (511)..(511): n is a, c, g, or t
  misc_feature (555)..(555): n is a, c, g, or t
  Probeset Number=SeqID_13701
tcgagtcagctacgtaggccccccccaaaagtattattaatttaactgatcagcgaacggaagttacgaagaccgaacattcgaacaattcaacgccaacaagcaagaataatgataagaaagagtcgacaaatagtaagcaatcacaagttaagaaacaaatcaataacactaaattaagcaacaaaaacgatgaatcatcagcaaaagagttcattactgccgaatcgagttacgatagctcaagaactgtttcactcganaccaccgatactccgagcgtcatctcatcatcgaaatcaaactcatttaattcaactaatcaacctcctgtgatcatgttcgataataagaacaacaatccgagtaccacatttacattnggattttttgatgagaatgctcaatttcaaaataatttagttgaagagcatatgaacgaacagttcgattcgatcaatgtgaattcagtcaatttcataagtaaagaaactggaacaangaattcgangttagtcaaaaatccacagcatcagcaacagatcactcatctgnccgagttgatcgatatcgaatca

SEQ ID NO: 3923 - DNA, 577 bp, Glycine max
  misc_feature (535)..(535): n is a, c, g, or t
  misc_feature (562)..(562): n is a, c, g, or t
  Peptide Sequence Number=SeqID_7748
  Probeset Number=SeqID_13702
aatcgaactgaaacggataccatcgtgcccaaacgaaatagatcccgtctatgtttgctgcaatccgacacattggttccggatatgtcgaacagattcacctccacctccctactcaaaatttgccatggaaagactgaagcccgaagatcgtgcgccaagcgaagaacgtgtacgtgatcctagcatctttccagggtcactcagtaccgatggtgaagaaaaatcatcatcgggctggtgtcagttggcgtattgggagcaatcgcaaagagtcgggcgcttatttcctgtagagaatccggctgtgaatatattcgctgaacaaacgcgcggcgatggactatgtctaacaacattggcaatgcaacgattgtcagctacaccggatgtggttctgaaagcaagacaaaaaattggcttaggggtgacactaagtcgagaatcagatggtgtgtggatatataatcgttcatcggcaccagtttttgtacattcaccaacacttagtgatattgattcgagatctgtgctngtttaccgggtaccacctggccattgncttcgtgcttttgat

SEQ ID NO: 3924 - DNA, 347 bp, Glycine max
  misc_feature (206)..(206): n is a, c, g, or t
  misc_feature (259)..(259): n is a, c, g, or t
  misc_feature (270)..(270): n is a, c, g, or t
  misc_feature (278)..(278): n is a, c, g, or t
  misc_feature (285)..(285): n is a, c, g, or t
  misc_feature (291)..(292): n is a, c, g, or t
  misc_feature (325)..(325): n is a, c, g, or t
  misc_feature (339)..(339): n is a, c, g, or t
  Peptide Sequence Number=SeqID_7749
  Probeset Number=SeqID_13703
ttttttttttttttttttggaaattacaaaacttgtttaattcaaatttttaaagttacaccattttttttgtttttagtttttcaataaattttctatttttttgagggtttttttgaaatcaaaattgaatcaatttatctcttgttcttgttgaaacagagatgctgaataacgcatcttcacactctattcgagagcaggcncagatttggctgtttagcttgaacttgcagcttcaacggtctgtgcggatgcnatctcttttgnacggaacncctgtanaacggnngacagcctcttcggctctcgatttcaatgactnttgatgttcgagcntgtgcaac

SEQ ID NO: 3925 - DNA, 1401 bp, Glycine max
  misc_feature (26)..(26): n is a, c, g, or t
  misc_feature (1157)..(1157): n is a, c, g, or t
  misc_feature (1272)..(1272): n is a, c, g, or t
  misc_feature (1383)..(1383): n is a, c, g, or t
  misc_feature (1401)..(1401): n is a, c, g, or t
  Peptide Sequence Number=SeqID_7750
  Probeset Number=SeqID_13704
gtcgggcgcggggtggcatccctatnctcgtcaactaatgtatgtcaggtggcgcagtacctataatctcgactaatatagtagtcgcgcgcgcatctccgtgcggcgcgctgcagtagtagtgtttgtagataagatgatagtgatgaagtgcgtatgaggagtgggtgctgaagtcttactacgactttatatcatatatgtacgctgcatatagaaaagacaggatatcgaccacgcgcgcctctcggtcgtcgtgttgtgcccactcgttggctctgcacttctccgacacgaccgacggcaccatgcgcagcgcgagtttatgtgtggtgtcgttgatcgttattctctctctttgtctgattagttatgttgtcatgcggttgtagcataatgactactaccagtgtgcgccgaacagggagtgcggtgattgatgctgtcatacatagtcgtcagagactacggaaacttctagccgacagtagagtgtatggggtgagtcgtgatggaagcgtgatattatgagtatagtgaaggacggagggcgtaggagatgaggaatgagatggtgcagaagttgacagttgagtctgcaatattaacagatgaataggaccgctgcctgtaacagcgagggggatatgattgcatactgctgcatgtgtcacgtcacgctgcgtattgtaggcggatcgcagtgcgagtacgtaatcatgctgtatcgcgacacgcgcgatagtctactatctgattgcatgtaaattcgatgctaatattcccgcactctgcgacagatctatagtattttgctataaccgacgagatataaactgatactacaaaccctctcttgtattaggcatatagagtttatacggtgatgtgtagtcgccgcgcgagttagttcacaatatagctgatctagtctactcgcaatcgagtgcttacggcgttccaccgaactgacgcacggtaatgtatgagatcgtcgctatgtctgtgtttgctgtgtttcatagtgtccgtcgcgaagcacgactctattccgactcgatcaggacatccgtgcgacgttggatatagtatcatgtttcttaactcgactttgatgtgtctgtactgtatcttaattattgtatgttcgatcacgntcacacccagttagtcaacgcgtacgtacgctccgtgctataataacatcgtcgcgtctacgacactgagctctctacgtgtattacaatgttgttacgctgtgtctctcgtttntacgctcactcaatgtgctattatgtgattgaatatctccttgttactaacacgagtaatatagtatactgtagactcatatgagatatattcattctatgcgattgatgnacggtcaatatcagaagn

SEQ ID NO: 3926 - DNA, 1513 bp, Glycine max
  misc_feature (24)..(24): n is a, c, g, or t
  misc_feature (26)..(29): n is a, c, g, or t
  misc_feature (34)..(34): n is a, c, g, or t
  misc_feature (36)..(37): n is a, c, g, or t
  misc_feature (47)..(50): n is a, c, g, or t
  misc_feature (57)..(57): n is a, c, g, or t
  misc_feature (62)..(62): n is a, c, g, or t
  misc_feature (64)..(68): n is a, c, g, or t
  misc_feature (70)..(70): n is a, c, g, or t
  misc_feature (72)..(72): n is a, c, g, or t
  misc_feature (74)..(76): n is a, c, g, or t
  misc_feature (78)..(78): n is a, c, g, or t
  misc_feature (80)..(80): n is a, c, g, or t
  misc_feature (82)..(82): n is a, c, g, or t
  misc_feature (85)..(85): n is a, c, g, or t
  misc_feature (87)..(88): n is a, c, g, or t
  misc_feature (151)..(151): n is a, c, g, or t
  misc_feature (167)..(167): n is a, c, g, or t
  misc_feature (188)..(188): n is a, c, g, or t
  misc_feature (190)..(191): n is a, c, g, or t
  misc_feature (193)..(193): n is a, c, g, or t
  misc_feature (197)..(197): n is a, c, g, or t
  misc_feature (200)..(201): n is a, c, g, or t
  misc_feature (239)..(239): n is a, c, g, or t
  misc_feature (253)..(253): n is a, c, g, or t
  misc_feature (271)..(271): n is a, c, g, or t
  misc_feature (318)..(318): n is a, c, g, or t
  misc_feature (333)..(334): n is a, c, g, or t
  misc_feature (348)..(348): n is a, c, g, or t
  misc_feature (390)..(390): n is a, c, g, or t
  misc_feature (392)..(392): n is a, c, g, or t
  misc_feature (537)..(537): n is a, c, g, or t
  misc_feature (563)..(563): n is a, c, g, or t
  misc_feature (636)..(636): n is a, c, g, or t
  misc_feature (660)..(662): n is a, c, g, or t
  misc_feature (664)..(664): n is a, c, g, or t
  misc_feature (688)..(688): n is a, c, g, or t
  misc_feature (702)..(702): n is a, c, g, or t
  misc_feature (736)..(736): n is a, c, g, or t
  misc_feature (814)..(816): n is a, c, g, or t
  misc_feature (822)..(824): n is a, c, g, or t
  misc_feature (829)..(830): n is a, c, g, or t
  misc_feature (843)..(844): n is a, c, g, or t
  misc_feature (846)..(846): n is a, c, g, or t
  misc_feature (850)..(851): n is a, c, g, or t
  misc_feature (853)..(853): n is a, c, g, or t
  misc_feature (1066)..(1066): n is a, c, g, or t
  misc_feature (1092)..(1092): n is a, c, g, or t
  misc_feature (1191)..(1191): n is a, c, g, or t
  misc_feature (1254)..(1254): n is a, c, g, or t
  misc_feature (1268)..(1268): n is a, c, g, or t
  misc_feature (1276)..(1276): n is a, c, g, or t
  misc_feature (1279)..(1279): n is a, c, g, or t
  misc_feature (1281)..(1281): n is a, c, g, or t
  misc_feature (1509)..(1509): n is a, c, g, or t
  Probeset Number=SeqID_13705
tggttttttgtggtggtgttgtgntnnnntttcncnncttctctgannnntggtccnccacncnnnnnancnannnanananaancnnacaacattataatccacatattctctcttatctgtgtgggcccccacccactccaaattacancaattaaaataagggnaagtctctacctcacaccccnanntntcgncanncggaggggatttttagttgttgttttgttttcgctctngccagctgcgttanctcctctgccccacgctnttgctgccgccgcgtcgcccacaccccacccaatatcaaatacatanattaattacacaccnncccgcccccgccanagaagctccacccacaacatccacaatttactatagtgttgngnagttgtgtgtctcgtcggtccagtcggtgtgtgctgtccgcatgtgcccagacacgacgcccaccagtactgaacactattatataataaataaacacagacaatcttgacaccctgactacgcgctctcgctctctctctaccnatatctagagctaggtgtataagaanagacgttcaatgataatatgtatttatccaccctccctcacacacaatgattgtgatttgtggaggttggggnaaggtggtgtgtgtgtgcggtgcnnncntatttagttgtggtggtcgcaganaaacacgctacgancgcctcctgcactcaagacatactcgtacgcatncgcacaagcccgaatatgaataataagtagcaagaatcatctattcagtcttccaccccactgatgatattatttaannnacaaannnaaaannattattggatgtnnanttannancacaacaccgccaccccccccctctcgccctcctacttatgtgttgttcgtgtgaccgcaccgcctctcccctacagatctgtgtgtgtggagtagtgttgtgtgttgtgccgcgctcgtttatgtatctgtgtttgtgccctcccgcccacccccacaatcttcgtgagtaacccgactcgaccacgagcaggtggctgtcatgctgaccancactacctggagatgtgcgttagtantttactcacgatctgtgcgctgtaaccgataccgacgcctctgcctgccacacgagccttgtcacggcgtgctggtgtggtgtgtgtgtgatgcctcgntcaccagctcttctcaatctgcaggcgagcttgtctctgttaccactgcctaactctctcccnggctccggtccccnccgccacnacncnatacttaaacatattcatcctgccagtgactgcgaacctgtgacgatcgatctggaaacattcgccgcgacgcgtgtcactgtcactcatccctcctctaccacacgactctcgcgcacacatctcacgcatccgtgcctgttggttgttgatctagtgtgttgtctctcgcgtgcttgatgtcgtgtgtgctctgtactctcatcttagattgcacgttctctcttncctg

SEQ ID NO: 3927 - DNA, 573 bp, Glycine max
  Peptide Sequence Number=SeqID_7751
  Probeset Number=SeqID_13706
tcagctacgtaggccccccccccaattcacactcaaggacaaaaacggacgtgataacaagatcaccgtcatgctcaagtacattcccgtaaagatgcgtcttgatcccagcgaatcattcaacaaccaaggtacattgcgagtagatgtgcttgatgcggcagatcttccagctgcggaccgtaacggcttctcggatccttactgcaagttcatgctcaacgataaggaggtgtacaagaccaagacacaaaagaagactctccacccagcatggaacgagtactttgaggtacctgtacgaagtcgaacagcggctgactttgtcgtcaatgtctacgattgggactttggcgacaaggcagacttccttggcaagtcatccatcaacttggagattctggagcctttccagcagcaagaggtcacgcttgctcttgatggcaagtcaggcgccatccgacttcgaatgttgttcaagccagattacgtcgtacgatcccgtcaaggctcgagcacattctctggcacctttgctgttccaggcaaggtcatcggtgcgcccgtcaaggg

SEQ ID NO: 3928 - DNA, 705 bp, Glycine max
  misc_feature (1)..(16): n is a, c, g, or t
  Peptide Sequence Number=SeqID_7752
  Probeset Number=SeqID_13707
nnnnnnnnnnnnnnnnagccccaccacttggttttcataacccattctccatctcagaatggagaatgcgagaataagccagtggttgatccttctggtgtgtgcgctgctgttgctgatatcagaagcttcttatgtgccaatcactattgttcagaacgcggtagcaaaaggagctgtttgtttggatgggagtccaccagcttatcattttgataggggatttgaatcagggattaaacattggttggttgcatttgccgcaggaggatggggcaacattgtccctacctgccttggtcccaaaaccaatctgttaaggttccttctaagcaatgggccaggtaatggcctttttcggaaatttggaaaaacggggaaatggtttaacccaaatttccacaaacgggaaaaaaaaaaaggggaagggattggggaagggccccccctttccggggggggggtgaaaaaaaggaaaccccggggcaaaatttcccccttctaaagggggggggattttttccgggggggcgccggggggtgtttttccaaaaaaaggggaaaaaaaagggcccaaaaaatgtattttttctccggggttccccggggggggaaaaacaacaaccccgccgggggggggggaattttccccccccctccccccgcgggggggggaagaagaggaacctccctctattgtgtttt

SEQ ID NO: 3929 - DNA, 1507 bp, Glycine max
  misc_feature (155)..(155): n is a, c, g, or t
  misc_feature (307)..(307): n is a, c, g, or t
  misc_feature (856)..(857): n is a, c, g, or t
  misc_feature (860)..(860): n is a, c, g, or t
  misc_feature (957)..(957): n is a, c, g, or t
  misc_feature (1048)..(1048): n is a, c, g, or t
  misc_feature (1427)..(1427): n is a, c, g, or t
  Peptide Sequence Number=SeqID_7753
  Probeset Number=SeqID_13708
tgtgtaactggagagtagtggtgaggtgggtggcggaccccgcgctcccactttgtcgcgtgtatatggatcatacacgcatatccgacgagtgagtcgccgagccactgcacagcgcggagtgagtgtggtacgcaggaccgcgccgcgaccgnatgtcgatagttagtcgtatcacccgtatctattaagatattatgacgaagtgtactacatgatatgcgcacacagatatatgtgtaagaagagacacgaacgtcccacacgtcttgttcccacctactctctattacacccgcgccttctntctgtatcgatgtggcgccacacacaatctgttatattattgtattgtacgataggagaagtggtgagagaagcagcgcacacgccgacgcacagcgtatccgcactgcttgacgattagtatatattgtgtgttggaccaccacacctcctgttttgagcgagagcagatagtgacgcgagtggtggcgcaccgggtatttaccgcgtgtgtgtgtcacacaccgcactttggttggcacaccgcgttttcctgttgttgtcgcgcacggtgaggagcacaatagtagccgccgcgcggggtggcgcgcgtggtggtgtgtattgttgtctcttgtgtccaccaccgaattgtaccccagatgagattatgatgcgctgtggtgtgtacaccatcttagacgccgcgcatgtagagtgatggaggtgtggagagcacaaccgccagggcgccatagttcgcgagtgtgtgaccacgattgtatttatgatttgttgtgatgtttgttgtcaacgcacacgcctgtaagtaaattatacaggtgggacnntgntgaggttgcgggctgcgccgcggccctggtttcactcgttgttacgcccggtagacgagtgtacaggagtaagttgtggggtagagagtcgccgccncagtatacacgaagtaccggagcgggtagcggagtagcatgtccacgtgttgtggcccgccggttgtgcgcgggttggtgctgcgcccgtncctcgttgtgagttgcacgacacagattatgagcgaggtaggtggctggccgtctggttggcgcccgttttctcccgcccgcccccccgcccgcaattttgttatccctgatacacaccaacgcttgtgttctttgagcccgatgtattgcccgttacccggccgccgtgtctccgcggctgtgttgtatgaactcagtcacgcctgttcacgaccgttagtacccgttgatcacacaattagcaacgcaatgtcaccaggttaatccaccaacaagtcccaacgtgcgccgcatgtgagtgtgtggggcgcggcggttgttgtgtgacctggagcgccagttgccagatatgggacccacggcgcctttgcccgccgncatttagattttagaaaaatgtcgtgtcgtctataatttgttgtgtgcctaaaaaaaaaccccaaatatattattaacaa

SEQ ID NO: 3930 - DNA, 791 bp, Glycine max
  Probeset Number=SeqID_13709
ttgcaacccgtgcgcgcacgagtgtaacagccaacagtgtgactgtggaagactctccaattcaatagatcaatatgggtgtmcccggctggtaacgctgagactggaaagaagctcttcgtccaaaggtgttctcagtgccacactgttgaaaagggtggaaagcacaaggttggcccaaacttgaatggtcttattggccgcaagacaggccaggccccgggcttcccttacacagacgccaacaaagagaagggtatcacttggaatgctgacactctgtttgagtacctggagaaccctaagaagtacattcctggcacaaagatggtgtttgctggtttgaagaaaccccaggaacgggctgatatcatcgcctatttacaagaatccaccaagtagatgctcaattctatcctaatatcattgttatttatttcttagtaattgaagtcatcctggtcatgaggctcatggactttgtcaggaccatagaaactggtagatgtggtctgctaaatgttgtgacgtgagtggccgtaaaagtattcgcacactgtgtgtattgtgaaattattttattgggatgaacgatgttggctgagccaactaatttattggccctggtgtttgggcaaacgaaaccaatctcattaaaccaaataccctgtctctttgggagatgagcttaattttattgagcagtcttatttytgcaggcagatagctgctgtatgattgatggatgtttctttytgagaaatataataaactcatcaatgaacagatcg

SEQ ID NO: 3931 - DNA, 1888 bp, Glycine max
  misc_feature (46)..(46): n is a, c, g, or t
  misc_feature (64)..(64): n is a, c, g, or t
  misc_feature (115)..(115): n is a, c, g, or t
  misc_feature (186)..(186): n is a, c, g, or t
  misc_feature (245)..(245): n is a, c, g, or t
  misc_feature (256)..(256): n is a, c, g, or t
  misc_feature (397)..(397): n is a, c, g, or t
  misc_feature (444)..(444): n is a, c, g, or t
  misc_feature (496)..(496): n is a, c, g, or t
  misc_feature (542)..(542): n is a, c, g, or t
  misc_feature (545)..(545): n is a, c, g, or t
  misc_feature (607)..(607): n is a, c, g, or t
  misc_feature (669)..(669): n is a, c, g, or t
  misc_feature (739)..(739): n is a, c, g, or t
  misc_feature (741)..(741): n is a, c, g, or t
  misc_feature (747)..(747): n is a, c, g, or t
  misc_feature (782)..(782): n is a, c, g, or t
  misc_feature (796)..(796): n is a, c, g, or t
  misc_feature (835)..(835): n is a, c, g, or t
  misc_feature (867)..(867): n is a, c, g, or t
  misc_feature (869)..(869): n is a, c, g, or t
  misc_feature (910)..(910): n is a, c, g, or t
  misc_feature (941)..(941): n is a, c, g, or t
  misc_feature (950)..(950): n is a, c, g, or t
  misc_feature (971)..(971): n is a, c, g, or t
  misc_feature (973)..(973): n is a, c, g, or t
  misc_feature (976)..(976): n is a, c, g, or t
  misc_feature (983)..(983): n is a, c, g, or t
  misc_feature (993)..(993): n is a, c, g, or t
  misc_feature (1007)..(1007): n is a, c, g, or t
  misc_feature (1085)..(1085): n is a, c, g, or t
  misc_feature (1159)..(1159): n is a, c, g, or t
  misc_feature (1173)..(1173): n is a, c, g, or t
  misc_feature (1268)..(1268): n is a, c, g, or t
  misc_feature (1276)..(1276): n is a, c, g, or t
  misc_feature (1283)..(1283): n is a, c, g, or t
  misc_feature (1308)..(1308): n is a, c, g, or t
  misc_feature (1371)..(1371): n is a, c, g, or t
  misc_feature (1382)..(1382): n is a, c, g, or t
  misc_feature (1442)..(1442): n is a, c, g, or t
  misc_feature (1444)..(1444): n is a, c, g, or t
  misc_feature (1498)..(1498): n is a, c, g, or t
  misc_feature (1594)..(1594): n is a, c, g, or t
  misc_feature (1613)..(1613): n is a, c, g, or t
  misc_feature (1631)..(1631): n is a, c, g, or t
  misc_feature (1671)..(1671): n is a, c, g, or t
  misc_feature (1700)..(1700): n is a, c, g, or t
  misc_feature (1732)..(1732): n is a, c, g, or t
  misc_feature (1749)..(1749): n is a, c, g, or t
  misc_feature (1751)..(1751): n is a, c, g, or t
  misc_feature (1767)..(1767): n is a, c, g, or t
  misc_feature (1769)..(1769): n is a, c, g, or t
  misc_feature (1773)..(1773): n is a, c, g, or t
  misc_feature (1783)..(1783): n is a, c, g, or t
  misc_feature (1786)..(1786): n is a, c, g, or t
  misc_feature (1788)..(1789): n is a, c, g, or t
  misc_feature (1811)..(1811): n is a, c, g, or t
  misc_feature (1815)..(1815): n is a, c, g, or t
  misc_feature (1826)..(1826): n is a, c, g, or t
  misc_feature (1853)..(1853): n is a, c, g, or t
  misc_feature (1879)..(1879): n is a, c, g, or t
  Peptide Sequence Number=SeqID_7754
  Probeset Number=SeqID_13710
gtagagagcgctgcccactactacgtaagtgaatgctggatagttnacgacgtacatacaagcnagatgcatcgagtagagcactagccaccacatcattcccgctcacacgacnacactaacaatataatcatcaaatacatttactatatcaatagtatgacgtcttctgtgtgtgagtgatanagtgaatgcgctgtatctgtgtctgtttactgtacgtctatgtgctgtgtgtatatgtnagtagatgtangacttcgcgctcggctcgtcgtatcagctacttattattatagatgactcacgatgctagtacatatcgtctcggccgagtcgtgtgcgttgcgagatggcgactatagataagctctcagtacgagagatatatcttcancagatatatgcatgagctgatcttcttagatgactacatcatactcngtcatctcgtcgtgtgctctcactacaactcacactcactaacatctgcaanctgcatacatgtgctgtgtgatagatcagatagtgattatcaatancanactctcgcgatccgactcgcgtgcgtagctactctatcgtaatctgtactgcgtcatatctnacgtacaactaagtatattattagtgatgccgatattaataccgattagagtgaagttacangcgcgcgcacatcgcactcacatacactaccggaccgaacgccatacagtgagcgaacggtagacacatnangttaancgtagtatagctgtgcgagaacgtaggtaaacgcngcgtctcgtcgctnggtgactgttccactcatgtattgcgctgtcagctacgnccgtccgtattatgaatggcgatcgcatcagnancgcagatatggatctatatacattctgatacgtcttcgtgngtcacgcagtgaccgcgcactggcgtgcganatcactatngagtatacggcgtatggattntnatngcgtgtncgatgacaantgcgacacgcgtgnctctacgtgtacttgtttagattgttgtataatatggacactataatactcacacacccacacagcgccgtgcgacantacttataatctcctgcgctctagtcagtcgtcgacggtcgtctcgtatatctatatgtagacgctgagagtcnatgattctatatgnccgacgcagtacacgctctataccacagtgtcgcgcgtggtgtaagacgacacaacactactaataatgccgcgacgactgatcgtgctgttgtngatgattngacaatntacgtatctgtcgtgagcattacgncgaagcgtgtagagagtaagcgactcgtatgcgactgaaacgctcactattgcgactatatcnctcgtgtcgtntgatctacgtgagcgcgcgcgagtgcggtgcagtcgcgtacgtcgattatcgcgcgctantncatgactgtctcgctataattatgataatctttcggatgtagtcggcgttgcgncggcgagatcgatacgtgctatacgtcattatttatatgcgcgcgctgcagcggcgtgtcggcgtgacatatgtctatgcgctgtatcatggatanatacagtattacgtacgcncgagacgcattgaacagntatgacactcgctgtacgcccgacgacgtacgtcgtcatnatctcatcatatagcctgcgtcgctcgtncgtgctcgacgtcgcatatcgattcacgatantcgcgcggatcgtgtantngcgtccaccaagtgantncgtngccgtggctntananntattcaatcatcatactactancacngtcactacacngacgtgatcgatgcttcgacggcgcanattatagtcgtcatcagacagtccgntgctgttcg

SEQ ID NO: 3932 - DNA, 1564 bp, Glycine max
  misc_feature (10)..(11): n is a, c, g, or t
  misc_feature (16)..(16): n is a, c, g, or t
  misc_feature (18)..(18): n is a, c, g, or t
  misc_feature (29)..(29): n is a, c, g, or t
  misc_feature (58)..(58): n is a, c, g, or t
  misc_feature (95)..(95): n is a, c, g, or t
  misc_feature (147)..(147): n is a, c, g, or t
  misc_feature (190)..(191): n is a, c, g, or t
  misc_feature (214)..(214): n is a, c, g, or t
  misc_feature (586)..(588): n is a, c, g, or t
  misc_feature (696)..(696): n is a, c, g, or t
  misc_feature (1204)..(1204): n is a, c, g, or t
  misc_feature (1248)..(1248): n is a, c, g, or t
  misc_feature (1272)..(1272): n is a, c, g, or t
  misc_feature (1340)..(1340): n is a, c, g, or t
  misc_feature (1407)..(1407): n is a, c, g, or t
  misc_feature (1422)..(1422): n is a, c, g, or t
  misc_feature (1434)..(1434): n is a, c, g, or t
  misc_feature (1453)..(1453): n is a, c, g, or t
  misc_feature (1455)..(1455): n is a, c, g, or t
  misc_feature (1471)..(1471): n is a, c, g, or t
  misc_feature (1519)..(1519): n is a, c, g, or t
  misc_feature (1564)..(1564): n is a, c, g, or t
  Probeset Number=SeqID_13711
ataataaatnntatanantatctaatatnatgcgcacgaagatagtatatatgatctngatatatatcagaagagaaaaaacggaagcagaccanctaaagagaataggaggtacacgaatattattcaggaccgcgagaagatggnaccatgctatataatgagagagacatgtcgacatatacgcgannccgcaacgactatcttgatgtanctgtaatttgtacatgaggcccgtatgccacatccgagacatgatcactatattctatctataccctactcaccccttcccactctcacccacgtccgactcctgcactgctctcacgctgttctggcgagtagtattaggggtccgcgatcgacatgtgtagcctcagcccgcatcggtctcgttacacacacgcgtggagaacggacacgctccgctcgtaggtcatacgtacgaacagcagattcgtagacactgccacatactgtcgtctgtatagctgagtattgtatatacgtgatttcgagtcatgatatgaactgggtcgtatatacaatcacagcacgacggacgagcacgagagagacaatnnnaatatctagtacgtcactagcacatataggatattagtggtcacagttattgaatgtgtgtgcttgtcattggttgtgaggcgccgcactataccactgatgttatantgcatcgcacgctaggagtgacgtgatgtctgcacggagcccatgtatgatgctctattacatactactgcctatctgtctctctgtttctttaatgcaatcccaccacacactaagcggagcggagaattagaatgaaggagctgatcatatacataggcgatagtaaatctctcggcttatcttcgtctggcgtcgtccactgcattagtcgccctctcgtcagactacaacctatcgcgagtagcagcgcgttcaatactgattgatcagatagatactaccatcattgcacagtctcgcgtgtcatcagactatgctactaggaagttatctcattatctctgtcaatcaacatattacagaagcacaaataatatcgtcacgcttatgtatgttcgtcacgattgtctctagtcgctaactatgtgatctcgcgcgcgcaccgacgttgtctgtctgtgactccgagcgttttctatataaatgagcgtatcttcacatatantagtcatacattaatatgcacgattagatctcacaacgaggtanctttgtggctaggggaattataancgcgaatcacacgatcgttctgctgaactatctcacacctcacgtctgactactctccgctgtgtatnggcgttgtggatgcttgtggtgcagcgtcgcggagcacagctcgatatcgatttataggagtgcggntgatatctctacgantatatctacacnataagcatcaacgagacgncngtacacacacgacttncttcgtatgagtgtgattctcatctacgcactcataaccacgagcgtnatccgtgcgatgatcatccatgaccgtatgatatatatctcgatn

SEQ ID NO: 3933 - DNA, 740 bp, Glycine max
  Peptide Sequence Number=SeqID_7755
  Probeset Number=SeqID_13712
ccacgcgtccgtgcttgtttgcacactctgttagggttgcagagacggcgagctccctcacttctggtgcaactcagctttctcattcggcgatctcactctgcaacgcgacctccgtggaggcaaagatgatcgtggctagctactaatgaccttttagacgcccaagcagaggatggaacattaggggagcgcgctgcttaaagcctgcttcctgttgaagaacagaagctgccccctgacttacatgctcttgctgaggaacggtgagatgacaaagaagcctgcttataccgggaagctaacaggtttaatgctcaagaatgctctggatgcttgagagcatatcagacaattagaacgtgggcaaagatggctggcattggacccaaccttgaaagctcaaattaacgcattcctgctgaggacactttcttccccttctcttgatgcccgaacaactgcatcacaggatattgctacagctgctggcgttgagttgcctcatacacagtggcctgaattgataggatccctggtgactaaggctcatcagcttcctgcccctacaagacaggcaacacttgagacccttggatacatctgcgaagatgtttacccacatgctgtataccaggatcatgtacataacatactcactgctgatgttcaagggatgaattcaacagaagaaaacaacgatgtcaggcttgctgccataaaagcattgtacaatgcat

SEQ ID NO: 3934 - DNA, 573 bp, Glycine max
  Peptide Sequence Number=SeqID_7756
  Probeset Number=SeqID_13713
ggtaaagggatgatttttattgttgctctggtggccatttgccttggtgggaaatgggtggaagcgcaggtgcaccatgtggtcggagcagaccgtggttgggatcaaacctcagacctcgtttcctgggctgcaggcagggtcttcagggttggagaccaaatttggcttacctactccgtgactcagggattagtcgcagagctgaaaagcaaagatgaacatagataactctggcatagtatccaatccctttacactttacagatgaagaatttgctaattgctatcattttgaaggattttagaagatgaaggataggagcagggagatggtatagtaaaagagcaaaatgaagaatgaaggagttctatttttcatctgttttgagttgcatttcttgtttttttattctttgttaaatggtttacctactatttatactttgtgttttgtcttggtgttcatctcgttagaacttttttttttatcatttcaaattgtgttgtcctttgattgttgcttaactttcatggtttttgactttttggtggatattttattttagttga

SEQ ID NO: 3935 - DNA, 1842 bp, Glycine max
  misc_feature (26)..(26): n is a, c, g, or t
  misc_feature (28)..(28): n is a, c, g, or t
  misc_feature (80)..(80): n is a, c, g, or t
  misc_feature (230)..(230): n is a, c, g, or t
  misc_feature (256)..(256): n is a, c, g, or t
  misc_feature (289)..(289): n is a, c, g, or t
  misc_feature (375)..(375): n is a, c, g, or t
  misc_feature (563)..(563): n is a, c, g, or t
  misc_feature (686)..(686): n is a, c, g, or t
  misc_feature (703)..(703): n is a, c, g, or t
  misc_feature (714)..(714): n is a, c, g, or t
  misc_feature (716)..(716): n is a, c, g, or t
  misc_feature (826)..(826): n is a, c, g, or t
  misc_feature (952)..(952): n is a, c, g, or t
  misc_feature (1007)..(1007): n is a, c, g, or t
  misc_feature (1131)..(1131): n is a, c, g, or t
  misc_feature (1133)..(1133): n is a, c, g, or t
  misc_feature (1187)..(1187): n is a, c, g, or t
  misc_feature (1217)..(1217): n is a, c, g, or t
  misc_feature (1360)..(1360): n is a, c, g, or t
  misc_feature (1369)..(1369): n is a, c, g, or t
  misc_feature (1394)..(1394): n is a, c, g, or t
  misc_feature (1460)..(1460): n is a, c, g, or t
  misc_feature (1549)..(1549): n is a, c, g, or t
  misc_feature (1554)..(1554): n is a, c, g, or t
  misc_feature (1556)..(1556): n is a, c, g, or t
  misc_feature (1627)..(1627): n is a, c, g, or t
  misc_feature (1631)..(1631): n is a, c, g, or t
  misc_feature (1719)..(1719): n is a, c, g, or t
  misc_feature (1729)..(1729): n is a, c, g, or t
  misc_feature (1842)..(1842): n is a, c, g, or t
  Peptide Sequence Number=SeqID_7757
  Probeset Number=SeqID_13714
cccgcccctcctgctccttacacgtntnttgcgcgcgcagtgctgcttcggcgctagtttacgtatgctgtccagttccncactctttatactgattgctattatgagagagagtaccaggaacacgctcacgcgagagttgtgatagtgtgaggaagacggagcaatacgtgcgtaaatagaagacacaccacacgtacagagtgtgaaagtgtaacacctgatgcagnacccacatatctcctcttgctgtctnccttattcgcatgtttgtcaatcattgagttanagcatcggtagatgcgtactctaccgagtcgctaggatgagcctcactgctccgcccgccaccatgccttctgagtcgctgagtcntcatcagtatgctctcgcatcgtaagagatgtgtcatctgtttatatgtcaccatcatacttctacatcacacatcactcttgtacagctcagtcctaggtttagagcgctgacttagcgatgacgcatgcacactttgtatcgctggcgcattcgccactacagtaaacatgagcatcagacatctnatacattggcatatgcacgagccagtatgttatttcggagtatgcaatcagtatgattgtctcgccgacagtagtcagaggtagtgctagtgcatcggtctgatgtataatttaaatgctgcngctgtgccgcgtcaccncatgtctgcgntnttatattttatcactactacattaggtgcttacatacattgattactacacattgtgctgctcgtcacgctatcttctttcttctagtccatacgtagagtgtcgcacgngctctcttctctatctttgatgtatcggcgcccgccgtagtcggcggactagatatgccgctcggaagtgagtcaagtttatctgtcatatatcaacattcagcgcacacgacgcagacggcgtcncgcatgttcatattgctatcatcccacgtccgcttattgtgtgcgcacgcgccgncaccatacaactacgttgttacctgattcgacgatccatacttacgtatacatctacgccgactagacattgtgatcagatacgcgcacacgaacactctactagtgacttgcgatcgagtctntnctgctgacgcggtgtcgcttgtctctatccacgatcagcgcgtccgacagcttnacatgaatcactacctctactatcgagtanagacgtgctctgtggtgtacacattcgctatatacgtcgtcgactcgccggatcgtcaagtatagcgcgtcgggtgtcacatcgtcaatacactagataagcgtattactatgatgtacactgcgtattcactgatcgcgacngatatgtantggatcatacacacgcgtcagatgnaatagatgtatagtgtcgaactcagctgctatatgctctgtatgatgcttagacgcatcgtcgtcntcatcatagctgacttatgctgactgtcacacatctcgcgtccacactatggtatatgcatggaatgtatatcacagcaataatgcaantgacntnctcatgagtacatagcaatacatgcaactgcagtaagtacgagcattcgtcactcgcgtccaggcggcagncgtnagcgtacaagatgattcgtctatgcttatcagatagagatacgtctacactagtgtgatctgtgcgtgccgctcatctctgtgtctantcgtgtccanatacgctatgtgcgtgctgcctcctcgtactcacgtactcgatgaagtactacttgatacgtcgctcgtgtagtcgcgcacggtgcatctataagacgcttgtgctcactctn

SEQ ID NO: 3936 - DNA, 1684 bp, Glycine max
  misc_feature (1)..(144): n is a, c, g, or t
  misc_feature (1268)..(1269): n is a, c, g, or t
  misc_feature (1298)..(1298): n is a, c, g, or t
  misc_feature (1307)..(1307): n is a, c, g, or t
  misc_feature (1339)..(1339): n is a, c, g, or t
  misc_feature (1381)..(1381): n is a, c, g, or t
  misc_feature (1398)..(1398): n is a, c, g, or t
  misc_feature (1493)..(1493): n is a, c, g, or t
  misc_feature (1506)..(1506): n is a, c, g, or t
  misc_feature (1588)..(1588): n is a, c, g, or t
  misc_feature (1629)..(1629): n is a, c, g, or t
  misc_feature (1653)..(1653): n is a, c, g, or t
  misc_feature (1684)..(1684): n is a, c, g, or t
  Probeset Number=SeqID_13715
nnnnnnnnnnnnnnnnnnnnnnnnnnnnnnnnnnnnnnnnnnnnnnnnnnnnnnnnnnnnnnnnnnnnnnnnnnnnnnnnnnnnnnnnnnnnnnnnnnnnnnnnnnnnnnnnnnnnnnnnnnnnnnnnnnnnnnnnnnnnnnnntagtgactccaagggttttacagaccaggcctgttatacggctccgccgatagtttcgtctccggtctctacggcgccgtggtgcggggcccccccccagatggcattaaactaaggccccccccccccccccaatttagtaattttttttttacatatattcagtcgacaaatgattcctcaagtattttcatttccgttgttttctttccccaattgagccatgattttggaaaagcgttcaattaaaattttgcagccgaaattggttcttaatgccacattagaagttttgataagtttctgcaaggataggcaagtctccccatgattgtgtgttgagaaatgtgttattatcattccacaataagcattagtacttgtataatttactttcttgcatttgagattttctatatcttatatcattatttatttatacgacaaggcttagatcaagttctttacatctccatttaaatgataacacatgcatatttatttaaaattcttcaatacatatctaatagaagttatttgttattggaaagaatattcacatgtcatcatttgaatggagaacttgatggtaaggatataaggaacttgatctaagttttgtccttgtttaaacatccctttatcctatactttgcatattcgggcatctccagaaaccattttgatgagtatcattttcttgtgtggtgaaaattaccttctagttttaatttggaaatttggcaaagggttactatatcttcatacatgaacctttctttatcaaagaatttgacaatcaagaatgttctattaatttttgcagcgagtgactatcttactggaaaaatggaagcacctgagaactacgacttataccagccagcaggcgacttcaacatggcaggttgacgtccaatgtaatttctgaagactgtgattagctgtaaagaattgctggtgtggttttgggcttgtgttgatgtgaaaagttgaaccaattgaagcatgaaacttatagtttatagtatatagataaaatgatcttttataatggaaggcggacattttacaaaataattgaatataattaagagttaatattgcggccgcgtgccatccannaggtactaacactgaaagcgccaccgcgngctgccagntcccaactgtcgggtttccctctcacacgagnggctcaaagggtgaaacctcttgggaggatgttggggggtantaacatccattcccttntctccaggtcgggtgatgccgcgcctgacattgccacccgagcctttacagcaggcgcggatgcctgaattagaggacaaaatccggcggaagcntataattcagcgncccccaagatttgcctcattttatatagcctgtacggctcacctgtggagaggattaaccgcaagataggagacaacaggtnctcgaggcgccgccctgctcataaatgtaagtcagctgcanaccgcgccccctcactaacaagtngaacatgggcagagattcggacaccatgctn

SEQ ID NO: 3937 - DNA, 1637 bp, Glycine max
  misc_feature (234)..(234): n is a, c, g, or t
  misc_feature (738)..(738): n is a, c, g, or t
  misc_feature (749)..(749): n is a, c, g, or t
  misc_feature (803)..(803): n is a, c, g, or t
  misc_feature (829)..(829): n is a, c, g, or t
  misc_feature (856)..(856): n is a, c, g, or t
  misc_feature (972)..(972): n is a, c, g, or t
  misc_feature (978)..(978): n is a, c, g, or t
  misc_feature (1183)..(1183): n is a, c, g, or t
  misc_feature (1287)..(1287): n is a, c, g, or t
  misc_feature (1330)..(1330): n is a, c, g, or t
  misc_feature (1358)..(1358): n is a, c, g, or t
  misc_feature (1522)..(1522): n is a, c, g, or t
  misc_feature (1524)..(1524): n is a, c, g, or t
  misc_feature (1533)..(1533): n is a, c, g, or t
  misc_feature (1579)..(1579): n is a, c, g, or t
  misc_feature (1624)..(1624): n is a, c, g, or t
  misc_feature (1637)..(1637): n is a, c, g, or t
  Peptide Sequence Number=SeqID_7774
  Probeset Number=SeqID_13716
ttttctctttcttcttcttgctccttatcgcgcattgccgctgtggcacctcaataagctatcgacataattgtagcggcttgtcgcctcttctcccgttgttcgccggtgcgtccccgcgcgtcacctctttttctctcttttactttgttaggtatccccgcattactccgtgtggcaccactgacgcctgccggccgctttactttatcgttctgttgttgacgcagcgcnccctgtgccgaagtctgtgtgcgccattatatctagcactgtgtgggacgttgagagtgcggcgactaatgcaggacatctgaacacgtgcgtctaatccagcgttttacacacaatgtcatattatatttgtgattatgagctgatcgcactcttgctggtcgtatatgtatacatcacttacttgctattgttatcttataccagcagcgcggcctcgctgtagatataagatccggtgtgtatattgtatattattatatcaccgacacgttgacgcccttatgcgactaatctttcgctatgtaccgtacccattggcacagagcctttacagaaagtcgtgtgcacggctccacgcaccacgcggcatggtaacttggaggcgcacgccgagatattcgccactagttacatagcgattcgttaccgtgatctcttctcgctgtgggtgtgcgattctgtgacgttccccttgtttgatcgccgcggctgtttccgcantgtatgtgttnataatacaccatacgaccgcagccacccctcgcctaatgtatcatatgcatttnttgcgcccataatatatcacctctangataggtaatcgtgtacgtctgtgtanatagtgtgcatgacgcatagccagtatgagacatatagcgaccgttcgaactaatgtcgctctagcattcttatagtaccaaccgatgatgtgatgagcgctgtagtagtaagtantgctcnacgtcgtgtactatacacgccactatatatttacgtcacatatatactctttcttctcccctcctgcttgtctctaccctcataatatcacatatattccgctcagagtgatgacgcgcacgtagttagttatctttccacccgctagtgacgccatgatcgactaatatgtgacaccactcgatgtattatgcggccaatatgnggtggcgtacgatgtcgcgcactgtacatgtccatgtatactcaccgattatatttctcacccacagcgatctagctggttatcctcccgccttcatatcactnatcgcacacccgtctatctctctgtatgcgcgcacattctatnatatttgtacatatcgacgacttgtgtnatgtgctctctgagcgccacacgtacctgtatcttcttacgcccctctatagactagttgtctcccgcccttattgattattatcaccgtgcattgattatactcacaatgatatatgccctgtaggtgagtgacaccccaccacgtatgtgtgtgtatcctcncntgcgatgtngatcaccgcgcattgttatatcaccccgtggacgacatctcttcgntgcggcgtctacgcggactgcgcacgctgatatatgtatactcgnccacgccaaccgn

SEQ ID NO: 3938 - DNA, 1781 bp, Glycine max
  misc_feature (86)..(86): n is a, c, g, or t
  misc_feature (171)..(171): n is a, c, g, or t
  misc_feature (257)..(257): n is a, c, g, or t
  misc_feature (435)..(435): n is a, c, g, or t
  misc_feature (472)..(472): n is a, c, g, or t
  misc_feature (497)..(497): n is a, c, g, or t
  misc_feature (599)..(599): n is a, c, g, or t
  misc_feature (714)..(714): n is a, c, g, or t
  misc_feature (730)..(730): n is a, c, g, or t
  misc_feature (754)..(754): n is a, c, g, or t
  misc_feature (760)..(760): n is a, c, g, or t
  misc_feature (898)..(898): n is a, c, g, or t
  misc_feature (925)..(925): n is a, c, g, or t
  misc_feature (932)..(932): n is a, c, g, or t
  misc_feature (976)..(976): n is a, c, g, or t
  misc_feature (1027)..(1027): n is a, c, g, or t
  misc_feature (1049)..(1049): n is a, c, g, or t
  misc_feature (1074)..(1074): n is a, c, g, or t
  misc_feature (1102)..(1102): n is a, c, g, or t
  misc_feature (1128)..(1128): n is a, c, g, or t
  misc_feature (1136)..(1136): n is a, c, g, or t
  misc_feature (1156)..(1156): n is a, c, g, or t
  misc_feature (1190)..(1190): n is a, c, g, or t
  misc_feature (1313)..(1313): n is a, c, g, or t
  misc_feature (1365)..(1365): n is a, c, g, or t
  misc_feature (1382)..(1382): n is a, c, g, or t
  misc_feature (1461)..(1461): n is a, c, g, or t
  misc_feature (1486)..(1486): n is a, c, g, or t
  misc_feature (1503)..(1503): n is a, c, g, or t
  misc_feature (1516)..(1516): n is a, c, g, or t
  misc_feature (1547)..(1547): n is a, c, g, or t
  misc_feature (1560)..(1560): n is a, c, g, or t
  misc_feature (1582)..(1582): n is a, c, g, or t
  misc_feature (1584)..(1584): n is a, c, g, or t
  misc_feature (1603)..(1603): n is a, c, g, or t
  misc_feature (1618)..(1618): n is a, c, g, or t
  misc_feature (1675)..(1675): n is a, c, g, or t
  misc_feature (1727)..(1727): n is a, c, g, or t
  misc_feature (1753)..(1753): n is a, c, g, or t
  misc_feature (1781)..(1781): n is a, c, g, or t
  Probeset Number=SeqID_13717
gtagtggtgtcgcccacaccactacaattcgagccgcgtatcatcattatatatctgacgcgccgtcgctctacaccgccaccgtnatactacgagcacgtagaaagatatatatagaagcatagagcgtacctctcatctcgcagtgaagagcgcaccgaaaacgctcantatacgagaggtgacggtaagtcttatctatcctcctaccaagagaagacgacagggaaggagagatgatgcagtatataagcacntactcgtaccgttactatgatagaggaagaagacgcgagggtagggcagcggccgtatatagagtatagatacatatatacgtgccctcgagagacagagtagaagcggcgcccgacgacagccatgcgcgagtaggatatgacgcgttgctgttcaatcattcataattatgcatcntagctctgcagcgcacggcaggaagcgatgagatgtnacgtcgtacagaggcgcgcggcggncgtgcgaactatatagcgtaatgctaagtggtgcgtacacgatgaagagagtggcaagcaacctcacacgcgtatagcctacgctgtgcatcatacgttgcnattgtagtaggtatatggctttgaacacaataattatcttgatgatctatatatacatgagatctgccctcgtctaacatacactaataaactcgaagtacgattatgatgagtnacatagagtgtgaatnagaggccagacgtatgtagggtgntgactncaatgatgactgcgagatcaaatatacagactcgctggccgtgccgcgctgacaactactgatctctagtatatgcagatatcatggatagtctaggaggtataatgtgtgtgaagatgaggtcgacagatcgtagtngatatattgctgttgtgaggagaacanctaagantcactcaaccacatcatatctcatgcttattattacagatgtgnattggagtagagagtgctcacgacagtgacgccaccacacccacccccccnactcaacaccacaacataatgnagtgtattacactgactcgttgagngtgtagcgagtgccgcgcgcgtcgtgtnttacatatctaccgatatccgcgtcnccgcacancgccgcgcccccacaacacnacacgtgagtcacagctcgaggacagtatattantaaactagatacagcatgaactactgattatacgacgtcactagtcgctgacgctcgaatacattacacgcgtggtccgtatatgatgtgattatctatctcacagtctcatcgtctccctcngctaccgaaccatcatataaaatatatctctactagtgtaccgcgagctcantaaacatcagtcgcganattgctcctacggacgctgcgcgccttcgccacgctacgactgataataatcatataataatgacgacgttgcagcagngcgcgagcgctgtatatgctcacanacacgtggtgcgtcgantactaatcactanatctgctcgacgtattatcatgtaatgctgncgatgtgcgttgntggctatatatctactaccgcngncgcatattagtaacactcntcactgatacaaatntacagcagctctacgcgcgtgtgtactgatgatcatgtgtcgtggcgtcgaatctgngattatatatcaatagacgcacgatgtgtcgtacgagagcgcgcaacagctnataccatatcatcatatatcactgcnttcacgcccgtcgctgcgctgtcggcgn

SEQ ID NO: 3939 - DNA, 1505 bp, Glycine max
  misc_feature (1)..(1): n is a, c, g, or t
  misc_feature (54)..(54): n is a, c, g, or t
  misc_feature (67)..(67): n is a, c, g, or t
  misc_feature (81)..(81): n is a, c, g, or t
  misc_feature (114)..(114): n is a, c, g, or t
  misc_feature (321)..(321): n is a, c, g, or t
  misc_feature (386)..(386): n is a, c, g, or t
  misc_feature (439)..(439): n is a, c, g, or t
  misc_feature (469)..(469): n is a, c, g, or t
  misc_feature (515)..(515): n is a, c, g, or t
  misc_feature (536)..(536): n is a, c, g, or t
  misc_feature (547)..(547): n is a, c, g, or t
  misc_feature (550)..(550): n is a, c, g, or t
  misc_feature (773)..(773): n is a, c, g, or t
  misc_feature (1115)..(1115): n is a, c, g, or t
  misc_feature (1242)..(1242): n is a, c, g, or t
  misc_feature (1350)..(1350): n is a, c, g, or t
  misc_feature (1411)..(1411): n is a, c, g, or t
  misc_feature (1414)..(1414): n is a, c, g, or t
  misc_feature (1469)..(1469): n is a, c, g, or t
  misc_feature (1472)..(1472): n is a, c, g, or t
  misc_feature (1497)..(1497): n is a, c, g, or t
  Peptide Sequence Number=SeqID_7775
  Probeset Number=SeqID_13718
ncccgtcgtctgtctcgcctcgcatgacattcgccacgagcgcgcgcgtgcggncacactcgcgtcnacgtctactcgtgntactatgtacgtcacagatctcgcacctggcancttctcacacacgcgcccgcgatgcgcgtcgcataatcgttacacgtgtctcacagtcgtttcctcgcttgctctcaatcgcagcccatacttgcacctctgactcgccacttgcttgtgtgtgcggcgctcactcgccgcgagtcgcacatcgatcaactacgccctcgccgccgcgagtctatcgcgcgcgcatctctctgcatntagatcttcgtcgtacatgttgtgcgtctccatccatgcgcgcgtatcgacgccgcaacgtcatngtccacacacgtcacacggacgctcacgccgacacaccgcacgagcacgccgncgcggcgccgcgcactgagtcacgcacagncgcgctccctcgcgctatgtgcgtggttcgctcggactcagtcgcncgtcggttgatcgttcccgcnctcccacccgnggntcgcacgcaccacatcgcatcggtcgactctctcttacgtccgacagtccgcgtttatggctgtgactgtcgccaagacgtagcgcaccggagcattggcgagggccgctctgtagccccgtctcgctaccgcgtacgtgaatagatagcgctgatgtcgctcctacatcatcgcacgtggtcggtcgctacagtatctgtacgcattagtcggcacgtcggnacgtgacctcacggtgtatcaccattacctgtgtctcgtgctgcagttctgtgtgtctgaggttgctatagcctctggacgcacttcagctcccgcatgtatcgtccctcgatctcccacgccctctcttccctcttctttctacggtgttcctctgtcctccgctcggctccactcacgcgtgctctctagccgtcgtgtgggtccttcgtccacatagtttcgaactctgtcatctcatcattattctccatcgtactacgccatatctccattcttcacattcactacaccataccatagatagtgaaggcctgcgagggacgatgcgggagatgaganaagagaagcgcggacgcgtaggagacataggcgctataagacagagagaatagcacagacagcagagagactatagacagtacataacatacatgagaactacatacactacatacaattgataatnatgatagcaacgagcaagtgccacacaacacaacagagaacagcgcagaacggacacagcagacaagcgagacacgagcgacaacagacacgaccacacaacagacanagcacacataagagataataacgcacagcgtgtcgcatatcacacatatgatatacacttnaanagacaaccatataatgtaagacatatgtcgacatcacacacgagatgtcgtgctngantacgatccgacacacgtacattgtnatccctgt

SEQ ID NO: 3940 - DNA, 1585 bp, Glycine max
  misc_feature (14)..(14): n is a, c, g, or t
  misc_feature (62)..(62): n is a, c, g, or t
  misc_feature (68)..(68): n is a, c, g, or t
  misc_feature (75)..(75): n is a, c, g, or t
  misc_feature (94)..(94): n is a, c, g, or t
  misc_feature (118)..(118): n is a, c, g, or t
  misc_feature (128)..(129): n is a, c, g, or t
  misc_feature (131)..(131): n is a, c, g, or t
  misc_feature (164)..(164): n is a, c, g, or t
  misc_feature (203)..(203): n is a, c, g, or t
  misc_feature (239)..(239): n is a, c, g, or t
  misc_feature (327)..(327): n is a, c, g, or t
  misc_feature (329)..(329): n is a, c, g, or t
  misc_feature (347)..(347): n is a, c, g, or t
  misc_feature (476)..(476): n is a, c, g, or t
  misc_feature (603)..(603): n is a, c, g, or t
  misc_feature (615)..(615): n is a, c, g, or t
  misc_feature (732)..(732): n is a, c, g, or t
  misc_feature (921)..(921): n is a, c, g, or t
  misc_feature (985)..(985): n is a, c, g, or t
  misc_feature (1072)..(1072): n is a, c, g, or t
  misc_feature (1131)..(1131): n is a, c, g, or t
  misc_feature (1133)..(1133): n is a, c, g, or t
  misc_feature (1160)..(1160): n is a, c, g, or t
  misc_feature (1182)..(1182): n is a, c, g, or t
  misc_feature (1228)..(1228): n is a, c, g, or t
  misc_feature (1240)..(1240): n is a, c, g, or t
  misc_feature (1285)..(1285): n is a, c, g, or t
  misc_feature (1289)..(1289): n is a, c, g, or t
  misc_feature (1374)..(1374): n is a, c, g, or t
  misc_feature (1410)..(1410): n is a, c, g, or t
  misc_feature (1510)..(1510): n is a, c, g, or t
  Probeset Number=SeqID_13719
tgtgtgtcgtgcancgtgtacagtactacgtgtcatcatgagctcgtctacagtagagagcngtagancggcgtnaggacgtgacgactcgtgntatatggcgcggatcgcgcagcgntatcgtgtgnngnggctgagtagtacacgagttatcgtgagtgctntgtcaattgagacacacactgcagtctagaggcactgcntgccgggtgcgtcgagtcctatatacggagtcttcngttgcagcgtcatcggttctgtgtcagatcggcagatagaggagggtgtcggcggagtgatgtaatatgctatagtcttacgcagggntnggtgcgataggcgcgtgncgtgagacactcatatctccaggctttcgcgttcgaaacgcatatgtcggcgagggtgtgagcctaccgcggagtgagaggagagtactgtccgttcgtcacaagtgtgtggaccagagtagaacgtgncagttcgagtggtatttacgtattatctaagttgtatctcctcagtatgaacacagtgacacgcggagcgtctcgtcttgtgaagcgcagactcatattccatcagtcgtttcgcaaggcgtggcgntcggctacatcnccacgagtgtggcttttcgtacgagctattgatcctaggcgggtacgtctgatggacacttcagagacatacgtacgtagtgcgtccgagtagaggtgtgggaggtcggaaatgagncgcaatagatcgagcctgagagattattcgcaggagattgccgactagagataggtggccttacagacgcagaacgttcaccatactgtatatactacacctactcatagactatgtaggagcatgtagagcgagtaacggtcgatcgactgagagagtgtgagcaactggctgcctgctctctgtctncttctctctctacacgcgctccgagtcaggatgggtgacctagagagttagtctgtgatagaanactgatgcatgagcatgcgtgcgtgtgggcaagagttgtcttgacgggtcttatgtacactatatctgcgggtgagggctgcgcagngtgtgatgtggtgtacagatactctcgcgagtacacgctctatgtatattctatagcgnangcgcatgtatatctctctctttccgcntgtaccagggtgggtatcctangcggctgtggagtgcacaaatgtggtactgtcatgtcaatcacgtntatcagagtatngcccatgtagatctgagtaagacgcttatgtacgagtaaaaaganttantcgcttggatgctcgcgtcagaatatagagagagcacttctagatcgccactagagacagaagaagagaggagagatatatatgnggatatttctccttcgtcaggcccgctcggtggggngtatgcgacatcatgatgtttcgatgaggagaggcaggcctccgcctcaaacccggcagggtgaggacgtccgccacacgccttgtgtcattggcagttntcgggtctccctatcatattatgtgcgacgaagttagatatatggataatatgtaaggtggggtgggagaggtct

SEQ ID NO: 3941 - DNA, 452 bp, Glycine max
  Peptide Sequence Number=SeqID_7776
  Probeset Number=SeqID_13720
aaatcagaaaactaattagatcactgtgaaatgttaaaactgaataccatattttgaccttatcattttttagtattttagtacctatatttataatatttttctgattataataaggaaagaagaacgaacaatcaggtccaccagaagtgctttaatagattcatgacccaagcccaattagattttgttataatatttattttcggtttttccaattttccccaaaatttaatacaattggaggtagctccattcattttcttggacttggaggcttcgctgaagagggaggtggattccgcggcggttgcgtggaggaagaggatctttgttgaagggggtttgctgaaggcagctgaggttgatgccaggggtttgattcttttcatcgccatcttcgggatccccactgttttcaaggcagccagagagcagatagtacctggtgc

SEQ ID NO: 3942 - DNA, 470 bp, Glycine max
  misc_feature (463)..(463): n is a, c, g, or t
  misc_feature (466)..(466): n is a, c, g, or t
  Peptide Sequence Number=SeqID_7777
  Probeset Number=SeqID_13721
aaccttatcccttcccccaaagcacagcgagagagaaagtaaagtgagccatgtctgcctctgcttcctcccttttccttttcttccttcaaccctaaatccctccctctctgcatttcccgctccgcctccgttctcccaccttccctctccttcaaactctactccatcttcgcttcctccgccgtcaaatgctcctcctcccccgcccaacacccgtcgcgtttcgccagaaacgtggccgtatcatcggatttcgaggtggaggaagacgacgtgttcaccgacgatgactctcccccgccgcagcaagagcgcagctcctccttctccgcggacctcaaactcttcgtcggtaacctctccttcgatgtggatagcgctcagctcgctcagttgtttgagagcgccgggactgttgagatggttgaggttatctatgataaagtgactggcagaagcngangttt

SEQ ID NO: 3943 - DNA, 531 bp, Glycine max
  Peptide Sequence Number=SeqID_7778
  Probeset Number=SeqID_13722
tccggggatgttaataatcacaggtgtgaggactcctctctaagtgatgatgttattgggcctaatatggaagaaaattgtccacagttctatgaaccttatccatcgttgattccaatgaaacataaaagtaccataacatttaatgggaaaaatcttgatcattataaggatgaagttttcagtgcaggcaatgatgaactcaatttcaaaaccaaagtgttcaaagaagacagatctttctccgtttctataccagagttccctgcagaagataaagagactgttcctctgggtatttacattaaagtgaatgaaaaaaagattgacagtaaattaaatgttaatctctacaactgcatgtatggcagaagtgactgcagcctgtgccttgctgctgtttctgaataccactgtgtttggtgtaatgacaaatgtgtatacacggatatgtgtgtggaacaatctgctgagtgcccagctcctgaaatcactgatcttgtgccaaaagcagcacctttaaaggggggt

SEQ ID NO: 3944 - DNA, 395 bp, Glycine max
  Peptide Sequence Number=SeqID_7779
  Probeset Number=SeqID_13723
gcctgcacacttgatgaagtggttaaacgcactgttgttcgtctaagggattgtggctccattcctggaagttcggagaacacccacatgggtatgatgccctatagaatgtggaaaccatcattaattgaacgcgtatgagcagacgatgtatacaggagagctacgactcactgccgatagaaatcaatatataggaatcggacttatgagtatattcaaatcccattataccctaccaatatttatgcagaagtcccttgacctggaagaatacatctcgtgagctgatcattgagtcatggccaaagtgactactcatggccactctgctgaattatgagaatctgcaggtgttattgcggtcccatccattggagaaccgggcactcaac

SEQ ID NO: 3945 - DNA, 885 bp, Glycine max
  misc_feature (885)..(885): n is a, c, g, or t
  Peptide Sequence Number=SeqID_7780
  Probeset Number=SeqID_13724
tttttttttttttgttcgtagagaagggagagaataaaatccccattggggatattactttgtttcttcaggaggctggagaggatacatcaacttcatagcttgttcttggacacactacatacagatgacacatacatacatgcttgctaagcattttcttttgcttttcatatgggtcaccatccctctctctctcactcgctctccttttcaacctgatgtttcctgaaacctgccacctgctacgggccccgtactgtgatcgagcacggcttctggcaccataagaccaaagaaaaccttgaaaaaggggtactccgcggatggaaaggaacatcgcccgaaaaaaaagcgccccccacccccccctcctccctttctttttccctttccgggggaccaactccaggggggccccacttagtcccagggcacacacaccgggggccccaaaaaaatatttcccccgggggggggggggggagtccctccaacaaccctttttattaatttcccccaccccccacccaattgtcttttcctattttgcccccccgcgttttccctcgcattccctattggccccccccccgcgcctatttttacccacacccctcttttcccccactcccccattttgtactcctcgcccctcttgcaccccaacacccccgtttcccccgccccacccaatttcccataaaccttatcctgaaggcgacgccaccccaatattcctgccctcttatttgcgcgaccacgccctctccccccacttattttctccccccctgttcataattacaccctcctcacacctcatccccccctttccacgggatccataacgccctaccaacatctgctcgcctcttttttttn

SEQ ID NO: 3946 - DNA, 1357 bp, Glycine max
  misc_feature (27)..(28): n is a, c, g, or t
  misc_feature (48)..(48): n is a, c, g, or t
  misc_feature (55)..(55): n is a, c, g, or t
  misc_feature (59)..(59): n is a, c, g, or t
  misc_feature (63)..(63): n is a, c, g, or t
  misc_feature (67)..(67): n is a, c, g, or t
  misc_feature (73)..(73): n is a, c, g, or t
  misc_feature (121)..(121): n is a, c, g, or t
  misc_feature (179)..(179): n is a, c, g, or t
  misc_feature (248)..(248): n is a, c, g, or t
  misc_feature (251)..(251): n is a, c, g, or t
  misc_feature (350)..(350): n is a, c, g, or t
  misc_feature (915)..(915): n is a, c, g, or t
  misc_feature (929)..(929): n is a, c, g, or t
  misc_feature (1176)..(1176): n is a, c, g, or t
  misc_feature (1357)..(1357): n is a, c, g, or t
  Probeset Number=SeqID_13725
ggggcgcccccccgcggtggtgggggnnctctttttccctgctccccnctatggnacancaanatanacgccntggggcgtgaggagacgctgagccctccccccacccctctcccacaangagccgcccaggaggagagggagaggtgatgctgttatttgttaattttaattatttnttttcctggtgggtgtgtgccggacggagacgggcgatgatgggggagctcgcgggggtcgtgggcggntantatattgtaggtgtagtcgcgtacgtgagtgggcgtaagtgcagaagggagaagcatagccacgagtggaggagagcagtcatacagactgggacacancgcaacacccagtggcgcccggcgcgtcgttccctccttctcacgctccctcttctattttctaattgttttcgccgtcgtatagggtattctggtcgccccgagcgcgctcgtagcttcgatgtctgctctcgggcggacgtgttcgttttatagtatgtgtgtgttgcacgagatgaaagatgtagtaagagatgatggatcaacctagatacgtatatataccctatacactacaaataacataatacctgatacagaatatattctgtctttgctcgctcatgatcaccgcatgcgctgtgtgatcgcacgctctctcgcctggtgatcgagaagactagtgagaagcatataatcttataatactgatgggaaattcgtgaggagagagcggtaggtgtgtgatattgtagtagagtcgtatgactatgtcaacccaccccacccgcgcaacgcgtatgttagcatgcatgtccagatgagctcgcgtcggtcgcgcgctacgggatggtcatggaggatcttgctccttctgatatctgcgctgtatgatactacgagntccgaacagtgagnagcgcacatagaataacacgtggtacccgaggcgcaggagtacatcaatgagagaatgacaccaccaacacagactcggccaccgccacgaacctgccactacaagtcatcaccacctataactctcacttctctcttctccgctagtacgatttgacagcgcaagagatttgaaagaaggagcgctctaaagacaccagcatatatgaacaatgcacggaactggcgcgggtgcggccgcggcggnatcgtcgtgtttgtcgtatgcgtccgccgccatgtcagtggcgctgtattgttgctagcgaccagctatgtcgtgctgcgtgtgggatgacgccgtgtcgtgagttggctaacgcctcgacccctgacgcatacctcgacgatggcacgaccctcctcgctgctcagcacgactcgctacn

SEQ ID NO: 3947 - DNA, 335 bp, Glycine max
  Peptide Sequence Number=SeqID_7781
  Probeset Number=SeqID_13726
atattttacaaagaaagcggaggaaaattttctgaatttttcttcgcttttagtacccatcttcggttttattacaagattctgattttcgacgagcttgatcgatctaaattctcaagatctatggcggaagagcatcgatgtcagacgccggaaggccaccgtctatgtgctaacaactgcggcttcctcggcagctccgccaccatgaatctctgctccaattgctacggcgatctctgtcttaagcaacagcaacaagcttccataaaaaccaccgttgaatcctctctctcctccgtatctcctccgtcgacggaggtagcttccgtctc

SEQ ID NO: 3948 - DNA, 488 bp, Glycine max
  misc_feature (32)..(33): n is a, c, g, or t
  misc_feature (54)..(55): n is a, c, g, or t
  misc_feature (59)..(60): n is a, c, g, or t
  misc_feature (78)..(79): n is a, c, g, or t
  misc_feature (155)..(156): n is a, c, g, or t
  misc_feature (162)..(162): n is a, c, g, or t
  misc_feature (226)..(228): n is a, c, g, or t
  misc_feature (230)..(231): n is a, c, g, or t
  misc_feature (478)..(479): n is a, c, g, or t
  Peptide Sequence Number=SeqID_7782
  Probeset Number=SeqID_13727
gagggggtgggggtgcggcgcggtggcgggcnntgtagaggtagtgggtgcgcnngggnncagggattgggcgcgagnntggggtgtgcagcagatggccattgtgcagcaagtggttaggcgagaatgtgcagaatgcgcggttgtagccgtgnntcgcanagttgcagctgtgatagatagcgacatggtcatggtcctgtcctatgggaaactagtggaatannntnncccttcagagcttatggaggccaactcttggttctgtaggttggtcgctgaatattggtcgagctgcaggaagaactcctccccaaatattaacaggcagcaacattgaacaagaaaagggagtgcaaacaaactgaaggaaaactgaataaattgaattttagatgtgcctggatcctgttatttacccaaggggacatataatataatttgcaaaatgttgttagacatcatgttaagtgtatannacactcaat

SEQ ID NO: 3949 - DNA, 511 bp, Glycine max
  Peptide Sequence Number=SeqID_7783
  Probeset Number=SeqID_13728
gttcgtgatttgcgctgctattgccagacacttaaatgtcactctcatagttccagagctggataaagcctctttctgggctgattcaagtgacttcaaagatatatttgatgtagatcatttcattacctccttgagagacgaggttcgaataataaagatactgccacctaagatcaagaaaagagttgaactaggattattatactcaatgccacccattagctggtctaatatctcatactatgaaaatcaggtccttcctctgttgctgaaacacaaggtcatacacctaaatagaacagatgctagacttgcaaataatggactacctgctgagattcagaagctacgatgccgagtaaacttcaatgctctgaggtttactactcagatagaagaacttggcagaaggatagtcaaggttttgagggaaaagggacctttccttgcacttcatcttagatatgagatggacatgttggcgttctctggctgtactcatgattgt

SEQ ID NO: 3950 - DNA, 1782 bp, Glycine max
  misc_feature (10)..(10): n is a, c, g, or t
  misc_feature (17)..(18): n is a, c, g, or t
  misc_feature (31)..(31): n is a, c, g, or t
  misc_feature (75)..(75): n is a, c, g, or t
  misc_feature (91)..(91): n is a, c, g, or t
  misc_feature (99)..(99): n is a, c, g, or t
  misc_feature (109)..(109): n is a, c, g, or t
  misc_feature (116)..(119): n is a, c, g, or t
  misc_feature (130)..(132): n is a, c, g, or t
  misc_feature (134)..(134): n is a, c, g, or t
  misc_feature (151)..(151): n is a, c, g, or t
  misc_feature (164)..(164): n is a, c, g, or t
  misc_feature (172)..(173): n is a, c, g, or t
  misc_feature (211)..(212): n is a, c, g, or t
  misc_feature (234)..(234): n is a, c, g, or t
  misc_feature (241)..(241): n is a, c, g, or t
  misc_feature (259)..(259): n is a, c, g, or t
  misc_feature (262)..(262): n is a, c, g, or t
  misc_feature (293)..(293): n is a, c, g, or t
  misc_feature (312)..(312): n is a, c, g, or t
  misc_feature (433)..(433): n is a, c, g, or t
  misc_feature (496)..(496): n is a, c, g, or t
  misc_feature (539)..(539): n is a, c, g, or t
  misc_feature (644)..(644): n is a, c, g, or t
  misc_feature (693)..(693): n is a, c, g, or t
  misc_feature (867)..(867): n is a, c, g, or t
  misc_feature (888)..(888): n is a, c, g, or t
  misc_feature (909)..(910): n is a, c, g, or t
  misc_feature (991)..(991): n is a, c, g, or t
  misc_feature (1024)..(1024): n is a, c, g, or t
  misc_feature (1069)..(1069): n is a, c, g, or t
  misc_feature (1078)..(1078): n is a, c, g, or t
  misc_feature (1096)..(1096): n is a, c, g, or t
  misc_feature (1137)..(1137): n is a, c, g, or t
  misc_feature (1264)..(1264): n is a, c, g, or t
  misc_feature (1307)..(1307): n is a, c, g, or t
  misc_feature (1420)..(1420): n is a, c, g, or t
  misc_feature (1429)..(1429): n is a, c, g, or t
  misc_feature (1521)..(1521): n is a, c, g, or t
  misc_feature (1561)..(1561): n is a, c, g, or t
  misc_feature (1638)..(1638): n is a, c, g, or t
  misc_feature (1664)..(1664): n is a, c, g, or t
  misc_feature (1668)..(1668): n is a, c, g, or t
  misc_feature (1676)..(1676): n is a, c, g, or t
  misc_feature (1702)..(1702): n is a, c, g, or t
  misc_feature (1706)..(1706): n is a, c, g, or t
  misc_feature (1718)..(1718): n is a, c, g, or t
  misc_feature (1751)..(1751): n is a, c, g, or t
  misc_feature (1753)..(1753): n is a, c, g, or t
  misc_feature (1756)..(1756): n is a, c, g, or t
  misc_feature (1758)..(1758): n is a, c, g, or t
  misc_feature (1779)..(1779): n is a, c, g, or t
  misc_feature (1782)..(1782): n is a, c, g, or t
  Peptide Sequence Number=SeqID_7784
  Probeset Number=SeqID_13729
ttatgaaaanaacaacnncaacccccccaancaccccaaccctcataggccacagactacactgaccgtctaacncgcgctgagagagtgnagaagagnggtggggggngtggttnnnnttccactctcnnntnatattattgtgtgagtnatgatgtataatntacaattnntaggtcacgctcgtaaacactatttgctctcttctatnnctcacgatacatatcaatgctntgcagcnattcacccacgcccacanccnccgctccctccactaagacgtgcagtagccnctcatatactgacatctangtatatctatactatataatctatctcgtgatgtgaacatccgcaacttctcgcacactgttatcgtccttcgcgctccctatcctgttcggtctcgtgtgtgacagcctatagcatgaanatattgatgctagttcatatgacgatgttgtcgctgtgtgctagacggaaggagagatgaganacaatacaaaaattagttcacaaacatatgacatttaccaaanatatgtactaagaagtaacacatacaaattagtataataatattattaaaattgtctaccgtaacatcaataacactttatactcataatgtctcttctctcggngtgtgtttgtaatgatctttattgatatgctgttgattgtgccgtgtanttatcttgatgcagagtgatgctatcggatgttcgtgttgtgagaaggtgagacaacgtacactctcacgacgcacagacacataatctacactactaacactcatacacatcgcataaaccaacatccatatacaccacagtgtccgacgcgtcgttatgtatctagtcatangtatttcacgtatgcgtcccntcactacacgcgcatctctcnnacatcttcatagtagcacacaccaagcgcagaaccacgagatcacacacactaactccgaccacacacactacgacgagcnacgataacacagacacataagagagcacgtcgncagacaccgacacggccgcgatacgcacgcacgacgacgcgctanggtggatgngtattgtagtatattatncatagcatattgtctgatatcactatatatctgtgatatgnatgcatccttgactactacgtctagcgcaccgatgtgcaaaccacacgctgcacgacacacaactatccaacactcattgctctgctcatgtcgtctcttctatcttctgcctcactcatgatcttncgtcatctccatactacgacttcatgtgatgcgtctatactcnatatctcatcgtatcagatcatccaccacatactctctatactcactactgtatatacatcctctctctattctgctcgtctctcatctcacatctcatctctcatcgctacntctgtctcnacgtttgatatgtcgatcattgactctattctacttattatcaccctgcatatacatcgatatagcatgctcccaactcgcactgatgacgntatgaaatgagagaattagtgattagttgtatgtagtgangtccgtagtcgatatgctagctgtgacgactccactctacacctgctccgtacagctactctatccgtatatacgcnagtagcgtgactctcacagcatcatncccntacgtcgnctgatgacactcaactcgctacgcancgcntcgactagagtncatacgtacctagaaactaccatcacctactgntnacngntatgatctgtatcaatgatcncan

SEQ ID NO: 3951 - DNA, 1424 bp, Glycine max
  misc_feature (13)..(14): n is a, c, g, or t
  misc_feature (24)..(25): n is a, c, g, or t
  misc_feature (27)..(27): n is a, c, g, or t
  misc_feature (57)..(58): n is a, c, g, or t
  misc_feature (127)..(127): n is a, c, g, or t
  misc_feature (236)..(236): n is a, c, g, or t
  misc_feature (256)..(256): n is a, c, g, or t
  misc_feature (646)..(646): n is a, c, g, or t
  misc_feature (1195)..(1195): n is a, c, g, or t
  misc_feature (1328)..(1328): n is a, c, g, or t
  misc_feature (1424)..(1424): n is a, c, g, or t
  Probeset Number=SeqID_13730
tttttttttttannttctctcttnntnttctctctatatatccatagttttattatnnttatatatatagaactatttatatttcaattatgtagaagtaattaactctcctctatataatagaatngaatagtgtattaattaatactcatgcgacgcacagcccgcgtacaaaggacgagcgacgcatagaacccacacgacaacacacacaaaactcgctcgccggtgggggnttggggtggtgttcgatggnagatatcttcgtagttatgatggttgattgttgtgatgtagattttgctttgcgatcccttgtgtgtcgtccgatgcgttgtgcttaccctcctcctgatcggtactgatgcagtgagttcgcgcctcgcgtctggcacctgagcgtccggcgtccgtctccgttgtgtgtgcgcaggcttacagtgtctcggtgtcttgtgcttttcttgatttcgcgctagtgcaggtctccgtctgtatagcgtggtctggcggttggcgcggtgtggttgtgaatgctgcataagatactaagcgcgctcgcgactcgtatgccaccgcgaatacaaactgtcagacacatctctgcacaggtcaaatactacaccatcctgcgtacacaatcgtntgtggacgtgtaacatagtgtgcacacacgcgcaatgatgcaaacagcaaaacagcgatatacgaggaagaatgaagatatacaagacgatgtatagtacaacacacggcgcgacgacacacataacacattaacacaccaatccgacacatcacaaactaactcatacatcggctccataacataatataatactcaacaccccacaagacagaacaatctataacatgtatatatatttcatatcttttcctacgtctttgccagccgtcgatggcgtgtctctgcgcgttcctggctcggcgctcattgtcgctgtgttcgcatactattgaacgctatgtagacgacgaccaacgatggatatgacactccgatcaagcgctgatgctcactatatgtgctccgtgtcggtgctctgcgtcagatcacaacaccgcgcagacatagtatatctgacgcgacactccaccatctcttcacaatacctcttccagcacgtcacactccaacctcgtcctctacctctacgctcttactttctcacgncatcctacctctacttgataccctcgaccctcactctcgtattctttcctgttcattctcataccatgcacactctgcactctcatatctctcaacactctcaacaaccgcacactatctactcacacctctntaccattcgacaagcatcatgtatacgcacaaccatatcgtcgatatctcgtgtctacactccaacaactccacctataccgacaaaccatacccn

SEQ ID NO: 3952 - DNA, 647 bp, Glycine max
  Peptide Sequence Number=SeqID_7785
  Probeset Number=SeqID_13731
cacaaacaagcaacgcatcctccactcttcaccaccgtctagctagctcttgttaggtcgatcggcaatggagtccaccaaggctctcttcgtgctcgccgttctcctcgcgtcggccgtcctcctcgccgccgcggcctccgagcaaactcatgacaaggaggggaaggtggccaccaacggtgccggcgtccaggacggctggggtggcggcgggcgcgggtggaggggtacccggggccgcgtgggcggcggctacagggccctgcgggccggtgggagctgcttgccgccggtgggtacccacggcgaactggcatccgaatggttgcaggggaccgcccaaacaacggtccccggtagggccatggggaacccccacctggaagggggaaccaaacttaaacttaagactgggcaaaaggtgggccaaaaatggggcttggggccttaagcaaaaggggggggacccccactggaaccaaaattttgggaaaagactaaacatttcccttccccacggggtaccggggaataaaaaaaaaaaaaacccccccccgggtgttaaagaatcccaagggggggaacctcaaatgaaatgtggggccagccggatactaaacaccccaattcggaattactccaaa

SEQ ID NO: 3953 - DNA, 943 bp, Glycine max
  Probeset Number=SeqID_13732
aattagggtccttgcaccagttaagcttttgtgtaaaaggaacaccacacaaaccttagacaaaagcccctttttttggtacatcaactaccaggtattgagccatgaaggttgggagccagatgaagcagatggggaagctcaacaaggcgctcaaggagcagagggccaagctctacatcatccaccgctgcgtcgtcatgctcctccgctggagtgattgatacatccgtcgatctgttcaccgcagatcgatcgacgatcaatcgtttgtttcagccgatcatcccttctgttttggatcttttttcgccctgccgatgatgcattcggcggggttgcagattccagcggcatggccgatatgcagtgcatgcatggatgatattcattcatgatgcatgcattgcgctgcctatgttcgcattttaggagggattgatcggttgatgggttgagattttcctttccatttgttttttcacttgcttctcttgaggcaggggtgtgaggagaggacgccggagcactcagctacaaaggttgatgcgctttcgttctcttccacaaatggagaaggttgatatagataccagttcatttcgtttgctgtgactccagttcagttgtctacaaatgctgctggcgatgctgaattgctgatcacatgcatgattctgaagaagatcgaagataagaagaagattaaataagacgccgatctcatggattattctgccgggatgttgcttttcgttccgatacttgtattgtaatgttgctgtccaggactatggtttctgttcttgtgcatgtactgtagctggtttaccccagcatgacgattttatctttctgttaaataaaaataaaagctgcgctcwwaaaaaaamwraaaaaagcttatcrwtaccgwcracctcgagggsgggcccggwmmccm

SEQ ID NO: 3954 - DNA, 1590 bp, Glycine max
  misc_feature (1)..(7): n is a, c, g, or t
  misc_feature (16)..(16): n is a, c, g, or t
  misc_feature (22)..(22): n is a, c, g, or t
  misc_feature (34)..(34): n is a, c, g, or t
  misc_feature (53)..(53): n is a, c, g, or t
  misc_feature (57)..(57): n is a, c, g, or t
  misc_feature (65)..(67): n is a, c, g, or t
  misc_feature (76)..(76): n is a, c, g, or t
  misc_feature (91)..(91): n is a, c, g, or t
  misc_feature (93)..(94): n is a, c, g, or t
  misc_feature (143)..(145): n is a, c, g, or t
  misc_feature (151)..(152): n is a, c, g, or t
  misc_feature (173)..(173): n is a, c, g, or t
  misc_feature (190)..(190): n is a, c, g, or t
  misc_feature (253)..(253): n is a, c, g, or t
  misc_feature (294)..(294): n is a, c, g, or t
  misc_feature (298)..(298): n is a, c, g, or t
  misc_feature (359)..(359): n is a, c, g, or t
  misc_feature (427)..(427): n is a, c, g, or t
  misc_feature (573)..(573): n is a, c, g, or t
  misc_feature (928)..(928): n is a, c, g, or t
  misc_feature (1067)..(1067): n is a, c, g, or t
  misc_feature (1172)..(1172): n is a, c, g, or t
  misc_feature (1399)..(1399): n is a, c, g, or t
  misc_feature (1427)..(1427): n is a, c, g, or t
  misc_feature (1529)..(1529): n is a, c, g, or t
  Peptide Sequence Number=SeqID_7786
  Probeset Number=SeqID_13733
nnnnnnntttgttggnttttgngtttttttgtgnggtttggtcttttctttgnttgntctgtttnnntcttctctncccccccaccccccncnncacttctctcttaccttattatacctgctgctcactctgtgccacgccnnnccctcnntcactacactactgacattgncacatcacccaccccgngcaatcacagagcatggggcgctccatctactcccctccttgttttagtttggaattatgttncgcacttatacaactgcgattggctcttctcctcctcctcncaangcgcttactctccctgtcccctttgtcgacgtcaggctctctcacccttacctcacacacntactctactccttcctctctcacccccacacactcctcacctccacctaccaactctctctcctccancacgcccacaccctcaccataccacccggcacacaccgccagctcacacggatggagggcgacactaacacacgccatcatcctcctcatctcctccggtacctatcacactgacgccgatgggcagcttgagcggacgaagcacncaaccgcacatcactcacctcctggccacccactataccattcatctctcacacactcagcattaaataaaccactcctcgtgacaacaccgacgatacctgacacctgtcgctactcggaccatcacatagcaagcaccacagcaccacaacacacaataaactactacactctcaatattattagtacatcaatcatccactgtacagatatacaccaaccacaacagaatcatcaccacactctacaccactccatactcactataccgcagcgcggttcacgtatagaactccagatcctcactactctaaaataaattataaataaacagacaccatatcatttatttgnggtctctcatacacatccatacatattgcttcgtgtgtatgactcgtcgtcatgtattgacgttaataccataaacatacactcaccacaccactcgtcttcctctctccacactgcgatcccaataatcgttctgtgncgtccacacgtactagcgtacacgcgccgccaacaatgactggactcgtccatcaaccaaacacttccctccatcacccctccactgacccttccctccacactnccacatcaccctccacctctatgtttataccaacctcacctaccctctctcacttctgcctatcatattaatatctactaaccattgcctacgcctccttatatattctctatcactgcttcgacgccgccgatctcgcgtgatacgaatgcgtatctcactcagcctccctctcctccatcataacgctcacagtctccactctcctctccctcccactctgattntgtcctgcgtcgtgaacgccaccccgtncccgcttcgcgcgtcgctcgtacctatcgtcgccgtacgcgtgttgcgtacactcttactttatttctcatctctatctcattataccttgtccacatccgntgccttaataatataacacatccttccacacctccgcctctatccctccgtcgccgactct

SEQ ID NO: 3955 - DNA, 598 bp, Glycine max
  Probeset Number=SeqID_13734
ccacgcgtccggtgagacgccgttttgctttggttatactagatgtgtgattattctcttttggtgcctctctcctctttcagctccgatggccagcctgtggcgcgcggcaaccggcttgacggacaactccaccgattacgacggagtcgagttctggtcgaacccttgagcggaccggctggctcaccaagcagggagagtacattaagacctgtcgccgtcggtgagtcgatctcaagcctggcaagctcttctgggtcatggactccgccgtcacgcgtgcgtgtcgtccacgcggtgtggcccccgtctccacgtgcctcaccgtgacatgcgcccaagacatgctcatcaagccctgcgaccttctagttgtccacgctctccgacaccatgtacttcatggccgactacaaaaaggacaaagaggacaggatcaattctatcaagcgctacgtcatccagcactacacatccggctccgatgtcccgatcatggagtacaatatccactacttgaagagctggcaaccacgcgctctggatacacgctcctatgtacgagagcgtccttactgttcactgaacttttgac

SEQ ID NO: 3956 - DNA, 484 bp, Glycine max
  Peptide Sequence Number=SeqID_7787
  Probeset Number=SeqID_13735
ttttttgcattagggttttcacttcggctgctgctagtgagtgagcaacgaatcttcaaccccaaccatggcgacgaaacaagccaaagcgtccgtgcaatgcttcggaaggaagaagacggccgtcgccgtcacccactgcaagcccggctgcggtctgatcaagctcaacggctccccgatcgagctgttcaacccagagatcctccggttcaagatcttcgagccggtgctcctcctcggaaagcaccgtttcgccggcgtcgacatgaggatccgcgtcaacggcggtggtcacacttctcaggtctacgcgattcgtcagagcatagccaaggcgctcgtggctttctaccagaagtatgttgatgagcagtcgaagaaggaggtgaaggatattttgataaggtacgataggactctgctcgtggcggatccgaggaggtgcgaagccgaagaagtttgggtgggcgtggtgctcgtt

SEQ ID NO: 3957 - DNA, 854 bp, Glycine max
  Peptide Sequence Number=SeqID_7788
  Probeset Number=SeqID_13736
attcacactcatacacaacaatctaatccagctcaacttactacaacaccttctacttccactaccaacaccaaacaattctaaatcacaatggattccgccaaggctgccgtcaaggacttcatggccaagtctggtcaccacgacaccactgtccacgagaaggtcgcacctgctgtcaagcacgagactatcgagaggcagaagcacgaggagtacgtctccgccatcgacaaggaggttcaccaggaccattaccacaccaccgagcaacctatcctcgacaaggaggttcttcccacccagcaccacaccaacatcatccccgttgagcaccgcagctacgagcacgacaacaacgacgaggtcgaggcccgtcttgctaaggagcgtgccagctacgtcgacaccaccgagaggattgagggcgccaccacccgcgagwttgyccccgtcgtmgcagscsagcacaagcaccaccacgtbcacgagaccattcagcccgtgatccagaaggagaccatcgagccccacgtcacccacaccaccgtccccatccacgaggtccaccacaacgccgcccagcaccacgccgcctctgccctccccgccgtctccatggccgagtttaaggcacagggcggttccctcaccggtcgcgaggaacgtcaggacggcttcatcggcgagcccaagtctgccgctcacaagaccgcccacgagcacactcttacccactaagcgtctcgcctacratcttcacgtttaatgtttatgccaccaaaaagctgtctcacgagaagatttggaggggcagggtaacgcakctttgakatgaagggtgttgcaaaacg

SEQ ID NO: 3958 - DNA, 1473 bp, Glycine max
  misc_feature (8)..(8): n is a, c, g, or t
  misc_feature (77)..(77): n is a, c, g, or t
  misc_feature (104)..(104): n is a, c, g, or t
  misc_feature (130)..(130): n is a, c, g, or t
  misc_feature (410)..(410): n is a, c, g, or t
  misc_feature (482)..(482): n is a, c, g, or t
  misc_feature (548)..(548): n is a, c, g, or t
  misc_feature (553)..(553): n is a, c, g, or t
  misc_feature (635)..(635): n is a, c, g, or t
  misc_feature (711)..(711): n is a, c, g, or t
  misc_feature (863)..(863): n is a, c, g, or t
  misc_feature (896)..(896): n is a, c, g, or t
  misc_feature (955)..(955): n is a, c, g, or t
  misc_feature (981)..(981): n is a, c, g, or t
  misc_feature (1007)..(1007): n is a, c, g, or t
  misc_feature (1068)..(1068): n is a, c, g, or t
  misc_feature (1081)..(1081): n is a, c, g, or t
  misc_feature (1120)..(1120): n is a, c, g, or t
  misc_feature (1184)..(1184): n is a, c, g, or t
  misc_feature (1296)..(1296): n is a, c, g, or t
  misc_feature (1298)..(1298): n is a, c, g, or t
  misc_feature (1314)..(1314): n is a, c, g, or t
  misc_feature (1323)..(1324): n is a, c, g, or t
  misc_feature (1329)..(1329): n is a, c, g, or t
  misc_feature (1402)..(1402): n is a, c, g, or t
  misc_feature (1420)..(1420): n is a, c, g, or t
  misc_feature (1424)..(1425): n is a, c, g, or t
  misc_feature (1436)..(1438): n is a, c, g, or t
  misc_feature (1440)..(1441): n is a, c, g, or t
  misc_feature (1443)..(1447): n is a, c, g, or t
  misc_feature (1449)..(1450): n is a, c, g, or t
  misc_feature (1452)..(1456): n is a, c, g, or t
  misc_feature (1458)..(1458): n is a, c, g, or t
  Peptide Sequence Number=SeqID_7789
  Probeset Number=SeqID_13737
cggtgcancacacattgagatacgcgttcccgggagagtgcagttgatgatgcgcgtagttcatcggaacggatgangtatccaagacaaacatatacacgcantagtagggcagggacgcgcgaggtcnggtcttgtcggggcccgcgcccacagcactagtggttcctgcgtgacagcgctgttagtgacacaaaccaaacataaacacatacaaactgacacggtgaagagacgacgcagagagcacgagtgtcataagagtctcacccagaatcgacacgaggtgttagtcgcccacattatgtgatctgtatgacctcgccgacagtgcgcagtgtcagcagcatgcggatgaaagacggtggtgatgtaatataagagaaacgcgcaatatatagataagcgcnctgtatgtatagccttatctaagccaactacgccagcattgaatattgtaccgcaagtgatagtagccagantaacaacaatatatcactagagcctatcaatatgtacacgaccagcagtaggacaggcgataatcnccacntgctgtgcggtgggtgggttgggggtggtgtgtgcgttgcaccgtcatacacgtatctaccatctccgctgcatgtgtagtngaggcgtgtggcgcacaacaacaaagaattcagcgtcacacacacacacgcgctccgacgaatagatacacagacncgtgcacatgttctttccgcgcacacagcgcgagtatgtgatgtagatagagtggtgtagatgtagtgtgagtgccctgtatagtagttatcacgcacaagaacgaccgacaactagcgaagaatccacatttatcctcataggacgcagcncaatgtcaccacgatcagcgcgcgcaccctaangcccgtcacgcacaatgtatcgcacacgcatatagtctgttccgctcgcgagattgttnttactacctctcttttacctacgctngctagtcatatgatgtcactcatgtntatccacgcgcccgaccaccccggcgtgtacagacttatccgacgcgacatatctacattnacacacatatgtncgtgattatcgagcgattattatctcctccgcctttccnctataccggcggggattagtgttgccgagtatatacctcataatgttcatgcggcatcatagtngtttgtttctgcttttttctagtatattatcacccgatgacgcgagtcagagtcaatgtagacagcagacaacaactatactccgctcagtccccgtctcgccgactcgtgngngtgctccggttccatnaacacgcannagganagtttcgcgccgttcttacgcgagtgagtggtagctatagtattcttatccgcgtgagcgcgtgtgatagagntgacacaacaagataacnagtnncgccaccacannntnntnnnnncnncnnnnnangggggggacacacaa

SEQ ID NO: 3959 - DNA, 1340 bp, Glycine max
  misc_feature (130)..(130): n is a, c, g, or t
  misc_feature (344)..(344): n is a, c, g, or t
  misc_feature (346)..(346): n is a, c, g, or t
  misc_feature (351)..(351): n is a, c, g, or t
  misc_feature (1158)..(1158): n is a, c, g, or t
  misc_feature (1318)..(1318): n is a, c, g, or t
  Probeset Number=SeqID_13738
ctccgtagttcggtgcatatacttacgatagtaatggcagcgcggcaccgtatcgcgagctcatatgaactgcagcgtacggcttcgttctgctactcctgtgtagtccgccgtaggcgtctcgtgagtntgctggcgcacataacattagcgagagattgacgttagcagtcatgttgtgtgtcgcttcgcgcgatgtgaatgtgttatatattgtctattgttctatagtcgtgctcgatgttgtgtgatcgtctgtacagacttagctgtcttgtatttattatgtgaggacttatcagatttcgcactatcgcagacgtcagctcgtgctcagcagtcgntngccantgagatcggaggttggatgctgagcagatatacgctgttcacatcatcaatctacgatgtagaggtgatgtatatgatctgatgcgatgtagtgtgttctgtgcacgagtgagttatctagtgtacacagacatctatcgtgagtcgtagtggtatctggcacagcgcgatgtatatattcgaaataagatgaaccagatcatgagtcttgtgtagccgtgctgtgtgatatgataatatagccgtgctcgtagttatagcgcggtacatgtaagaagagtgagtatctcgtattatgacttagacgtagatggtaaggaattggtgtgtctcgcgatatttatatatactcagatagtatacgagttgtggcatggtagtatatatagggtgcgttcctaattgtatgttctcttctcctatctctcctatatacaatagatcatctcctcgtcttatcggtcacactagagctcgacagatagattatattgagtggagtagtagagaggaagaccgtatcatcattagtcctcccacattaactcgtaataggcatatatgagactagagtatcaaattgtcgcgttgtatgaggtgttaggttacgacgtattatagtaataccacaacatatataaagatatgagatagatctacatgctggggcgcactgttcctctgtctgtgcccttcgtcatatccaccacgctgcgagactagtttctaatcagtagctgttcaggggatggtcgtaggctgtctgtcgatgcgcgtgctgcgctgcttcaccttatatggacgatntgaagtagagacagagcattatccggtgactcctaaatcgaatatgctgtgagcactgatctgattttcgttcgcctccgtctctacaatagtaagacctgatatgtgatacactcagtctttggagagtcgagacatattaattattacaactggttcnaagaaggggaggtgtgaaggac

SEQ ID NO: 3960 - DNA, 615 bp, Glycine max
  misc_feature (537)..(537): n is a, c, g, or t
  misc_feature (615)..(615): n is a, c, g, or t
  Peptide Sequence Number=SeqID_7790
  Probeset Number=SeqID_13739
tcgagtcagctacgtagtgcccccccccccccaagaatgcatagagattcattgatgttgagtcccttgttctctagcaatactcataacggaggatttttcagtggcttcacacctagatatttctcaaacgtcccccatatgcaagatggcaacaagacatttggaccagatgattttttattgagacctagtccaactcatatggatattgacgtcaacgcaagattcgaaaaagcagtcgaaaacatgaaaatggaactcagaaataaccctactcaacatttgggtgatcatggattggatcaaagtggattaaatcttgatatcgatcttattgatgacagctatttgcatgccccaatgaccaaatctcctcatctccaatttgtcggaagtcaaccaaccagtaaatgctcattcaagaaatttggagagtggactttgagtcccaacgcatccttcttgccaagaaagaagttctaagtgttttattcagatttttacgctagagtgtgttaattattcatcccactncggataattgatatgcgctatttaataacagaatcaatgagcttggagagtgaaatgaaatttatgatgctatattcn

SEQ ID NO: 3961 - DNA, 512 bp, Glycine max
  Peptide Sequence Number=SeqID_7791
  Probeset Number=SeqID_13740
cctgaccaatgttttggcgaagtctcattgtgcagaatccatcatctgacatctacaaccctcaagctggtcgcatcacaacctgcaccagccttgacttcccagccctctggcttctcaaactcagtgcccattatggatcactccgcacgagtgctatgttcgtgccacactacaccctgaacgctaacagcataatatacgcattgaatggtcggacattgctacaagcggtgaatcgcactggtgagagagtgactgatggagagctgcaagaggcaggcgtgctgatcgttccacagaactgtgcagtggctgcaaaataccagagcgatcactgttagcatgtgatatacaagatcaatgatggaccctcgatcggaaacctatcacgggcaaactcatcggtgaacgcatagtcatatgaagtgattcagcacacttttatcctagagagccagcaggccacgctggtgaatatcaacatcccttgcagctttctggttccacct

SEQ ID NO: 3962 - DNA, 887 bp, Glycine max
  misc_feature (887)..(887): n is a, c, g, or t
  Peptide Sequence Number=SeqID_7792
  Probeset Number=SeqID_13741
ctcgatttggtcacgcctgcaccgtcgggtttctctctgcctgtttttcataagactctaatttcccaagatctgatttttatctacatatccaaccagggaaatctgatgcgattgaatttgttgcccgattcatgcgtcaaacaagcaactccttgatgtttaattcgaacaagcaactccttgatgtttaatcatggttctctttggtgatattcaggtgttgcagtaccagcagggaagctcaaggccgccaccgccggtgtcggctgccctggtgcggtaggaaacatgcatgtgctcggggacattggcaacgtcgtccacgccacggccaggtcctcgacggatccagctaccggcccggcatggatcaatcgtccaatcatcaggaggttcagcgctcaactcttgaagaaggcccaggccgatccatccaagaatggcgtagaactgattctaaattcctccagcagcacgggcaaccctgaagccccattcgctgttactcgcaggttgattggcactggccgcactccaacactgatggtgaagaatgcagttttttcttttctttttgtacacaaatgaggcaatacagttggcatcgatggctgctactcgctggtctctcctttagcacaggttaccatcgccgtccgccgcttcgatgctcggctgctgccccatggacgcattcaccacacccctacagccgactctcctgcccttcactctgtggctatccttcagggaaattaattatatgcattttctattctgttgcctgatgcccactactattgtttgcggggatagtacagcctagcctaggtgcaatggcaataaagctcatgaactcatttttaacaaaaaaaaaaaaaaan

SEQ ID NO: 3963 - DNA, 1844 bp, Glycine max
  misc_feature (1)..(20): n is a, c, g, or t
  misc_feature (1844)..(1844): n is a, c, g, or t
  Peptide Sequence Number=SeqID_7793
  Probeset Number=SeqID_13742
nnnnnnnnnnnnnnnnnnnngtcagctacgtaggccccccccccccaaaaaattagaaaatcaaaagcagtcattcgaccaggaacacgcacgcttgagcaaagaactgtcgaataatgccgatacaatcgctgaattgcgaaaagaaatcgctcgattgatgggcgaaaatgagaaactattgaaaaatcaagccgttgctattcaaccagagagtacaagtaacagagacgatgagatccagaaattagaaaaaattgtgaatgaattacgtgaggaaaaggcaaatatggaagccgaattacaggtgctaaacgatcaagtcattaaaaacttagaaattgaagaccgaatcaagagcaccgtttttgaacttgacacaaagaacattgaaatcgccgaattgaaaaatagtttacaacaaattaaagagaatcaaaatgtgccacctgcggctatagatccgaccacgcaacaacaaatcgctgaattaaccgcaaaattgctagagaaagacgcactgcaccagtctaacatcgatttattgaatgcccaatggcaacaagtggttgatcaaaaatgtgctgaagtagcagacagttggcgtcatcatttgcaattgaaagaggaagaattcgcagccgtggaaagcgatttacgtgagaaaatgctacaacttgagcaacaatcgaataccagttcaacaacacctgaaacacaaaatacacctacctctggtgattcacgatcaaatatccaagaatcacctgaactcaaatctgacattgcgaacgccgatcaaagtgaactcgttaaaacgatgcaaagtgcattggagcaacaggaactggaaatagtttcgcttaaagaacagttggccattcgcagtgctgaatatgcccgaattgctgcgtccgtcgacccgtatgccatgaaatccacatcgagtaacagtttccaatcggttagtcaaacagaagaaactccatcgaaaggaaatgaattggatttggcactttatatgctacatcaacgtgatatgcggtgcgaagaactaaccgaagaagtgatacacttgctggaggaacgtgatacactacagctgaaactatcgaattccattcgccagattgaggagttcaaacagcgaactggagctgatgccaccgatgcatctgaagcaggcagcagcagtccggttaaatcaaacccagcttcgagcgatgcacagtcctcacacgatggcagttttaatgaacagtcacaaaatttggatttgaaattatctgaattgcacaaagtcagtcattctcgtgataaaaccctaaaggaggagcgtgaccaacggcgtcgtcaaatgaatgtattccaaaaagatgtagcaaacatgccacctgaagcgattgccgaactgtttggacccgatttcaagccaaatacacgaaacacccaaaatgcatcgtcgatgctgatggattggctgtggggacgaagtgataatgaaccacacaactgatgttccatatttaaatcattcaacttctgccaggtgcacgactacagtttgatttgtttctcttttaatctgaaacgattcggttttgatgtgggtgatctgttctttattagaaacgactcgtttaacgacctcaaattaaagtagttgcacttcaaaatcaacatgaattattaaaagccaatatttgaacgtaaaaacacataagcaaaaaaaaatcattcaatttacctgagaagaaaaaaaattatatttgtttttagattttatgatttatcgttaaatgtaaaataataaaaaatattgaaaaaaaaaaaaaaaaagaatn

SEQ ID NO: 3964 - DNA, 1983 bp, Glycine max
  misc_feature (1)..(1): n is a, c, g, or t
  misc_feature (44)..(44): n is a, c, g, or t
  misc_feature (47)..(47): n is a, c, g, or t
  misc_feature (51)..(51): n is a, c, g, or t
  misc_feature (56)..(56): n is a, c, g, or t
  misc_feature (63)..(63): n is a, c, g, or t
  misc_feature (69)..(69): n is a, c, g, or t
  misc_feature (76)..(76): n is a, c, g, or t
  misc_feature (90)..(90): n is a, c, g, or t
  misc_feature (100)..(100): n is a, c, g, or t
  misc_feature (181)..(181): n is a, c, g, or t
  misc_feature (233)..(233): n is a, c, g, or t
  misc_feature (256)..(256): n is a, c, g, or t
  misc_feature (261)..(261): n is a, c, g, or t
  misc_feature (269)..(269): n is a, c, g, or t
  misc_feature (273)..(273): n is a, c, g, or t
  misc_feature (295)..(295): n is a, c, g, or t
  misc_feature (305)..(305): n is a, c, g, or t
  misc_feature (308)..(308): n is a, c, g, or t
  misc_feature (314)..(314): n is a, c, g, or t
  misc_feature (358)..(358): n is a, c, g, or t
  misc_feature (375)..(375): n is a, c, g, or t
  misc_feature (416)..(416): n is a, c, g, or t
  misc_feature (428)..(428): n is a, c, g, or t
  misc_feature (439)..(439): n is a, c, g, or t
  misc_feature (455)..(455): n is a, c, g, or t
  misc_feature (472)..(472): n is a, c, g, or t
  misc_feature (475)..(475): n is a, c, g, or t
  misc_feature (488)..(488): n is a, c, g, or t
  misc_feature (525)..(525): n is a, c, g, or t
  misc_feature (538)..(538): n is a, c, g, or t
  misc_feature (560)..(560): n is a, c, g, or t
  misc_feature (563)..(563): n is a, c, g, or t
  misc_feature (589)..(589): n is a, c, g, or t
  misc_feature (608)..(608): n is a, c, g, or t
  misc_feature (616)..(616): n is a, c, g, or t
  misc_feature (620)..(620): n is a, c, g, or t
  misc_feature (648)..(648): n is a, c, g, or t
  misc_feature (673)..(673): n is a, c, g, or t
  misc_feature (705)..(705): n is a, c, g, or t
  misc_feature (715)..(715): n is a, c, g, or t
  misc_feature (733)..(733): n is a, c, g, or t
  misc_feature (740)..(740): n is a, c, g, or t
  misc_feature (759)..(759): n is a, c, g, or t
  misc_feature (774)..(774): n is a, c, g, or t
  misc_feature (778)..(778): n is a, c, g, or t
  misc_feature (805)..(805): n is a, c, g, or t
  misc_feature (890)..(890): n is a, c, g, or t
  misc_feature (905)..(905): n is a, c, g, or t
  misc_feature (917)..(917): n is a, c, g, or t
  misc_feature (957)..(957): n is a, c, g, or t
  misc_feature (973)..(973): n is a, c, g, or t
  misc_feature (999)..(999): n is a, c, g, or t
  misc_feature (1001)..(1001): n is a, c, g, or t
  misc_feature (1214)..(1214): n is a, c, g, or t
  misc_feature (1245)..(1245): n is a, c, g, or t
  misc_feature (1281)..(1281): n is a, c, g, or t
  misc_feature (1294)..(1294): n is a, c, g, or t
  misc_feature (1346)..(1346): n is a, c, g, or t
  misc_feature (1515)..(1515): n is a, c, g, or t
  misc_feature (1685)..(1685): n is a, c, g, or t
  misc_feature (1958)..(1959): n is a, c, g, or t
  misc_feature (1971)..(1971): n is a, c, g, or t
  Peptide Sequence Number=SeqID_7794
  Probeset Number=SeqID_13743
ngtgacgctcgatgctggtgatcgtcacgtactcgcacctactncgnacantgtcnacagtantcatgnccgcagncgcatctgtccganaagtaccagntactcatacgcgagtgcacgtctcacgactgtaataccactacgtcttcgtccatcgtcattgatcagcactcgtcacagntgtcgtagacgtcagtttagtccgagtatctgtactacgatcgatgcgaagnctaagtccacatgtgacgagcanagcgnacgctacnagcntatgtagacacatgatatgctngcgacatacntantcatcncaacagcactcgtcaagcacaatcacgagctgcaggaatcatantacactgagtcagcacntatcatggacgctgactcactacatcaggcttatccgggantaagctcgctantcacgtagctncgacatcacgtcgacntcagcgtgtcgcatgtncgntgctgcggtatcntatagtactcgatgagaccgtcgtacatgaatgagcngcatcactgtcgntcgcgtcttgtatggagatacntantcgatagtacgatgacatcatcacantgacagtcatatgacagtncatcgtcntacnatagccagtatcggtgcagtacacaacntaatcatagactacgtcgtgcgacntgagtggcagtatgatacactacaagtcacantgcgtcgtanctaacggcatgcgatcangatcgantactgcacatcgaccatancagacgagcagtcanccgnctgcgcgacgcattctccgctgtctcntgtctgtcacgtctacttccagcgtcagagtactcacatacgcgctgacgaacgacgcggtagacatcacactcgtctagcgtangcggtcacatcagtnctacatactacngatgcatagatctatactagtatcagcgaccggcgtacangctgactcgcacgtanatgtcgcgaatgacagcatagcgtangnctatacaacggctgcgacgcacacacatcttctgtctcacacatagaataacgcatatcgtacacgttgtcgtctccgcgacgacagaccgagcacagtacataatagtatcacagcgtcgctacaacacagacaactaacagaacagcagacacggcgtgatcagaaagcagtgtccggcgcgcgagtacatgcgttgtctgtgagatacgntcctcattccactccacgacagctagtaccnacatcacagcgctcgctgtcgtgtccacacgatcanctccgacgtcgcncaggcgtgactgcgcgtgcagcgacgacatgcaccacgccgaacgactgcancgtctctcactccgccgcatcgaccagagctcttacacgcgagcctactctcgcgcactcatcgtgctcgtcataatatgactgatagaccagcgctgtcgccgacagctatcgtaagagagaggatcataacgcggtgcggagcagtacgaacgaggaacgaaccgcnacaatagaggtagtagatgaataatatgaatagaccacacgtatcagcgcgacgcgatcgcgaccgcacatctcgactcacccgcacagacatgtgagtgagtgggtcgcacgagtgcgtggtgccatcgcgtgggtcgtgaggagatgaccgcaattccgtagcgagcnacgtctacatagatcagcgcagcatcgcgcagtataagacactcggctatgtgcctcgcgctgctgcagtattccaccatacatcatcatctatcgccactctattccgctcacgccacgcctcatgctccgcacgagtaacgcctcctcacttatatataagacatagaagttatccactacacgtcataaagtaacgcttctctcgtgcatgaattcgacgccacgacgcgctctcgcgctgatacacacacacacagcacacaccgaaannacttagcgcganggcctttccgcc

SEQ ID NO: 3965 - DNA, 493 bp, Glycine max
  misc_feature (5)..(5): n is a, c, g, or t
  Probeset Number=SeqID_13744
cattntgcggggcgtcgcttctacctcacggcacgctgtatggcgacggagcagctccagattttcggcctttcagtaaatatgctggaagacaagggggcagtaagggggacagtagattataagattggggtaaagacaagaccgtcgctgcagtttgtcaccaagcacatcagcagcaccaccaccgatagtaagcaacctgttggatgcagggttccttggtcggagttcatcgctgatgacagcccttacttcattgatgacgaactccatctgcaagttcacgtgaagataacaccacagccggagtgatgcatgtactgcccgcaagctttatggtcctcgcttaagtccctctttgtttctgtgagcgagaggggaagcccctgctattctgaaacaggaagaaacctgaagcgggcactctagttatttgctagcatttgctctgctctcttttggtgactggaattaatgtctcatgtaaata

SEQ ID NO: 3966 - DNA, 1755 bp, Glycine max
  misc_feature (14)..(14): n is a, c, g, or t
  misc_feature (17)..(17): n is a, c, g, or t
  misc_feature (23)..(25): n is a, c, g, or t
  misc_feature (27)..(38): n is a, c, g, or t
  misc_feature (40)..(41): n is a, c, g, or t
  misc_feature (43)..(43): n is a, c, g, or t
  misc_feature (64)..(64): n is a, c, g, or t
  misc_feature (66)..(66): n is a, c, g, or t
  misc_feature (76)..(79): n is a, c, g, or t
  misc_feature (82)..(84): n is a, c, g, or t
  misc_feature (87)..(88): n is a, c, g, or t
  misc_feature (100)..(102): n is a, c, g, or t
  misc_feature (142)..(142): n is a, c, g, or t
  misc_feature (151)..(151): n is a, c, g, or t
  misc_feature (166)..(167): n is a, c, g, or t
  misc_feature (171)..(171): n is a, c, g, or t
  misc_feature (176)..(176): n is a, c, g, or t
  misc_feature (185)..(185): n is a, c, g, or t
  misc_feature (197)..(197): n is a, c, g, or t
  misc_feature (271)..(271): n is a, c, g, or t
  misc_feature (326)..(326): n is a, c, g, or t
  misc_feature (392)..(392): n is a, c, g, or t
  misc_feature (486)..(486): n is a, c, g, or t
  misc_feature (514)..(514): n is a, c, g, or t
  misc_feature (554)..(558): n is a, c, g, or t
  misc_feature (622)..(622): n is a, c, g, or t
  misc_feature (649)..(649): n is a, c, g, or t
  misc_feature (657)..(657): n is a, c, g, or t
  misc_feature (666)..(666): n is a, c, g, or t
  misc_feature (690)..(690): n is a, c, g, or t
  misc_feature (694)..(694): n is a, c, g, or t
  misc_feature (733)..(733): n is a, c, g, or t
  misc_feature (768)..(768): n is a, c, g, or t
  misc_feature (772)..(772): n is a, c, g, or t
  misc_feature (781)..(781): n is a, c, g, or t
  misc_feature (831)..(831): n is a, c, g, or t
  misc_feature (838)..(838): n is a, c, g, or t
  misc_feature (866)..(866): n is a, c, g, or t
  misc_feature (899)..(899): n is a, c, g, or t
  misc_feature (984)..(984): n is a, c, g, or t
  misc_feature (1039)..(1039): n is a, c, g, or t
  misc_feature (1087)..(1087): n is a, c, g, or t
  misc_feature (1123)..(1123): n is a, c, g, or t
  misc_feature (1249)..(1249): n is a, c, g, or t
  misc_feature (1575)..(1575): n is a, c, g, or t
  misc_feature (1658)..(1658): n is a, c, g, or t
  misc_feature (1706)..(1706): n is a, c, g, or t
  Peptide Sequence Number=SeqID_7795
  Probeset Number=SeqID_13745
ggggggggggtggnttntgtggnnntnnnnnnnnnnnntnntnattggtgtgtgtgagtgtgtntnagtgtggttnnnnaannnacnntcacccacactnnncaccaacagcagaatcgacaaatagtcgctctcgtgtgtnctcacacancacacatgcgcattnntganatttnatgcaacanagatttgggctnataattcagtacggtacgtatacgatatcactgaatgttaggagcaataaacacatacaatatagtcttctggnctctttgcgtccaacagtcatatacgactgtatcgtctcacagacgcgacaacancaacagattacactacggcggattcatggctcttatcagcggaaactctgggtcgccactctggcnctttctctctcattacggaggtaattatctgctacagacaacctttagatccatcgagtcgtctgaataaagctgaggtgcagacgagcagatncacttatttgtttttgtaggatattgtngagagatagtaccacttcatactgggcgcagtgtccgcannnnntccaccctgcgaattccgtctggtcacagcagacagctggacgcaatccgcccccctctgtcgnaggtcgctggtgtgtgtgtgtagtagntgcgtgcnctcgctccntcatgtttcgtcttgcgctgtcgngctngttgtgccggctcgatcgcgtcatcgcgtcaacactgtnctgacgctgtgtgagataccagatgacagcggcgntggntgtgtatcntacggcgtctctatggacgcgtgagatacttatgtaatatgtatagagtntagaggngaaatatcacataataccgaccagcaancacaacactcactgctcactacctacgatgcgncgcaacatctctgacacatagagcacagcactaactacttagtgagtgccactctgtgtgtgataagaaaaatgatataggtatnatcatacttacctatatcatagtagctaacacacacacacactcacccatccccntcaccgtactaccgactgcgcgctctctagcactctgtagatatcgcncgcgtgctcaccaccgacgaccgcacatcactgccngtgcgcactcaccaactagtctcgcgtcgcgctgccgcacaggtgacaacgtgactcggaggtatacgtcgcgagacacatgccactgtgatatgtatagcgacgactgagcaggtgtggatgcgnagttatactgaagatagttaggtgtcgcgctgtcgacactccgactctcgacgccgacagatggtgtcacatcgtcaagcagacacgagacagatacagaactggtactatagacggagagcagtagtagatgtcgagatagagataggtgatcacgtcgccaaccatcacgaataccacgatagacaagtcggtatgcgcatatcacaccgcgcacctctacagcacatcgcaactacacagtgtcttggcgcacgagagagatatgttactcaagatatatatgagatgaaggatatgtggatacagaggctgacgggcacacntctctctctacgaagcatcgacatgaaatactacactgacgatagtagatagagagggtgtgaggacacgagtgagacgtctngatgctatctgacgacagagtatcacgatcgttatctgctcatagtcnactgtcacgtcactacaataaatagatgagatgagtggtatagtcagag

SEQ ID NO: 3967 - DNA, 614 bp, Glycine max
  misc_feature (1)..(1): n is a, c, g, or t
  misc_feature (536)..(536): n is a, c, g, or t
  misc_feature (558)..(558): n is a, c, g, or t
  misc_feature (572)..(572): n is a, c, g, or t
  misc_feature (600)..(600): n is a, c, g, or t
  Probeset Number=SeqID_13746
nttttttttttttttgccaataaaggtagtataaagtaatttttttccagagatcacagcatatgatatgctttacaataaaaataatttatatttcatcgacagaataatttaaatacagattaaaaaagaaacgaccattgagcaagcatactgataatcaaataattattatgcattttcagcatttggctttagactttcgagaatcacttgattataagacacttttgcaattacatcattcaaaagtttattcttataaaactgttcaatttgcatcttatttccaccacattccttgcaatagcttccctttggaacacatttctcacagtaatggtgtccacatggcatcactgtaactggattcttcataggattaatgcattcacaacatgataatgatatcaataacgacgtctgtgcatgatctatcttggctatggcctttgtaaattgcttctctttctcgtcaatctgtgccattttttctttgattttagcttcatccaattctgatagttttttaagancttgcttataattttcttctgnagtttctaacgaanattctgcttgcttcaatcttaatcttgncttcacaaactctt

SEQ ID NO: 3968 - DNA, 502 bp, Glycine max
  Peptide Sequence Number=SeqID_7796
  Probeset Number=SeqID_13747
taatatatcgaatgaatgaggctaatgggctccgattcgggctgagatgaaatcagtgcgggggaaggaacaagttataacaacctcagttaaatatgcatatgtgcaaaagatatctttcaactactatagttcttcttagaaatactaatctccgagttttttaatggctaaaagacctaagaaaaccctggatcttcaatcggatcaatattcaaagtaaacgagtggacggacgcatcaaaacacaaattttttgtgatgccctacaatattacatgaaacagaactttaaattatccatggtagaccaaaaccagatatactttgggtggtggagaattatcccttttaaaactgggaaaagaaatatgaacagataaattcccccaggttttaaatgatttgaagaaaatttgaaaaaggaagtcttttattttccaacgggcatcaagggaactcaaatggcggcatcttttgctttactacacaaaattaatat

SEQ ID NO: 3969 - DNA, 361 bp, Glycine max
  Probeset Number=SeqID_13748
actaaactcaaacccccagaaagagaaaacaaaaaaaactaataaaatgaaacccaactaataacagaaaaggcatctgactgaaatgcgggaggatgaatctgaaggagctgacattctcttggtggggccgggtctttcttacttgcatatcttaacgctgctccgggataattctcctttgcctattgcggcctaccatgtttctggtggggctgctttgataaacgctgccggggctatcaccctggtggaccaccattttgttgtgatggagtcactcctcttcctcccatgggccggtgctgatatggggctcacatattctgctctgcccgctgtccgtgtctgtgtggagaga

SEQ ID NO: 3970 - DNA, 843 bp, Glycine max
  misc_feature (403)..(403): n is a, c, g, or t
  misc_feature (461)..(461): n is a, c, g, or t
  misc_feature (482)..(482): n is a, c, g, or t
  misc_feature (502)..(502): n is a, c, g, or t
  misc_feature (536)..(536): n is a, c, g, or t
  misc_feature (540)..(540): n is a, c, g, or t
  misc_feature (543)..(543): n is a, c, g, or t
  misc_feature (559)..(559): n is a, c, g, or t
  misc_feature (578)..(578): n is a, c, g, or t
  misc_feature (583)..(583): n is a, c, g, or t
  misc_feature (604)..(604): n is a, c, g, or t
  misc_feature (612)..(612): n is a, c, g, or t
  misc_feature (638)..(638): n is a, c, g, or t
  misc_feature (655)..(655): n is a, c, g, or t
  misc_feature (677)..(677): n is a, c, g, or t
  misc_feature (689)..(689): n is a, c, g, or t
  misc_feature (699)..(700): n is a, c, g, or t
  misc_feature (720)..(720): n is a, c, g, or t
  misc_feature (726)..(726): n is a, c, g, or t
  misc_feature (734)..(734): n is a, c, g, or t
  misc_feature (745)..(745): n is a, c, g, or t
  misc_feature (749)..(843): n is a, c, g, or t
  Peptide Sequence Number=SeqID_7797
  Probeset Number=SeqID_13749
atatcgagttaggttttaggagttccttctctgcgaaatcgagctttaagctgctgggttgtctcaagatcttagtattggctggttagatccgattacatccgtctctctctctctctctagacccaaacccctccctcccccccctcccccccatacccctcccgcaccctcgattcgaaaacatgccatcgattgtgattgcgaggaaccaggcgagcggtcagaacttggtcgattcgactaagctcgcaagaatcgtaaatgattccaaaacgtctctccctaaagagaagaaggataagaaggagaggagaaaacacaggacagaaaagcgtgagaaatctcacagacattcttctaaaaagtccagcaagtccccaggcgtgtctgagaagagtgntgtgaccgaggagctcgagggacctcaaaaccacctcggttatctgtctgatggaagnctgaataggaacaagaggaanaagagatgtctctcctccgnctgctgagagtctcatcaaagttgtgcctgtagnaagnaancctctacgtattccgnttgacctttcaaaaaaccnaaggntgaaagcccctttgccccccngaggatgnttgttgctttgttccaccttccggtngcttgttcctctcaatntggacctcgaagctggccgganggcttcttctgnttgggagctnnaacctgaaaactcccccccncccctngggccttntttttattcantttnnnnnnnnnnnnnnnnnnnnnnnnnnnnnnnnnnnnnnnnnnnnnnnnnnnnnnnnnnnnnnnnnnnnnnnnnnnnnnnnnnnnnnnnnnnnnnn

SEQ ID NO: 3971 - DNA, 1549 bp, Glycine max
  misc_feature (20)..(21): n is a, c, g, or t
  misc_feature (149)..(149): n is a, c, g, or t
  misc_feature (946)..(946): n is a, c, g, or t
  misc_feature (1016)..(1016): n is a, c, g, or t
  misc_feature (1254)..(1254): n is a, c, g, or t
  misc_feature (1256)..(1257): n is a, c, g, or t
  misc_feature (1259)..(1259): n is a, c, g, or t
  misc_feature (1390)..(1390): n is a, c, g, or t
  misc_feature (1510)..(1510): n is a, c, g, or t
  misc_feature (1549)..(1549): n is a, c, g, or t
  Probeset Number=SeqID_13750
ctcaaggagggggggcaacnnccggtttgctgtctttgcgtttgttttggttggtgttgggcgttttggacgttggtcgagagagtagtgggagattgggggatgtttggcggcgccgtgatttcttccccgtgtatggctgtccgtcnctggctctcccccttaaaactgcgtatagagtggcgcgtatggcgttcggtcgcgggggccctatgttggtcccgggtcgggggggcctcccgctcctgctttggccagtcttggccttggcatgtggatatatgagtttgttggccagtgttcgggcctttctgcggtgcgagcggtttctgttctgtacattacgattggggggggaggaaggtgaggggggggggtgttttgtgagtggggaggcgccggtagtcgcttagaatccttgcggggtggggggaggagaggcgtgtgtcattgtggtgctcatcactacttctctcaccactgcgtcttctcctcctgcgtattcgtcatgggtgggtcggactccatgtcgactgcggtttcttaggtaacttatgccctagactttgagcatcgtgtgggggcggctggcgtatatgatgctggcttgtctcctcgcctatgtctattccactctttatcgcacttgcgggcgggagggcgtgctgtgcgatgttgttcgcagccgatcacctccgccgactggacgtagtgctcgtatgcagcgaactctgttgggtcggtggtggtggctagaagccgggctcatctgggatgagttgtactcttcactcgcggcgccgggctcaacgtgagcctacgctagtattacgatgtgtcgcgcacagagagctcatacgagtacgatagtgcggtatcagtgtgactcatgcctggcagcgcgagacttgtcaccgggctcgcgcgctggtcgcgagtcgttgcncggacgagtggtagctgaagcgttcgagacggtggtgtacccctgcgtgcatgcgcgtgtgcactcgttnacgacgcccagggaagtgagctgtgtgcgctgctgtgtgagagcgtatgcatattgatcgtatgtattgggcgtggacgtggtatacggcgctcgcagagcgatactcgtcgagactacatcatctactccattgtactgctgatcgggtagatggactataccgcacatgttcgcgcgctgccatattggcgcgtggcgctatcacgatgcatctgcgtgcgggtagtatcgtgtgntnntntagcggcggtaagtctctgagtcttgagagcggctactattccagagctcagttacgcaccagtgtagcgtgcagcactggagccggccatggcgtagacatgctctatactatgaccgcatagaccgagnatgacagtcattccgccgctgacaggcgcgtggtgcgacggagctgtgctatagagctgtatgtgatgtgcctcagctgcaatttctcgcagaacacgacaacgcgccgtactactcaangtaggtagacgggagcgaatgttgcgtcgattgtagcgn

SEQ ID NO: 3972 - DNA, 670 bp, Glycine max
  misc_feature (650)..(670): n is a, c, g, or t
  Peptide Sequence Number=SeqID_7798
  Probeset Number=SeqID_13751
tcagctacgtaggcccccccccccttttaaaaaattcaaaattaaccgaacttccaaacaatacatgaggaattatcgtgactatgctgctgaactatcttacggtgaagaaaaagtactaaaacgtcctgcttcagctcacagaggcaacgcccaacaaggcttcagtaataatgaagaaggttcgggttttggaaggtcatttggtaaaggacaaagagtaggaggaggagaaaagaaacttcatcttggtaaaggaaagaattacagagatgaagagcaggaagagctatcatcattatcaggattcacagcatcagataatgaggaaaacgatagagatgagatcaaatggagtctcgcaccaaagaacaagaagaatgtcaagtattcagaatcagatgaagaggaagaagagaatcaatgggaacatgaaaacagggatataatgttaaagccaaaagacgatttacatgaaaggtttagagagcatgatatgatgagaagacaaggtgaattagaaaagaaacaaagagaaattctcgctgctgctgaaaatttacacaacgttcagaatagtcaaactatgcctttgaagagaccacagacttcaaatggtgccatcaggtctagtactaataatatgtcannnnnnnnnnnnnnnnnnnnn

SEQ ID NO: 3973 - DNA, 540 bp, Glycine max
  misc_feature (388)..(388): n is a, c, g, or t
  Peptide Sequence Number=SeqID_7799
  Probeset Number=SeqID_13752
aatctcgaaacaatgctgaagctttggaatcagaatgtgaatctaaagtttaattttaactcacttattgaggaatagaaaaaacttctgaaacatttcaataacgattccgtcaggttttgacttttcaactagatttataaaattatactttttataaaaagaaaatcgaaagcaatatctttcatctgatactatgatcgtattcttggagcaaatcaatacaggagcaaaaatttcatgaaaagaaaaatcagttttatgggaaaattgactttgaaaaaacagagcgtcaaatatcccatagacttagatgctaaacgcattaaactctaaatttctgttcaagaacttttttctaaaaatcgatcttcacactatctagatnactcaaacatacgatcatattatcactatgaagatactaaatcgaattttctcataaaaaataaattaaaaatcaaaacctgacttttgattccattttgaaatgtttcaaaggttttctctatcaccctgaaaatttcacgagcctcgtgc

SEQ ID NO: 3974 - DNA, 1926 bp, Glycine max
  misc_feature (1)..(1): n is a, c, g, or t
  misc_feature (45)..(46): n is a, c, g, or t
  misc_feature (60)..(60): n is a, c, g, or t
  misc_feature (62)..(62): n is a, c, g, or t
  misc_feature (66)..(66): n is a, c, g, or t
  misc_feature (102)..(102): n is a, c, g, or t
  misc_feature (141)..(141): n is a, c, g, or t
  misc_feature (145)..(145): n is a, c, g, or t
  misc_feature (159)..(159): n is a, c, g, or t
  misc_feature (176)..(176): n is a, c, g, or t
  misc_feature (182)..(182): n is a, c, g, or t
  misc_feature (236)..(236): n is a, c, g, or t
  misc_feature (271)..(271): n is a, c, g, or t
  misc_feature (328)..(328): n is a, c, g, or t
  misc_feature (330)..(330): n is a, c, g, or t
  misc_feature (357)..(357): n is a, c, g, or t
  misc_feature (375)..(375): n is a, c, g, or t
  misc_feature (421)..(421): n is a, c, g, or t
  misc_feature (443)..(443): n is a, c, g, or t
  misc_feature (453)..(453): n is a, c, g, or t
  misc_feature (462)..(462): n is a, c, g, or t
  misc_feature (468)..(468): n is a, c, g, or t
  misc_feature (495)..(495): n is a, c, g, or t
  misc_feature (544)..(544): n is a, c, g, or t
  misc_feature (581)..(581): n is a, c, g, or t
  misc_feature (592)..(592): n is a, c, g, or t
  misc_feature (693)..(693): n is a, c, g, or t
  misc_feature (708)..(708): n is a, c, g, or t
  misc_feature (767)..(767): n is a, c, g, or t
  misc_feature (803)..(803): n is a, c, g, or t
  misc_feature (875)..(875): n is a, c, g, or t
  misc_feature (910)..(910): n is a, c, g, or t
  misc_feature (919)..(919): n is a, c, g, or t
  misc_feature (979)..(979): n is a, c, g, or t
  misc_feature (995)..(995): n is a, c, g, or t
  misc_feature (1031)..(1031): n is a, c, g, or t
  misc_feature (1072)..(1072): n is a, c, g, or t
  misc_feature (1124)..(1124): n is a, c, g, or t
  misc_feature (1170)..(1170): n is a, c, g, or t
  misc_feature (1228)..(1228): n is a, c, g, or t
  misc_feature (1230)..(1230): n is a, c, g, or t
  misc_feature (1232)..(1232): n is a, c, g, or t
  misc_feature (1237)..(1238): n is a, c, g, or t
  misc_feature (1274)..(1274): n is a, c, g, or t
  misc_feature (1297)..(1297): n is a, c, g, or t
  misc_feature (1299)..(1299): n is a, c, g, or t
  misc_feature (1311)..(1311): n is a, c, g, or t
  misc_feature (1469)..(1469): n is a, c, g, or t
  misc_feature (1482)..(1482): n is a, c, g, or t
  misc_feature (1485)..(1485): n is a, c, g, or t
  misc_feature (1597)..(1597): n is a, c, g, or t
  misc_feature (1599)..(1599): n is a, c, g, or t
  misc_feature (1609)..(1609): n is a, c, g, or t
  misc_feature (1657)..(1657): n is a, c, g, or t
  misc_feature (1803)..(1805): n is a, c, g, or t
  misc_feature (1816)..(1816): n is a, c, g, or t
  misc_feature (1825)..(1825): n is a, c, g, or t
  misc_feature (1869)..(1869): n is a, c, g, or t
  misc_feature (1871)..(1871): n is a, c, g, or t
  misc_feature (1879)..(1880): n is a, c, g, or t
  misc_feature (1883)..(1884): n is a, c, g, or t
  misc_feature (1890)..(1893): n is a, c, g, or t
  misc_feature (1896)..(1896): n is a, c, g, or t
  Probeset Number=SeqID_13753
ncgagatcgagcatgaacgcgcgagcatcgagacggcatagtgtnntagcaattgagatntnacantacatattattcatatgtatagtatgtagagcaacnatatggatatatgagtgatatggggccgggcacaacacncacntgattctcgtcacnggtacgtgcgtctgatngctcgntcgcatcacgcgcacacacacacagtcgctctatagtgtgcgctcagacctcgntgctctgcatcattcatcagacatagatgatctanagacgtacaactcaaagggatgcgtagattcgtcacagcgagcacactgccacacgngntacacgtacaagtgcgacacgtaatgntcactgcgtgactgctcntacgtatgtgctagtagatatagagcagcgagatagcgtgagcatngttatagagatgatcataaatntaaagtctgnatcgtgtgngtgtgngagtagggaggcggacggacatacgtnataaaattaatataactctactacgaactacagcagatgatgatatctnacagacaggtgcgcgatgacgagagagaagatctagntaggctacggntaccgctgtcactgtagtgaggcacatacatctatagcagggccgccgcgcgcacgcgcgcagggtgtcacacgactgacatcgacgagcagatacacatnacggagcacacgagngatctgtgtagagacggcagcgcgcgtgtcatatagatgtcgtgtcgagctgtgcggtnctccacccagagaccttgtgagtcagcaccgcgtcnatcatcctctagcaatgaaccccatacgcaggcgtatagtgcagactaagatgatacatacactacatcacnacagcgacgatgcgtcgtcgcgcctctactatcancatgctctntcgagcggcgagtacacgaagatagatgtgtcacgtttagtcggagtgttagtaggaatnagagaagatagtagantatatatgataagatgagaggtggcgtagctacagntccgcagatatcactcacatacatacactctaggcggagtngagttgtagtatgaacattacacgatgagtgataatttatattatgtatagngatcttgtaatatggctacgcgtctcctccccgtctgacgactcanctccatcaaatacaccatcagctagcgtcatcagtcagcgcatcaatctcccagtgtngngntggtnnttttcctcagtcatcgcatctcgcgctgtaccgtcncaatacactatcattactaattntntatgcaatagtnacatagacataatagttggcgtctgtcggcgtctgctagtgtaaggtgtaacatacagaatagccactggcacacaatgcgacccacacaccatatgtatcatactaagctctctcctgtatatgcgcagagctgtagaggatagagagggcctgggncataataatagtngancataacagataccaggcctccgagtcgcgctcgcagtcattctatcacagatactgtcggctaggtagctgagtacaatagtcatgctaaattatatatttatcgtggtgtntngctgggttgnggagagtattgtggagagcagcattgtctagtgtggtcatatttgtanctatcatgcattagccaacatctaactttcagaaacgcatctatctagtcgtgactggacagcaatgcaggccgctcaagtggtaccactcacagctcacatatactgcactaagatagttgaagaggtttgttatttattaattnnncgcgtgctttnttatcgttntcaggagcatgtcgcggggtgacaataggagtatgtgagtggtntntccgtgcnnttnntaaaannnnaanaagaggcccacacacgcggcccacacacac

SEQ ID NO: 3975 - DNA, 425 bp, Glycine max
  Peptide Sequence Number=SeqID_7800
  Probeset Number=SeqID_13754
tcttattccacactagtatctcaattaaccggcgcattcgacacccgatctatcatgctacatacgtgttcaactgggtgcaaacattcgcatcgcagtgatgaagtgggtgaatagctgatatttccacagtagcttctcatcatgcgagtcatagcatttcaaacattaaagccgctcttcgattctgagcctatcaagcaaggccatgaatggaatcatgggcgcacacccgaattccacaaaagtactaaatatgcttcctgcaccggacagaaaagtttgggtagccattcaagtaagagtttcgggtatccattcgagtgagatatctaagcttgcgggtttatacttcgaaggtctatcacacagaagtgaactatgtactctccgcccagagttcgacctattccgacttactacgc

SEQ ID NO: 3976 - DNA, 569 bp, Glycine max
  misc_feature (21)..(21): n is a, c, g, or t
  misc_feature (28)..(28): n is a, c, g, or t
  Probeset Number=SeqID_13755
tcgagtcagctacgtaggccnccccccnatttaccggagagaagggtgatgtggtccaccaggatgccaggtccagctggagagaagggtgatagaggtccaccaggatgccaggcattaacggaagagaaggagcgaaaggcgatattggtccaccaggagcagaaggattacctggcgcaccaggttatccgggagaaaaaggattaccagggccacgaggaagagatggacgtgatggattatttggatcgaagggtgacaaaggtgaaccaggattaatttcgccaccaggaccaccaggtacacctggtattccaggaagagatggaccaaaaggcgatcgcggattcccaggattaaagggtgatgaaggattacaaggtattcgtggcgaaaccggattgcaaggattacaaggtccaagaggtccaacaggaccaccaggcatacaaaggtgaatttggattggttggagcaccgggtctcgatggacgacctggatcaagtggtccaaaaggtgatgctggtagagattgtacacatgcgccagattactatagtggtat

SEQ ID NO: 3977 - DNA, 416 bp, Glycine max
  Peptide Sequence Number=SeqID_7801
  Probeset Number=SeqID_13756
atttatgttactcttgtctttctttatttcatcaacagaagaagaagaagaagatcgaacgaaagctccttccattattccattcagcgatttcatggtggcgagatgtatgccggcgatggtggtggtggctattgccgcccttgacttgacggaatcctccaattggtagcgggacatcaacagctccccgctctggcaggatcgcatcttccacctcctttccatcctttacagaatcgtcaacgtcgtcactctcgttcaattagttcgaatacaattgagagtgccagagtatggttggaccacgcagaagtttggtgtcttgtttttgtcttccgtcgagatgtgcagaagttgcagccaaagttctttgcattgttttgagggtctagaatggcttcatctgaaaagag

SEQ ID NO: 3978 - DNA, 641 bp, Glycine max
  misc_feature (616)..(616): n is a, c, g, or t
  misc_feature (641)..(641): n is a, c, g, or t
  Peptide Sequence Number=SeqID_7802
  Probeset Number=SeqID_13757
tcgagcagctacgtaggcccccccccagtaagaacaaccagtacacggcagcaattccggcgcttctccttgaaatagccaccaccggcagactaaagctgtccaggcttcacgttgaaggattcagcgagaatatattcaactcaatatctcgactggagaaagagaaggcagcgaaagaggagtcgctggcccactgcaacccggaccacgacaaagcgaagatatcccacctggaatctgaactatcgaaaatagaagagaagatagcgaaggccagggtatctctcgatgatattcgaggtggcattaagcggccgtgcctgaatctcatagcatcatcaacgcctagggagcttgcgtcaatcattgatgagaagaatatcaagtctggcttgctgggtcgctcactggtactggattgcggcgaggaagccagggagagaaactttaatatctggggaatgaacccggcagatattggcaggcttgaactggctgagcttgagcgggaaatttgcctgatagctcagtcagctgatgaaacagcggccagtgatgagcagaaggaattcagcggcaggcatggcgtcaccgtcaaaccaaccgaagcggnagacaaaatgatgttcgagatagcn

SEQ ID NO: 3979 - DNA, 406 bp, Glycine max
  Probeset Number=SeqID_13758
agctctatccggaaccatggtgagcacctccttcatgaagaagcaacctatgacaaccaaaagcctaaatacattccccaacgctctttttggtctgaaaggtggacgaagtggtcgtgtaacttgcatggcctcgtacaaagtgaagctcataaccccagaaagagaagtggagtttgaatgcccagataatgttttcattattaacaaagctgaagaacaaagcattaaacttccctactcatacaagacttattcttacatttcatatattaaaaaaattataaaatagaacgtaaaccactcacataatagcttccttaataattaacaaatacaaaataaataaattctcacctatattactctacctatatcacacatactcattaacacacacaataat

SEQ ID NO: 3980 - DNA, 1365 bp, Glycine max
  misc_feature (54)..(54): n is a, c, g, or t
  misc_feature (435)..(435): n is a, c, g, or t
  misc_feature (794)..(794): n is a, c, g, or t
  misc_feature (918)..(918): n is a, c, g, or t
  misc_feature (944)..(944): n is a, c, g, or t
  misc_feature (1365)..(1365): n is a, c, g, or t
  Peptide Sequence Number=SeqID_7803
  Probeset Number=SeqID_13759
gtggggcgccgcgcgggtggtcggtgcggttatattcaagaggcaccaacggcncccgcgcgagtaatatacgctgtcgtaaaagattttgtcctaaactacccagccgcgaggcggggcggtcgcgcggaggcagtctctccgacatgagagagtggggcgcgggcggtagaagagtgttctcgtcgtcgccgcacgttatattagtgtttgtcagtatgggcgccacgccgcgcgccgttaatgagttatatcgccatccaatcctatcttacgcgccagcacaagccgaatcaaagtggtgttagcgaattgcttaacattatagaaattatcgcttccccgcccgcgccagtcttcggtgcgcgggagtcgttttgtatatagattgtggagagtagaatgtcgccgcgacgtcacacatcctgtgtgtgnggattgggaggaggtcggtacttctgcgccggacgatctcgaatgaacgacagcacgcccgttcgtgagccgaaatatatcaatttaaacagatccgtgggtgcactatggccgcggcctgagttttgcgacgactcgttatccctccaacgccgatatcacagcccgtgtgttatgttccggcatctgcccccactccgaccccaatgtgtcgtttttatcgtgtccaccccggcagagcgcggtgtgttgttgttgtttcccacccgtgttcttctcgtcgccacactatattagtgttgagcgtgaatggacgacaagagggacgcaaagtacacgcgccgagttaataatggtgnttgtgaaccccagcgtttacacgaaactcgcgattcgcgcgcgccgcgtcgcatatacaatattgagcggcagacaatccaacacatgcccttttatcacttactcaccagcgatacaccgccntctatattattattatacatgcatancacaattggcgccggttttcttgcggtgacacgcccgcgcgatgattatatataattactaccgccaaatattttcttcgtactacacgcggccaacaatattatgccgcggcgatccgctacgccgatgtcagccatacattatatgatagtccgctgcgaactatggacaatgtgcgcgatatatgtgtggcgggccgctacctttatacatttaccgagtaacgtcgtatgttaaagagaataaccacgcgcgcgtcgcggcgcatattataccacactttatcaccaacacggcacacttgaacggcctatataacacgggattggagtagaacacaatagtgcgagctgagcaccgacgataagacaacaatagtggagagcgacagtctggagcgagagatacgatatcgcgcan

SEQ ID NO: 3981 - DNA, 1687 bp, Glycine max
  misc_feature (60)..(60): n is a, c, g, or t
  misc_feature (85)..(85): n is a, c, g, or t
  misc_feature (202)..(202): n is a, c, g, or t
  misc_feature (763)..(763): n is a, c, g, or t
  misc_feature (809)..(809): n is a, c, g, or t
  misc_feature (859)..(859): n is a, c, g, or t
  misc_feature (979)..(979): n is a, c, g, or t
  misc_feature (985)..(985): n is a, c, g, or t
  misc_feature (987)..(987): n is a, c, g, or t
  misc_feature (1095)..(1095): n is a, c, g, or t
  misc_feature (1124)..(1124): n is a, c, g, or t
  misc_feature (1359)..(1359): n is a, c, g, or t
  misc_feature (1373)..(1373): n is a, c, g, or t
  misc_feature (1465)..(1465): n is a, c, g, or t
  misc_feature (1505)..(1505): n is a, c, g, or t
  misc_feature (1637)..(1637): n is a, c, g, or t
  misc_feature (1680)..(1680): n is a, c, g, or t
  Probeset Number=SeqID_13760
gtggcggtctggtcaactacaccctcactctctcgcactcatgtaatctctgatcattgntacagagacgctgtgatgatctgtngacatgcaagaaatctaggtagtaatcgagagagtaataatatcacccatgacgagaggttggcgatcggcgtatcagctaatagtgtgaagtgtgtgctgcatctgccctctctancacatgagaggagagtcgccatcggatatctattattgtcatcatagactatagatcacatttctctcttacgtggttttatatgtgctgtgtcctatgctcgtgcgggactcactgcgagatcccacaccgcgccgacagatattagacggatgccaaaaggtgaaagaggcatgaagagcgtagctgtaagatagtgaaggatagagttatgtagacagtcgatagaaagacatcacagatctattgcatatatcacacatcaaagtattctgtattatatattgtgtaggtgtagaagatggcaacaaagctagtatcagtagtatatgtgcaaaaatagttagaaccgacggtcacaattatataatagtactcaaataatatacctatatcagaaccaactattaatatcatcatatcacctcatgacacatgtaacacagaataacgatatagcgcactataatattctgtgtatataaggaggctatcaggacatcataatattatactacatgtatagatgtttctagcgtccggcgggatttcttgatgatnggtcatactcacgacagtgatgcgcgcgcgctgcagagcgcaccgncccagtattgcgttgattggtgtgactgctagagttacacgccgctgcanacgcagacttcaataatatagcgtagctgcagagtaatgtactgactgagcacgatgcgatatggtatgtgtcggatcgtcgtgagcatattacattaactgccaacctactacatggangtatgntngattacgtgagtatgttgcgtagagttaagactctgacagattgtaatgcatggtatctgtattcatgaacgaagatcaacgtgtacagaatatgcctagatagtgtnctcagaatatgatgagtgagtagcgatantgtacagattatagatcatagataaccatgtataacatattgtcgagtatcagacacctgctcgtactctaccgctattatgcgtatatatgtttggatgtgtacagtactatgatatgatagatgatactgtgcagtagtctaagagtggaatggagtgagcgaatacagtgctaagcgactgaatagacaacgagcgacgtatagacgatgacgcgccggcaagacgacgctngatccgatgaacgnacaacaatcatgcaatgtgaaagctgaggatagtgatgctgtaattcatatgtgatatgatagaactaatactatatatgcgtactgtctgnacgatctgagagacggagaacatgagaatatcagtagcgnattgtgcgagagagtatacagcgatggcgtcgaagcactgagatagtgagttcgtagatacacgactaataactaaagatatgatctattttaatgccattgtgctatctatatatagatgtatatagtctntacgattctcgagtctctggagtctctcactacgtacacacangacgtgg

SEQ ID NO: 3982 - DNA, 600 bp, Glycine max
  Peptide Sequence Number=SeqID_7804
  Probeset Number=SeqID_13761
atcatttatgatggccaagtgtgatcctcgccatgcaaaatacatggcttgatgtctcatgtaccgaggccatgttgcgcctaaacatgttaatgcagttgtgggcattatccagtccaagcgcgctattcaatttgctgactggtgcccccctggtttcaagagtggaatcaattcccagcctccggcagatgttcctggcggagatcttgccaaggttcagaggtctgtgtgcatgatctccaattcctccaatgttgttgaggttttctctggcatagaccccaaatttgcacctcatgtatgccaagagggcttttgttcattggtatgttggtcaaggtatggaaaaggtagagttcttttaggctcgttaatatcttcctgccccggagaaatattatgaggaagtcggtgcagaggcaattcaataagaaggtcatgaaggatcacattattgattacaagtttgcactgctacgttacttgtgctgagttgaaatttttttcctcgtgctcagtgtatggaagttcttttcgtggaacatgccatgatccggaactttggagctttatgagaagatgtgaacatttattcgc

SEQ ID NO: 3983 - DNA, 1416 bp, Glycine max
  misc_feature (110)..(110): n is a, c, g, or t
  misc_feature (677)..(677): n is a, c, g, or t
  misc_feature (850)..(850): n is a, c, g, or t
  misc_feature (931)..(931): n is a, c, g, or t
  misc_feature (959)..(959): n is a, c, g, or t
  misc_feature (1141)..(1141): n is a, c, g, or t
  misc_feature (1162)..(1165): n is a, c, g, or t
  Peptide Sequence Number=SeqID_7805
  Probeset Number=SeqID_13762
tttatcattttactatttcataatacccgtagacaacatcgaagtgagtctgtgacgcgggttgcactatactcgttgctcgtcctgtcgctgggtcgtggcgtgtttcngcagcgagcgagtaacgcttcctagtgatgctttcacttacataacttaatgattatttatcgtgagcacatatgccttatctccacataagcatagggatagcctcttttgtgtcaccaccctagagcatagtggctagatgccaatcaagccgttagaatcatagacacctacgatgatgtagtgacgttgtggagcgcagtggtaacagcacgcgtagtcgcgactgcggaaatcttgtttagtagaagcgaaattgttataatgttatgatatcgaacatcatacacatgacacgtctataatatcagtgcctcataacatctagtgagtcactataacatatgcaaaaccatcctcgtgctagatttgacctatcactctgcgttctactcgtgtctgatcgcacatggatttcttcactacgaccactgaataggtcgtataccctctcaccttcctcttattaccaagaatcactatttcatctctcttttctgttcacccgtatttatcttatcatacttatgagcgtagcgtcccgactcttgtagagaacatcgaangttccaagctgaacgaagtggagagagatgttatacctagccagctctggtgcgcaatctaggtctactggatcgcgcatgtcgtcgtcgcgggtgacgttatagtgctagtctccgtgatcatggtactaagcctctctatattttatagtgttccaattatatacgactancacacccccaccctcatagttacacgataacttgagtagaaagtggaggtgtatctggatgtaagaatatataatatatancattacactaaattaataactttgatgnattacctcgcccgccgtcaacgtgctatatagatcagcaatatgcggcgacgaccgtggatagttcactcacgtcgactgacaacgagtagcagctctctacttttctgtactacacagatcgctaatacacgatctgtgtgccgtggttgcgatcagtgtacccatcacgcgatgatgtgngctgacctgcggttgtgtggnnnntacttcctcccctcgagatgtatacacacacctgtacgacgagcatgtcttaactcaactccgacctagaacaccacttcactgtaacactactcgtgcgctgcgtcaactccatcacataatacgtaccggaacatcctaccatctgctacatgctgagtgctgagagcacgtcgcagcactgtctgagatctcgtgatagaactagcacacgtacacacactatcgctgcagactgtcatgtctgtatg

SEQ ID NO: 3984 - DNA, 1395 bp, Glycine max
  misc_feature (16)..(16): n is a, c, g, or t
  misc_feature (25)..(25): n is a, c, g, or t
  misc_feature (519)..(519): n is a, c, g, or t
  misc_feature (811)..(811): n is a, c, g, or t
  misc_feature (976)..(976): n is a, c, g, or t
  misc_feature (1013)..(1013): n is a, c, g, or t
  misc_feature (1047)..(1047): n is a, c, g, or t
  misc_feature (1069)..(1069): n is a, c, g, or t
  misc_feature (1157)..(1157): n is a, c, g, or t
  misc_feature (1211)..(1211): n is a, c, g, or t
  misc_feature (1231)..(1231): n is a, c, g, or t
  misc_feature (1239)..(1239): n is a, c, g, or t
  misc_feature (1252)..(1252): n is a, c, g, or t
  misc_feature (1297)..(1297): n is a, c, g, or t
  misc_feature (1375)..(1375): n is a, c, g, or t
  misc_feature (1395)..(1395): n is a, c, g, or t
  Probeset Number=SeqID_13763
atttcacaccacaccntattaacanaaaccttggatgaaaaggtggccgaagcagggaacgtgtaataacatgtctctagtgttctgagctgtgtgtggtattcgcgctaccagtacctcttagccatcgcgcgcggcatatgcgagggagattacgcgaagcagaaagcgcgtgtgcgtgcctccttcactgttactgcccacgaattctccttctcattatcatctatgatacccgatatacactcgcgactgccgccacatcctacaacttatgcttagataaagttacgctaacgcttgcctgtcgtggtcgagagtacgctagcgatctcgcacgaagaatccaatgatcctacgcgtggtacctgttgcccgcgagggtaggacgctgtgggaggagggcgagcgatgggcgcgggcgggcgggcccgcggggggggcggcgggcgctgtagacgtagcagcccctccgcgcgtgagcggtcacgcttcgtgcgactcccgtacttagcgctntgcgctcacctttgtctgttgctctttctcgctcttttttaacgtacttctctgtcctgtgtatgtgtcgattttctgtgttgtctcgtgtggagtagtgagcctttgatgtgagaccgcaagacggtttgtattgtaataatgatggatgtgtcattccgagcgtgtagttgtacggcgcgcgtctgtgctgtctgtgtctatgtgtccaccattattctatttgtctatacttctcttttcttcttctatagcgttacgcaacagcgtgcacgtatatatggtggcctgnttgtgcggatacattcgtcgtgcgtccacgacgcatgcacgtagactgttgacttctttgtgttgtggaggcatctgtggtcgacgcggtcgcacgctggtcgaaatacgatgagaattatgttgtactaagtgcgagttgcttgttgtgtgggtgttgctctantgtctgcactgcctcgacgaccacatatgagctgcancgaggtcgatgtgcgcacatcgtgttatcatccnatatattatatgcataattatnggcgtatcgtatcgcgacatcaccagtctgtaatatatctgaacatgagcgtatggcgcgatggagcgcctgcatgtcatgtttcatnttctctgatatctgactgaatacacgcagtactctgcggcacacctgccacgcnattattagtggtcttgtgtnataatgcntgatatatcgtgncatatagacacatagcgttgattggtcgtgttgtccgcattgttngctgcctattagactgatctactctcatacttctcctatctcatactgctctatacatagtgactgatataatatatntcattatgtgatttgtatan

SEQ ID NO: 3985 - DNA, 593 bp, Glycine max
  misc_feature (27)..(27): n is a, c, g, or t
  Peptide Sequence Number=SeqID_7806
  Probeset Number=SeqID_13764
gagtcagctacgtaggccccccccccncctttatacttcggaggctaatgaaagaaagggtggcatgactaattataagaaaagggggaatggctaaggaaagagggtttccccaagggagaggttcatgcgttggatttttgcactggagagctctaagacttggtatgtcttttccttttgcatcctactcccttttgataggcatgaggtaacttacttttcacgctaatttcgactgaacgcgcatctgcgtgctaagcctgacctgcgtgctgagcaagatttcacggtaagcatagaactgcctgttaagcgagagttgcgcactgagcctggattgcgtgttgagcgagttgtccaattcttccaacttttcttcaattctttttctttcacatttttcgtcaatttccctctaagacacttcatttcttcttctttggacttctgctaataaaaaatggcacaaatgttaatttcttcattatttcataaaaaacactaataaagtgaagaaatcattatcattattagccagactattaatttagttcagatttcgcagttattaatatatatattcttaatat

SEQ ID NO: 3986 - DNA, 2796 bp, Glycine max
  misc_feature (1)..(1): n is a, c, g, or t
  Probeset Number=SeqID_13765
naaaacaaatgtgaatttttaatttttaatctatacaaataatgcatcagagaagcattgtaaaaaaaatattgcttatctctgacaccagagcaaatttctgtttctgtggactgactaattagggaacaaaatcagccgatatcccatgattccatagcatcaacgaaaaccgtcgactgcaggttgaaaaacatctctgatcactcatcatttgcccccaaggtcgcagagctaagaattcaattcatccatggtgagctaattgcaaccagcttgcatgattgattatattacaaaattacttctccagaggactcaacgccgccaccaagagaactagcaaaatcagcctattaccaatcccggcaattcccacacctccaacttccaagcctagatggtatttcaacccaaggcgaacattggctgtgaatcaaaatcccacaaatctcacaaaagagatcaggggccggttccatttgtgaacattgcctacaactatagccagaggcaatacaggtgaccattctgagaacagtcaaataaatggaacattgagagtacagccaaatgaccagttgcctatggataatactggctactctcagttgtcttctccatctacaaggcttctaccagaaggagaccttgattcccgatttaattcgcctcggcaaggtttgatgcctgtggtggaaacgaatactgtggtggaaacgaatagtaataataatagcttattgaagcaggttcgggaacatgaagaagagatcatcctattaaggaaacgtcttgctgattattctgtaaaggaaggacaaatacggaacgaaaaatatgtcttggaaaagcgcattgcatatatgcgtctggcctttgatcagcagcaacaggaccttgtagatgctgcatcaaaagctttatcataccgacaagacataattgaagaaaatatacgtcttacatatgcattacaggatgcacagcaagaaagatcaacatttgtttcatctttgctgcctcttcttgcagaatactccctgcagcctcctgttcctgatgcacaatcaattgttagcaatgtcaaggttttgtttaaacatttacaggaaaaacttcttctcactgagtcaaagctaaaggagtcacaatatcaattgacaccttggcgttcagatatgaaccatgctaatgttgccacacaatcacaacctcactcgattggtgcacctttgacaacttcaaataaaaatggccttgaactggtacctcagcatatgtactctcaagtaaagcctcaggtctctgttgatgctcaggcaggcactgaaccggatctattgggtcgccaccagaatggcttgagtggtggtgtggcaacaagtgttgatgctgatgatttggggagattttcacctcttgcaagcaggtattcatcagcccctgatgcatccacccacctggtagttactcagggtgataaccatcctgctcattatggagatgaaatgaccaacaaacaggtcacatttcgtgaccccatgatcaacaatgaagttgatgatcctgatggagatggaacacatagtatgagagaaacatctgctaactggagttctggcaaccctccttatacaaccactgttgatgatcccagttcttcatattctccttatttaccagcagttcttgaagaaccttcttcttcattttctgaggctgcagatgaagatccattgccggctatagagggtctccaaatttcaggagaagcctttcctggaagggaacttaaggcaggcggatactccatcaatggcactactagttgtaattttgagtggattcggcatttggaagacggttcctttaattatattgatggggcaaagcaaccaatctatcttgtcaatgctgatgatgttggtacattacttgccattgaagtccaacctctggataacaggaagcgcaagggagaacctgtgaaggtttttgccaatgataataaaaagattgcttgtgatcccgatatgcaggaacacatataaaagacttatatcagtggtcatgcatcctatattgtgcttctttcgaggttattcatcctgatatggcctggggagaaaagaagagttaagaagaagggattaattattaaataggttagggaaagtggggatgtaatggcagaaaaattttcctctgccagcaatgttaagatcccagatggacatatttggaagattattataattggtttcagaagtgctgtcctttttatattataagaaaacgcaaaagatttcagtgctgctatagacactattgtgctccctttgagattattcatcctgagaaggcctgggaaaaggagagtaaagaaaaagggattatttcttttaacagttgatagggaatgtcaggtgcttggctgaaaatcactgctgtgcgtggaaagtgcggaccgagatggggattgggagttgttgtgtgctacctaaattttgctccttttcatattctataatagggcagaattagcttgagctgtaattgtgaatttatgcaatcatttttttcttctttttctttttcaatatttagcaattcttttttagctcttttccttgccatgtaagtccattgttgtactgcatgttgctcttgtcattttgtgcatctctttgggtgggcccttttgcaatgtgcatgtattcacatgctatgtccgcccactttcattaactaaaatggttcagaggaaaatgatatagttgtcgtttgcatttc

SEQ ID NO: 3987 - DNA, 1980 bp, Glycine max
  misc_feature (1)..(1): n is a, c, g, or t
  misc_feature (7)..(7): n is a, c, g, or t
  misc_feature (17)..(17): n is a, c, g, or t
  misc_feature (46)..(46): n is a, c, g, or t
  misc_feature (50)..(50): n is a, c, g, or t
  misc_feature (64)..(64): n is a, c, g, or t
  misc_feature (66)..(66): n is a, c, g, or t
  misc_feature (70)..(70): n is a, c, g, or t
  misc_feature (99)..(99): n is a, c, g, or t
  misc_feature (102)..(102): n is a, c, g, or t
  misc_feature (111)..(111): n is a, c, g, or t
  misc_feature (148)..(148): n is a, c, g, or t
  misc_feature (186)..(186): n is a, c, g, or t
  misc_feature (199)..(199): n is a, c, g, or t
  misc_feature (273)..(273): n is a, c, g, or t
  misc_feature (340)..(340): n is a, c, g, or t
  misc_feature (506)..(506): n is a, c, g, or t
  misc_feature (571)..(571): n is a, c, g, or t
  misc_feature (647)..(647): n is a, c, g, or t
  misc_feature (687)..(687): n is a, c, g, or t
  misc_feature (777)..(777): n is a, c, g, or t
  misc_feature (781)..(781): n is a, c, g, or t
  misc_feature (784)..(784): n is a, c, g, or t
  misc_feature (845)..(845): n is a, c, g, or t
  misc_feature (856)..(856): n is a, c, g, or t
  misc_feature (906)..(906): n is a, c, g, or t
  misc_feature (969)..(970): n is a, c, g, or t
  misc_feature (977)..(977): n is a, c, g, or t
  misc_feature (1083)..(1083): n is a, c, g, or t
  misc_feature (1096)..(1096): n is a, c, g, or t
  misc_feature (1107)..(1107): n is a, c, g, or t
  misc_feature (1169)..(1169): n is a, c, g, or t
  misc_feature (1201)..(1201): n is a, c, g, or t
  misc_feature (1252)..(1252): n is a, c, g, or t
  misc_feature (1334)..(1334): n is a, c, g, or t
  misc_feature (1461)..(1461): n is a, c, g, or t
  misc_feature (1468)..(1468): n is a, c, g, or t
  misc_feature (1494)..(1494): n is a, c, g, or t
  misc_feature (1532)..(1532): n is a, c, g, or t
  misc_feature (1582)..(1582): n is a, c, g, or t
  misc_feature (1595)..(1595): n is a, c, g, or t
  misc_feature (1631)..(1631): n is a, c, g, or t
  misc_feature (1675)..(1675): n is a, c, g, or t
  misc_feature (1680)..(1680): n is a, c, g, or t
  misc_feature (1771)..(1771): n is a, c, g, or t
  misc_feature (1778)..(1778): n is a, c, g, or t
  misc_feature (1841)..(1841): n is a, c, g, or t
  misc_feature (1853)..(1853): n is a, c, g, or t
  misc_feature (1881)..(1881): n is a, c, g, or t
  misc_feature (1884)..(1884): n is a, c, g, or t
  misc_feature (1899)..(1899): n is a, c, g, or t
  misc_feature (1923)..(1923): n is a, c, g, or t
  misc_feature (1958)..(1958): n is a, c, g, or t
  misc_feature (1967)..(1967): n is a, c, g, or t
  Peptide Sequence Number=SeqID_7807
  Probeset Number=SeqID_13766
ncagctntctctcgtgnacgactatcatgcgacagtctcctcgcgntacnagagatgtatcatntnatcntatgctttctatcggcttctagcttcgtnagntgtcgcgtntggtcctacctcgcggcagcatcgcagtcatctcgtnacgctacgcgcgtagtcgagtcgcgtctctgtactatncaccattcagcgnctctgcgccttgcagcgattctacactactcgtcagcgtcttacgttacttcgtactgcgctcgaatatatatntgtttcaggtgcgctctcgtgtacagtacgcgctagtgatctgctgcttgtcgcacgtgtagatganactatatatgctgcgcgcgtgttgtctggtctccggcgcgccgtgctcttatatgtccgctgtagtgcgtgctatgacgtattctgtactccacactgcgtgtgtgagttgcgcttctgtgtatgacgcataatatgttagaaacgctgccgtcgcgctcgtcgtntcgtgttatggtgcaccctatacattatgcatagtttactctctgatctctcttgtcactgcagnatctcttatacgtctgtatcatccgacgtcttgacaggttattctgaccgatgagctctcttcgtccacgcccgcntatccagacgagacgcgcggttatcgctcccaacgctganaccggtgcgtgactatgagttcggcgtgctgatcgtacgctgcacatcttctcgtaatgctaaccgtgcagtgcgacgcgtcgtgatgantatntcnttcaccgtggctgcgacgagttgagctatcatctgtcgacacatcgtctgccattgcgcgnctctgacatangactagtcctcaccgcatcgctcgcctgtcactccttcgacgcactatantctgatcgtgcgtcaattctctctcacgcgctatcagctactgcgtgttgtatctcatcgcanntatatanttcatacaatgcccctgtctcggtgtgcggacgagccacctctgatctattgctgttctctgtccactaagcgcgtgatcgtctttctctctgcgtaccacatctntgtgtgcgtgctnaactcgcttanatatactttcgctcacgccgcacgactggactatgtagaagttgtcgtctcgtcgtgctatngcgtcgcaattctgcgagtgtgagtgtgtcgntcgatgtgtgctagaggctagtatacagttagtgtacgcgaccatcttggnttatgtgagcgttaagtccgttcgtgtcactctgcgtctgcatcgtctctatgtgcgcgctgctgtctccagtcgtgcgacntctccgtgaggactttggctcgctcgcttctcttcatctgcacccctacattccatgcatcttcttatatatgatctgtccgtcgtcgacacggcgcgccgggcttgcatgtcatgagcgttcagtnaatcctntatcatgtatatcgtccacgcgtagnttctatgatacatctactatgcgagcacctgccgcgcngccgcgcttcagccgccgcgcgactatcatacactatgttatctctcgtncgctcattcttcntcggcgcgggagacgacataaacactctatacgtcngcgtccgctacagtcgtctcgtgttctcgtgtgtcgagtatcgntcttnttgtgtcgatgactagtagcgtgtgacgcctctactatatgattttgtcggtgataataatcacctatctcggtgttgtgtatatgatgtntatctgntttatgtcttttgctggaggtgaatcttgttcctatattcacatatctctcgttttgctggtngcttacgcctgngtgtgtattgttgtgtacactacgcgtntcncgatagctctctcgngctagtgtctatctgtctattatncactgctgcttctcggttttgctgctctcctcatncctctctgntgtactgcatcat

SEQ ID NO: 3988 - DNA, 1785 bp, Glycine max
  misc_feature (14)..(14): n is a, c, g, or t
  misc_feature (16)..(17): n is a, c, g, or t
  misc_feature (27)..(27): n is a, c, g, or t
  misc_feature (49)..(49): n is a, c, g, or t
  misc_feature (56)..(57): n is a, c, g, or t
  misc_feature (64)..(65): n is a, c, g, or t
  misc_feature (68)..(68): n is a, c, g, or t
  misc_feature (70)..(71): n is a, c, g, or t
  misc_feature (94)..(94): n is a, c, g, or t
  misc_feature (115)..(115): n is a, c, g, or t
  misc_feature (141)..(141): n is a, c, g, or t
  misc_feature (210)..(210): n is a, c, g, or t
  misc_feature (250)..(250): n is a, c, g, or t
  misc_feature (344)..(344): n is a, c, g, or t
  misc_feature (414)..(414): n is a, c, g, or t
  misc_feature (425)..(425): n is a, c, g, or t
  misc_feature (433)..(433): n is a, c, g, or t
  misc_feature (462)..(462): n is a, c, g, or t
  misc_feature (488)..(488): n is a, c, g, or t
  misc_feature (553)..(553): n is a, c, g, or t
  misc_feature (567)..(567): n is a, c, g, or t
  misc_feature (758)..(758): n is a, c, g, or t
  misc_feature (777)..(777): n is a, c, g, or t
  misc_feature (1034)..(1034): n is a, c, g, or t
  misc_feature (1101)..(1101): n is a, c, g, or t
  misc_feature (1148)..(1148): n is a, c, g, or t
  misc_feature (1155)..(1155): n is a, c, g, or t
  misc_feature (1170)..(1170): n is a, c, g, or t
  misc_feature (1225)..(1225): n is a, c, g, or t
  misc_feature (1292)..(1292): n is a, c, g, or t
  misc_feature (1323)..(1323): n is a, c, g, or t
  misc_feature (1338)..(1338): n is a, c, g, or t
  misc_feature (1341)..(1341): n is a, c, g, or t
  misc_feature (1343)..(1343): n is a, c, g, or t
  misc_feature (1368)..(1368): n is a, c, g, or t
  misc_feature (1405)..(1405): n is a, c, g, or t
  misc_feature (1453)..(1453): n is a, c, g, or t
  misc_feature (1475)..(1475): n is a, c, g, or t
  misc_feature (1649)..(1649): n is a, c, g, or t
  misc_feature (1741)..(1741): n is a, c, g, or t
  misc_feature (1785)..(1785): n is a, c, g, or t
  Probeset Number=SeqID_13767
aaaataaagtagangnngtagagtagngagaagaaaaataatacaaacncgccccnnaaccgannggntnnggcggggagcggtggcgggacgntatcttgtgtggtgggtgagntgtgaagaagaccaggggggggaccncaccccccaccccgcggcgccgcggcggggagataagacaaacagtatgatcgaatatgtattgattgntgtctatctgtgtatatatctatctatcttaatgatgtcntagtacagcaatgtcggtaaggttgatgtgtatgtgataggaagagaggaagtatactgtgcacggagtatgataagcagatgtataaataatntgccactacactctctcgcaatatgtctatgtgtatgatatctgtatatgcacgattacttcatgaagtntgtgtgtgatntgtgtgtntactctacggggtgtcggcatattatatntttcattaatccacatcatctgtagnatctgacaatctctaacatctatgtcaacgtcatatcaatcacacatagatgtgatgaggtctgngtgtagccctgcgntgtctgctgctgctctgttgtcatctcgagatctagtatagatgtgctgttgacagcccgacttgtgctctctgctcctcgctatctctgcctggtagacgcggcgcatgagcgagtcatgcgagcgcggatgcgtagtaagatgaccgaggcccttgatgaagagagttgaaagaatacaatctctctanactaatgtatgtgaatatntttgtgcagacgacgatactaatgttgcagacgcgcagccctgagccgcccaccagcatcacggtatctatctaatcgcctcacgataatgtaatcaagtcgtacataaacatatcgacatgcctatgagcaaagtgatgagaatgacatacacttaactgcgcaaatggctcactcacatgccctagtacagtgcatgactcacatcgtgcctgtcacacatgtctactacttatgatatagctcaaagcagtctnctacacgacgtacaatacctgttcataacgagacgtgtcaatactgacactcgagtagtacgctagnctccatgagcgcgaactgcagagtgtgctataatatgacagtagtgncatgcantaatcaggcgctcangataaaactcgcacgcaggagacgcgctcgattagcgctacacggcgtgcaggtntacacgaacagcaagtctgttatgctcgtgcttacagactcatgccctctgcgacatcattgacatntatctgatgcgcacgatgatgctgaatgcantgagatgcaccaccncancntcagtaaacacagcgcccgcgtctncacccacgaccatctacgtactattcatccacatccncatccctattttattatatgcatagcatacctatcattactacagacntcgtcacacacaccgcatcaanatgctggatctcaactgtatagtccacatacacaatgcattcaccatagacacagacatcgtaatgacattatatacatatctcgataacacatgaccatctcatatagtgtgtatgcacactcaacgacacgatctaactctaaccgtcaacaccacattcgcgacaacacantatgagcgtgatataatgacatagagcacaaccagctcacgacctactgcacacacacacatacgagcgcgtgcactagaatacgattcacncatacatgagtacaagactctcatgatctatcatcctcacctcn

SEQ ID NO: 3989 - DNA, 601 bp, Glycine max
  misc_feature (601)..(601): n is a, c, g, or t
  Peptide Sequence Number=SeqID_7808
  Probeset Number=SeqID_13768
aactcctttcccccctcccgttccaactttattgtgtttaaacatttttttttttttttttttttttttttttttttttttttttttttttttttttttttttttgggaaaaaaaaaaacccccttaacacttttttccaatccaaagggataaaaattgggaaacacggaagttggtaccggggggaaatccttttggtcaaaaccccaaactggggcttggcaatttgccccccaaaaaaagggttgaaaaatttgcccaaaaaatctttttatgaaagacccatgcccaaataacggggggaggaagattggaaaaaacttcttatgcccgaaaaaaaaaccccctggagcgccaccaccttttgaattctgaaacccccccctcgtccccctcggaaaaccccccgtggggggggtccggaaaaaaggatggttatccgaggggggccccttccctggggaaattgaccacatgggacaaatggttatgcccacggaaatggccggctttggtggggacccccaggccgaaaaaaaatttcgacagaagggccccttgcctaaaatggggggaaggatcgggccccgagggataaan

SEQ ID NO: 3990 - DNA, 1908 bp, Glycine max
  misc_feature (6)..(6): n is a, c, g, or t
  misc_feature (25)..(25): n is a, c, g, or t
  misc_feature (58)..(58): n is a, c, g, or t
  misc_feature (63)..(63): n is a, c, g, or t
  misc_feature (80)..(80): n is a, c, g, or t
  misc_feature (159)..(159): n is a, c, g, or t
  misc_feature (200)..(200): n is a, c, g, or t
  misc_feature (204)..(204): n is a, c, g, or t
  misc_feature (217)..(217): n is a, c, g, or t
  misc_feature (294)..(294): n is a, c, g, or t
  misc_feature (304)..(304): n is a, c, g, or t
  misc_feature (309)..(309): n is a, c, g, or t
  misc_feature (340)..(340): n is a, c, g, or t
  misc_feature (393)..(393): n is a, c, g, or t
  misc_feature (447)..(447): n is a, c, g, or t
  misc_feature (465)..(465): n is a, c, g, or t
  misc_feature (556)..(556): n is a, c, g, or t
  misc_feature (645)..(645): n is a, c, g, or t
  misc_feature (668)..(668): n is a, c, g, or t
  misc_feature (679)..(679): n is a, c, g, or t
  misc_feature (764)..(764): n is a, c, g, or t
  misc_feature (780)..(780): n is a, c, g, or t
  misc_feature (782)..(782): n is a, c, g, or t
  misc_feature (896)..(896): n is a, c, g, or t
  misc_feature (984)..(984): n is a, c, g, or t
  misc_feature (1001)..(1001): n is a, c, g, or t
  misc_feature (1007)..(1007): n is a, c, g, or t
  misc_feature (1017)..(1017): n is a, c, g, or t
  misc_feature (1068)..(1068): n is a, c, g, or t
  misc_feature (1077)..(1077): n is a, c, g, or t
  misc_feature (1145)..(1145): n is a, c, g, or t
  misc_feature (1199)..(1199): n is a, c, g, or t
  misc_feature (1308)..(1308): n is a, c, g, or t
  misc_feature (1375)..(1375): n is a, c, g, or t
  misc_feature (1404)..(1404): n is a, c, g, or t
  misc_feature (1596)..(1596): n is a, c, g, or t
  misc_feature (1767)..(1767): n is a, c, g, or t
  Probeset Number=SeqID_13769
cttagngcgactgagattgatatantatctgcgcgtcgcatcataattgagcgcggcngagtngtacggagtgatactcnaaataaacggtactcgacggtgcagtcgtacgtcgtattagagacgagcgcgcgcatagatatatatcagctgagtcgngtacgcgtgtgcgatatatatcgatatcacgacgtcagacnacgnatcaatcgtgctntactacgctacaacgtccgctgcgactagttatactaagtaacagtagtagcggacgtcgtcatatacgcgacgcgncgcacgccgncgctnccgattatatccgcgtctcacaactacagtngtcacagtgcaccgcgatatatatgcgccatattatcaacattatcgtatagnatatgagacgactcgcgcgtattagcatagccgagaacatagtgagtaacacgntcaacgagagactaccgntgcgtgtacaataggcgaattgtgtagcaagcagtgcaatgcggacacacctcatccacgctcgcgcattcattcagtgtgatgtattgcnatgtattctacaacagccaagcgcacatgcaacacgctataatgtctgtatgttgatcgtcactacagcgcgcgcgcatatcgcgattnctactggttgtgcaccggatccntacgagacacngagaggcgactgctaaaataccacgatgaacgcgacacagtggctaactccacagcgctcgccgggatcattgtacaggttcgtnaacgatgtgtagagtngnggtgtgtgatcgtctcttatgctctatctataacacacatatgagtataacaatcacgcgctacacactgtgtgcgcacaacggtcatacacacgcgatataccaacactattnccagtcacaacaatgcagacgatccaccgacagagtgcgcgagaatgcgtataacacccagatatatcatagtgggataatagtggtnttactgcatcacgtgancattcnacactccacntacgccgcgaggtggcaaacgacacgaggatacattgcttcaatacgttcntcacataantctatcagatatcacatatatattgccgccgcgatcctatcatcaatacgcatattacgttctagctnctacctgtctcatgagacttgactgtgttatattctacaggataagatcagctncgccgatatatctctgatcatagtagaggatatgtctattagtgcatatcatccgcgattatacacgtgtggtagtagagtcatccatcaggatgtgtaagtgtgctancagatatatatacgatagggagagtcgaatgcgcgatctgcgtgtctgtacatacacgagatcgtgntacactgaacatctactctgcatccgcangtattggcgttattcagtaggtgtatcatgaatgatgtagccaccagcaagcgcacgcgcgaaccagtacgctagagagtcggatcaggcgatgctcgtgtgtgtcgaacacaccgtttaggtctgaccacgagcatagcagtggtaatataggaacgtcagaagaattgtgcgggcagatatggtgtaacnaacatcacgttctgccacaatagtggagacacgtgtgagacgtagtggcggggcgctccgtcacatctctacactacaccacacctcgctgcctccacttcacatcacgcacagacagatccccggcatcgcatctccacgcctgcgacggcacggtatatatagagctancgacgcaccgtgttgaacatatctgccgtgacctgccctcagggggcggctgtggggcggagggggtgatagtacggcaccactgctactattagtatctagtaatcgcaactcgtatcccacagcagggcgccacctcac

SEQ ID NO: 3991 - DNA, 1837 bp, Glycine max
  misc_feature (15)..(15): n is a, c, g, or t
  misc_feature (23)..(23): n is a, c, g, or t
  misc_feature (26)..(27): n is a, c, g, or t
  misc_feature (36)..(37): n is a, c, g, or t
  misc_feature (39)..(39): n is a, c, g, or t
  misc_feature (60)..(62): n is a, c, g, or t
  misc_feature (77)..(77): n is a, c, g, or t
  misc_feature (79)..(80): n is a, c, g, or t
  misc_feature (91)..(92): n is a, c, g, or t
  misc_feature (102)..(102): n is a, c, g, or t
  misc_feature (105)..(105): n is a, c, g, or t
  misc_feature (107)..(108): n is a, c, g, or t
  misc_feature (136)..(136): n is a, c, g, or t
  misc_feature (140)..(141): n is a, c, g, or t
  misc_feature (146)..(147): n is a, c, g, or t
  misc_feature (184)..(184): n is a, c, g, or t
  misc_feature (199)..(200): n is a, c, g, or t
  misc_feature (217)..(217): n is a, c, g, or t
  misc_feature (304)..(304): n is a, c, g, or t
  misc_feature (319)..(319): n is a, c, g, or t
  misc_feature (350)..(350): n is a, c, g, or t
  misc_feature (356)..(356): n is a, c, g, or t
  misc_feature (424)..(424): n is a, c, g, or t
  misc_feature (428)..(428): n is a, c, g, or t
  misc_feature (502)..(502): n is a, c, g, or t
  misc_feature (537)..(537): n is a, c, g, or t
  misc_feature (541)..(541): n is a, c, g, or t
  misc_feature (550)..(550): n is a, c, g, or t
  misc_feature (578)..(578): n is a, c, g, or t
  misc_feature (583)..(583): n is a, c, g, or t
  misc_feature (611)..(611): n is a, c, g, or t
  misc_feature (646)..(646): n is a, c, g, or t
  misc_feature (808)..(808): n is a, c, g, or t
  misc_feature (855)..(855): n is a, c, g, or t
  misc_feature (986)..(986): n is a, c, g, or t
  misc_feature (1001)..(1001): n is a, c, g, or t
  misc_feature (1048)..(1048): n is a, c, g, or t
  misc_feature (1067)..(1067): n is a, c, g, or t
  misc_feature (1098)..(1098): n is a, c, g, or t
  misc_feature (1101)..(1101): n is a, c, g, or t
  misc_feature (1138)..(1138): n is a, c, g, or t
  misc_feature (1184)..(1184): n is a, c, g, or t
  misc_feature (1186)..(1186): n is a, c, g, or t
  misc_feature (1210)..(1210): n is a, c, g, or t
  misc_feature (1222)..(1222): n is a, c, g, or t
  misc_feature (1297)..(1297): n is a, c, g, or t
  misc_feature (1387)..(1387): n is a, c, g, or t
  misc_feature (1445)..(1445): n is a, c, g, or t
  misc_feature (1551)..(1551): n is a, c, g, or t
  misc_feature (1605)..(1605): n is a, c, g, or t
  misc_feature (1768)..(1768): n is a, c, g, or t
  misc_feature (1837)..(1837): n is a, c, g, or t
  Peptide Sequence Number=SeqID_7809
  Probeset Number=SeqID_13770
ttttgttttttgttncgttgtgnggnnctcgtctgnntntgtgtgtggtgttcgcgcgtnnnccccccgtcccgccngnnccgcgcgctanntgttgttgtnttntnntttcttcttatatatcttgttcttctcnctcnnttttnntatttggttttctcgacccgcgtctctctcactccangttatgtttgtatanngtagggtggcgcggccncatcttccttttctctttctccatgtccgcacgctgtgtttatgttttttccaatctctattccttcacgcttcagtagatcattgnatctcatttactagncatctgtgggccgaacgcaccacacgaatangatagngctaaaaataacaacacgcgcgcatcgcccgcgggtgctctgtctcgttgtgatgagaggtagtgacngggngatgagctgatctagctagtgatactctgacatacaactatatatatctagtatgtctcaccctgtgtcgtccntcagcctctctatttctcgtgtagtggcaatgccngtanagcgatgtntgcgacaggatctggcgccaacgccatncacanactctacctgcacgtgtcaggaccactntctccatatatatctttccatatatattggaagantagtagaaggatcgacaaacatgatacagagtgacattgcggaggcactgtttgtgttagagacgaatcaaatataacagatagactagacacacacccgatgagagtatacactagcttctcgtacgacgtatctctgggtcccagctcctacacgtgganaggtatatcgtcttcgcgcgcgtagagagtctagacctgcagcttcngcagatgtaatgtacaatatacacttccatcatctacggcctcgacacacgtccgcaacacacaagcgcatcttatagtgagagacgatccctactcctaatagtcctacactcaactgctctgtcggctntatcacacgacgcantcacatctgcacgtcttcgggtgcgacttctatgatcgtgtgtcgtntcgtgtgtacgttgtcatngtcaatattcacatacaccgaaggagagctnctngcgatgtgagagagcggagctggagaggacacgaacnctcggacctcctactattgctaataacctgctgtcctgatcgctgncnctgtagctgtgtgtgatgtgctgnttcgttcttgcnatgcatgcagtgcgacggcacgtctcgcctgcctctgacatgctcgccgcgcgtgctgtgtgtgcgctctctgtntctgctcctgctcccgagcggctgctgtgcttgcctgcgcgcttactactgcagagtccaggcatcgctgtcgcgctgctcccgcgacantccatcacgtggctatcgcgagcactgcttatagctgtgcctcgacgagcctccacangcgtgccagatcctgcgtccggctgctggcgcgctgcggtgcgccggacgcgcgcatgcccgctctcgcccggcgacagcactctctgtgtctctcctcgtgtcantcgtccgcagcggctgcgcgctgctcggcgtgcgagcatgacggtatgggcaanagactacatatatcaacgctctgcgatacacgactcagaggcgactctgtcgacgcgtgacgcgtgtagagtgcagggcgcacagcacccgcgacgagtgacgattgctgctgcctgtcctagtcgcgatatcctgctgctgacacgtgctcgtagagtcgantaagagtcacgtagatacagacctaccgcacactactatcacctacagactatggtccactagatacan

SEQ ID NO: 3992 - DNA, 1509 bp, Glycine max
  misc_feature (1)..(1): n is a, c, g, or t
  misc_feature (22)..(22): n is a, c, g, or t
  misc_feature (25)..(25): n is a, c, g, or t
  misc_feature (96)..(96): n is a, c, g, or t
  misc_feature (104)..(104): n is a, c, g, or t
  misc_feature (504)..(504): n is a, c, g, or t
  misc_feature (568)..(568): n is a, c, g, or t
  misc_feature (688)..(688): n is a, c, g, or t
  misc_feature (1017)..(1018): n is a, c, g, or t
  misc_feature (1071)..(1071): n is a, c, g, or t
  misc_feature (1074)..(1074): n is a, c, g, or t
  misc_feature (1143)..(1143): n is a, c, g, or t
  misc_feature (1276)..(1276): n is a, c, g, or t
  misc_feature (1278)..(1278): n is a, c, g, or t
  misc_feature (1293)..(1293): n is a, c, g, or t
  misc_feature (1383)..(1383): n is a, c, g, or t
  misc_feature (1457)..(1457): n is a, c, g, or t
  Probeset Number=SeqID_13771
nttccctcttcttgtcttcctnttntctaatctcgcaacgaccgcgagtctcaactcacccctggacgactccaccagagatgtctatatttatanacatcggngtgtccgcacatggacacacgagggcgacggagagagaatacggtcataggacgtgaggcggtggcacgatacgagcgtggcgtccacgcctcgctaggagtctcacacacccacagcaggacgaacaacactaccgcgctacagcgttatcttttgtctcttctgatctcactgcctcctctacctccttcgtcctgccatacagattcacgaccgaacatacagcacaagaattatgcccgctagttgggaataatgatggaataccatctgtcgcgcatagctcctcgccagccgccgccaccaacagtggcctctgcccgcttcgccatctatgccgctcgttactctcgtctgatggcatacgtcgcacttctgcctctactcattatacttgtnccccgttctcactatcctgatttggtttactctctgcatcttgtatatgactatcagaaccagnagagtgcacacacaaaccactcctgcgaacataccacacttattctacattgagtttagtgacgttatgcgcgtgatactcgttatagaattcataatttaaatgagtagtatggacccntatctaccttcgcctaatatgcatatctcacgacattagtcagaccgacagttcatcacctttgcgtctctcactacacaccagctacatatactgagctttgctggttctactcgattcgcgatcacgtgcgcgcgactagacagtcgctacgtcgcgcttacgacatgcaccgtgagtctgctcgagacactatctacagtgtcagttatgtgagtgagttgagtatctactctcatacgtaccaactatgactaccaacacgacaggcatacggaagcgctcgtgctcggtctgtcagaagatcgcacgagacgagagtagaccannccctgactgctctcgcattgtgtacgcgcagcgagtacgacctcacgtcaccncantacctccacgacagacagcgactatactaagattgcagtacgactacggcgcatcagagagcattcacnactcagcacgcgcgagagatcatgtgcgcgacctgcgtccgcgccgacacgcgacgtcgcgctgcgcgcgcgatgctcgcccaccatctctgctgacagaggagtcgatgaatgctactgcgctaccacagangnatcgtgagtgcacgncgcggagtcactcgcgcagcgcgcgacagcaacgacgaagtgtgtagcgatgtgatgcgtcccgctcgcacgcatgctgactgcatccgnatctctatatatgcgtcgtcaccgcgcgacgcgcacaccacacacacatcggcgcgacgacgcaaagcacatgntgcgacgcgcgcacgcgccgtctgctctctgagctctgcaccgcgccgcggg

SEQ ID NO: 3993 - DNA, 1929 bp, Glycine max
  misc_feature (284)..(284): n is a, c, g, or t
  misc_feature (398)..(398): n is a, c, g, or t
  misc_feature (511)..(511): n is a, c, g, or t
  misc_feature (554)..(554): n is a, c, g, or t
  misc_feature (725)..(725): n is a, c, g, or t
  misc_feature (799)..(799): n is a, c, g, or t
  misc_feature (911)..(911): n is a, c, g, or t
  misc_feature (1068)..(1068): n is a, c, g, or t
  misc_feature (1106)..(1106): n is a, c, g, or t
  misc_feature (1119)..(1119): n is a, c, g, or t
  misc_feature (1347)..(1347): n is a, c, g, or t
  misc_feature (1368)..(1368): n is a, c, g, or t
  misc_feature (1447)..(1447): n is a, c, g, or t
  misc_feature (1456)..(1456): n is a, c, g, or t
  misc_feature (1483)..(1483): n is a, c, g, or t
  misc_feature (1492)..(1492): n is a, c, g, or t
  misc_feature (1592)..(1592): n is a, c, g, or t
  misc_feature (1600)..(1600): n is a, c, g, or t
  misc_feature (1608)..(1608): n is a, c, g, or t
  misc_feature (1612)..(1612): n is a, c, g, or t
  misc_feature (1617)..(1617): n is a, c, g, or t
  misc_feature (1644)..(1644): n is a, c, g, or t
  misc_feature (1695)..(1695): n is a, c, g, or t
  misc_feature (1714)..(1714): n is a, c, g, or t
  misc_feature (1734)..(1734): n is a, c, g, or t
  misc_feature (1804)..(1804): n is a, c, g, or t
  misc_feature (1867)..(1867): n is a, c, g, or t
  misc_feature (1881)..(1881): n is a, c, g, or t
  misc_feature (1889)..(1889): n is a, c, g, or t
  misc_feature (1913)..(1913): n is a, c, g, or t
  Peptide Sequence Number=SeqID_7810
  Probeset Number=SeqID_13772
tgtgtggtatcgcgtagtggtttggggcggactctgatctattgttcattatagctgctttggcgtgttcgcgggggtgagagttggtctcgcatacatctcaccttatctacctgcagtaaagagcaaacaaacaagatatgacattactatcaacacagagtgtccgccttcacacactcacccaccctcaacacccaccaagcgtaataattatgagccgacagcgcatctcatactcctatggggtcaggatgtaaaattacacattacacactatcacncgcgctctcgcgctatcgcatgtttacgatgtgactacgccctttactctataatttattattgtaacgctgatcgcgcctgctctggctccatgacacacactgacgcgaganccatgctgtgtgcatatctatgattagtaccccacgagaggagattgagcgtggttatagttgactacgcgtcttatctcttgctcgctcgcactacgtgaggtgacaccggntaactctcatacggctcttgatgagcaagcacaacacggacgngcggtagcgcaaaacgcaatatatatatatgttattacgtctcgatcccgtagtgatgtacccacatgcacgctactttatatgatcatgatctactgtcgattcgctatctctctgccgcctcacgcgaatgtgcatgtcctccgtgtcgcttctctcactcctccgtcnctctgttcgtctatctatgtcctctctgtaccggatagttagccgagagctgcgcgctgtcggccgcgcgcgancgtagccgtatagtcgtagaactatagatgcgcacgacgaggaaggagtgctctactgaatatgtaagtatctagcctcgccatacgtccgagtcatatgggttgatgacanggtccggtatccgcgtagttacagctcgtcagtattatgatgcagttcgcgatcaatgcggactgcgatcgtcgcctcagtatgccctgtctagacgctactctagacgcgtactggaggaggtcactgtgatgtgcacgcgaggtgttgcgttggnacatagtcgcacatggtgtcgcctgctcgagtcgaggnctatattgtagantatatatactattctgtatgcgtacgtagtgagactgcgagagaaatgtaatgcaaggacaagaagagcagacgtctatcatctgcaggcatctcgagcactataggcacacctcctcgtcactgaatcgcacttggttcttagtgcgagtgtatattagtctactacgcgacgcgctaccttcgtgtagagagagcaataataatacgtgatactgaagccgatatnaccactaatctattgtctagncactagtttgtgatgatttgagatgacacacggactactcgtagatcgcagttcgacaacgatatcgagcgtgatgctngctctcttngacgtccatcgcactcagctagcgtantgtactccnactcatctgtcgctacgtattgacgatcgagcacgtagcacgcatgcagcgcatagagtactcgctagagctctcattgtgtgtgcgtatgagagttgcncgcgtagnacggaganctgnggagntgtatgatatcgctacgcgagatacangagatccacatcgcatacgtagtcgatagtggtgagtcatgggtgcgtatnatcaaccgagtagatcttncagactagcatgctcagtgntcccgctgtcgatgcgaacgcgtgtgtctcaatcgactgttgtacattgtaggcgtagcggacgagacgnatttgtacgcggctaccatatactgatctagtgtcagcgactactgcagcgacgactgcgcgntcgtcgtgtcgcgntctactcntatcgatgccttaaacgacaaaanacgcgttgaagtctcg

SEQ ID NO: 3994 - DNA, 620 bp, Glycine max
  misc_feature (100)..(100): n is a, c, g, or t
  misc_feature (110)..(110): n is a, c, g, or t
  misc_feature (119)..(120): n is a, c, g, or t
  misc_feature (136)..(136): n is a, c, g, or t
  misc_feature (142)..(142): n is a, c, g, or t
  misc_feature (149)..(150): n is a, c, g, or t
  misc_feature (160)..(161): n is a, c, g, or t
  misc_feature (174)..(175): n is a, c, g, or t
  misc_feature (185)..(186): n is a, c, g, or t
  misc_feature (601)..(620): n is a, c, g, or t
  Probeset Number=SeqID_13773
tccaacatgccaaacgacagcgttctgagtcttttcttcttcgttaccctcttcacatgccttctctctgctacttcccacgatgaccatattttcctanccgagtcaanctccatganncgatgactcagtgagnttgcanctgcaannccgacccaanngccttaactacannagccggtganntcggaattcctgaacccaccccggcgaacgggtgcctcttggccggcttcagcaaacgcccaccggggtttcttacaatcgccgcctcctacgttaaattcgtggagtccgggggtgctagagttattccccttatctacaatgaggtccctgagaaccttaacaagaagctcgatttggtcaatggagtgcctcttactggtgggggggcctgacctggtccatatctggcaactcatgggaacatgctttaggagagcgttaagaaaactgatggtgggagacaatgggcgagaagttgcgtgcagctaggtggaagccgcgggagcgaggaggggaggcggagggagcggatagtggtgaaccatggtgcgtgggtggggtgggcgagagagtgctaagttgagcggaggannnnnnnnnnnnnnnnnnnn

SEQ ID NO: 3995 - DNA, 1437 bp, Glycine max
  misc_feature (412)..(412): n is a, c, g, or t
  misc_feature (1033)..(1033): n is a, c, g, or t
  misc_feature (1093)..(1093): n is a, c, g, or t
  misc_feature (1311)..(1311): n is a, c, g, or t
  misc_feature (1355)..(1355): n is a, c, g, or t
  misc_feature (1368)..(1368): n is a, c, g, or t
  misc_feature (1409)..(1409): n is a, c, g, or t
  misc_feature (1415)..(1415): n is a, c, g, or t
  Peptide Sequence Number=SeqID_7811
  Probeset Number=SeqID_13774
attttttgtcgtttttggggtggctcccctctctcctgtggagttgaatcccgccgttattcggcttggcttttttcccgtattttttcccttccagttttcccctttctattacgcatgatgtatatttgttgcgctttcatgcaggattttatttaaataatggttttttccctttcccgcgccccccaccctgtgctgttgacccccctgggtttttcccccctggtcgcgcgctgcgatcttttctccggcttgaattgttacctctcccgccccctcccgttttttctcgcccttttttttccatatacatcttcttgcggttgtattttttttccccaccggttgtctcctgtgggtgctgaggcggcgaataaaaaccgcccccctcctctcgcccccggccccnaaaaaacaccacagtcgatttttgcgtcccttggtgctatttttgccccttggcatcgcgcgcgccggttgttatttattgtctccgttagatgacccggtacccctcgaggttcgttctgtttttctccgccgtgtttttttttgtatttatttgattataggtggcgcgcccgcccttatatccgtgtgggggggtttttttatcctcgcggttttttcccatggccgattttgtaatttatattgttcgcggcgtgaaattgatgaagtgtgtgggggtgggtatatatcgatttacggaatagtgactcgtgtcgacgccacccacatgtattattactcactataccgcggttctgtgtgttgcagagtcacgttgtttttgtcagtcggccttcttttccactatttgtacttgtgtatggtggtatattctcccatctctcgcgctgcttatttatctccactgaattgtcattccgcctgatatgtcgggcgccgtcagtctcgcgcttattgttatggcgcctcgctcgattctttctccgccctcatatttctatataaataaataaacgcgggcggtgtatatatatctcggcgccgactgtcgcgatanaacgttatctgtttatatattgcgcgtatacgcgctccgcgggtgcgatatattatacancaacaataatatgttgtataaaaaaattcactctcggtctcgtcttcgggtccgcctcacataataatatataggctcgcgtatgtgttggtcggcgtaatggcgtaaacaccactcctttacgtccgcctgctgcgcggttatatcgctcactgcgcgttgatatgttcgcactgtgatatttcttcattcgtggccggcgcgcccaacgaatatgnatactgctctatgtatggcatggtgcgctcgagtagacgaccgngacatgatactanactgtgtgtgtgtgttgtttgtacacccattatatacgccncgactnttgctgtatgctgtgagcgtca

SEQ ID NO: 3996 - DNA, 1540 bp, Glycine max
  misc_feature (1)..(1): n is a, c, g, or t
  misc_feature (32)..(32): n is a, c, g, or t
  misc_feature (37)..(39): n is a, c, g, or t
  misc_feature (49)..(49): n is a, c, g, or t
  misc_feature (51)..(53): n is a, c, g, or t
  misc_feature (69)..(69): n is a, c, g, or t
  misc_feature (95)..(96): n is a, c, g, or t
  misc_feature (105)..(105): n is a, c, g, or t
  misc_feature (168)..(168): n is a, c, g, or t
  misc_feature (175)..(175): n is a, c, g, or t
  misc_feature (218)..(218): n is a, c, g, or t
  misc_feature (322)..(322): n is a, c, g, or t
  misc_feature (647)..(647): n is a, c, g, or t
  misc_feature (1184)..(1184): n is a, c, g, or t
  misc_feature (1280)..(1280): n is a, c, g, or t
  misc_feature (1375)..(1375): n is a, c, g, or t
  misc_feature (1427)..(1427): n is a, c, g, or t
  misc_feature (1540)..(1540): n is a, c, g, or t
  Probeset Number=SeqID_13775
nttttggggtgtggtttttaggtggttggttnttttnnntttttatatnannntacatatatttttatnagatatatattatattttgggttacnnaaaaagaanaaaagagaagatgagagcgtggtgattggtgagataagaaacgtgtggatgtgagacgatcantaatagngaaagggagaacgggaaatcaaagagagagagacacaatacantgaatatggaatgtgagagcacacgtcaaacctacaacatgttcggctcggcctacatcacagatattataaacagactctcacatacaatccatatattcgcnctccttctcgtctatctctctcccttcacttcttatgctctcctatttactatcgtgaaagcttcctttatttccctcgttcagctcttctcctctatctcttcttttatctccattctaaccgcgcggcatcgactaccaacaaggacaacccacgcgcctcaacacaaggaaacacaacgacgacacgactcttggcacaaccaaacattctgcaacaagacacacacaacacaccactatcacatgaccacactcacaacaccacagacgcacacaggggtcgcgctccgcgtcctcctctctcctgtgtcctgtctgtgancgcttaattatccatgcgcggtaccggcgtacagacccgtactacactgtatctcatacgtcacctactaactggcactcaatatatacattatcacgcgcgtcggcacatttccggtgtatgacttaatcgtaccggcagggtggaagacacaacataaatacagcggagatcagaatccctcctgcggtccggcgtattgcaccactctctatagacacctgtctgtgacgatcggtcttttattgaagtgacgatgttactctaactgctattcacacaatccatcttctctcgactaatcgcagtgactatgcgacacactgcgtcgcaacactaaccatcacgccgtatacaccgcttactgaccaccctcccacaccaccacaccgcggcgcgactgctcgcgtgcacccacgctcgtcggtgctcacatagcactctactctccgagtggtccccaccaccatgctctctatgtggtatgtactacagcaacatcagtctcgtacttctctgcttctctactatatctcnctccactctcgatactgtgtgtattgttctgctacatcctcatataccttcactcacaactcaagacggaactacacatagagcgagatgagaggntagagtacacataatcgactagcagcactcgcgagtcgcggctggtgccaccgcacctccgagtgccgaacggacgacacaccgaaacactatcnatatactgtcgtgtcgctgatcatcggtgagccgtgccaactactgaagccntctcgttgcagaccacaaactcgatactgctcgctctattgtgtaggtgttgagccgctattactacacaacggtagtgtcgtagatggtgcgcccatgacatcagtaacgan

SEQ ID NO: 3997 - DNA, 1935 bp, Glycine max
  misc_feature (23)..(23): n is a, c, g, or t
  misc_feature (69)..(69): n is a, c, g, or t
  misc_feature (215)..(215): n is a, c, g, or t
  misc_feature (224)..(224): n is a, c, g, or t
  misc_feature (294)..(294): n is a, c, g, or t
  misc_feature (614)..(614): n is a, c, g, or t
  misc_feature (629)..(629): n is a, c, g, or t
  misc_feature (672)..(672): n is a, c, g, or t
  misc_feature (686)..(686): n is a, c, g, or t
  misc_feature (896)..(896): n is a, c, g, or t
  misc_feature (914)..(914): n is a, c, g, or t
  misc_feature (1059)..(1059): n is a, c, g, or t
  misc_feature (1067)..(1067): n is a, c, g, or t
  misc_feature (1176)..(1176): n is a, c, g, or t
  misc_feature (1180)..(1180): n is a, c, g, or t
  misc_feature (1225)..(1225): n is a, c, g, or t
  misc_feature (1228)..(1228): n is a, c, g, or t
  misc_feature (1241)..(1241): n is a, c, g, or t
  misc_feature (1247)..(1247): n is a, c, g, or t
  misc_feature (1249)..(1249): n is a, c, g, or t
  misc_feature (1283)..(1283): n is a, c, g, or t
  misc_feature (1293)..(1293): n is a, c, g, or t
  misc_feature (1351)..(1351): n is a, c, g, or t
  misc_feature (1356)..(1356): n is a, c, g, or t
  misc_feature (1363)..(1363): n is a, c, g, or t
  misc_feature (1398)..(1398): n is a, c, g, or t
  misc_feature (1447)..(1447): n is a, c, g, or t
  misc_feature (1452)..(1452): n is a, c, g, or t
  misc_feature (1454)..(1454): n is a, c, g, or t
  misc_feature (1537)..(1537): n is a, c, g, or t
  misc_feature (1544)..(1544): n is a, c, g, or t
  misc_feature (1549)..(1549): n is a, c, g, or t
  misc_feature (1567)..(1567): n is a, c, g, or t
  misc_feature (1614)..(1614): n is a, c, g, or t
  misc_feature (1616)..(1616): n is a, c, g, or t
  misc_feature (1641)..(1641): n is a, c, g, or t
  misc_feature (1677)..(1677): n is a, c, g, or t
  misc_feature (1712)..(1712): n is a, c, g, or t
  misc_feature (1812)..(1812): n is a, c, g, or t
  misc_feature (1833)..(1833): n is a, c, g, or t
  misc_feature (1842)..(1842): n is a, c, g, or t
  misc_feature (1860)..(1860): n is a, c, g, or t
  misc_feature (1900)..(1900): n is a, c, g, or t
  misc_feature (1905)..(1905): n is a, c, g, or t
  misc_feature (1907)..(1907): n is a, c, g, or t
  Peptide Sequence Number=SeqID_7812
  Probeset Number=SeqID_13776
gcgtcgctctctgcgccgctctntctgtcctctcatcgtgtcatgtcgtagcgtgggacgccgggacgncagacgcgaggcccacacagccgcgcgcacacacgcgccgcccgctccggtactgaggccgcgggtcgcggccctcgcctatcacgtctgtgcctgcgcatccgtccctccgccgagtctctgtcggtgaggttgatggcggtagngtgactatntctctgcccgtgcgatctgctgtagctagcgctatgatctcttcgtcttctcttctacatcggtgatgtngcgtttctgcgctgtgcttcgctgtcgcatgttgactcctaacgacagcgaccgcgctactacgattacgatagtaactgatgaaggtggtggagcgacggttctcgcgtctgcttctgacttgtcggtcgaggacagaggtcgtagtgtgtcaatatgtaggcttctagatccgtcgccgccctgactcttccacatatgtcgctagaatcgctcatgagagtgcgaagtcagcatgcaatgatccgctattatctgcacgtctctatactagctaacacatagacacgaaacataacatcatgatgtgacggagcgcncgtacgtcgagtgcngctcgagtcgacgtggccgtgcggtctacactgacgcgggcgngctgtcgtgcggcncgtcggaatgtcgcatgtacagatgtactgtatgagccttgaggtcgtgagcctcgctccggtaacgagagcacagacgctatcactcatggtagaggcattgcgcgctcacatatctgcacagatgacgtgcagctcctatctatcaattctgaagatatatgcgcgcgtatgacgcgcgcaccgcacgcgtcagctcctatcatgcangtctggatagttgtggtntcgagatgagtacggacagatgcgacctcccgactggtgcagcatgcgctcatcgtcgaccgcactgttcgcctcagagcggcgtagatgtatgggtggagtgagatagaccgacgtgatgtgcacctaacatgatggagacagngtgcactnacgtctattattatgcgcatatacgctgatgtacacgatcatcactgcatggcgcacgtgcagatcatgcgtgcagtggacgcgcgcgactgtgacgatgcatactgtnactngtctctgcactatcactcgctcaccgcatctcgccgcgctcgaanccngtcgtcacgctgntggttngnctcgccgtcgtcaaccgcgagcgagagcacgcgncatgtgacgngtcacatgtatcatagcgctctataggacgaggtcgactgcacagcgtacgctaatcntatantgaatantatctcacactacatataccacgacacgacacgcngagtgatcactgagtgtcgagcatgcgatgagcaggactattatgatantaagntntatgagtgatctgtgtacgtcgtgtgcgccatctagacagcctgtcgcgtacgtctcatatgcaacgcgatcgacgtattagngatacantagcnagatcgactcatgcaggnaggcctggtctgagaccgaccgagcagagctaccctacgcagtctcnancgacgatcgacagtcgtgtcatatnctaatatatgctgagcgtgcgtgtgagtgcgtatcntctcacagcgtcgctgcgtgatctgatgtcgacgngcgtcgactgtatgcgtagagcgtcgtgagtgcgctgtgagcgagacgtcgcgtttactgtgcggcatgtgcgttcagtctggattagtacggctcgctnctgtcatagtaggtagtcctnatcgcgcgngggagtgtactgcatggntatagagtactacgatgcgatcgttctgcgcgtcacgcgntgtgntngcgcgctgctgtgtatctctctgcatcg

SEQ ID NO: 3998 - DNA, 1593 bp, Glycine max
  misc_feature (1)..(1): n is a, c, g, or t
  misc_feature (46)..(46): n is a, c, g, or t
  misc_feature (48)..(48): n is a, c, g, or t
  misc_feature (87)..(87): n is a, c, g, or t
  misc_feature (174)..(174): n is a, c, g, or t
  misc_feature (195)..(195): n is a, c, g, or t
  misc_feature (214)..(214): n is a, c, g, or t
  misc_feature (398)..(398): n is a, c, g, or t
  misc_feature (488)..(488): n is a, c, g, or t
  misc_feature (492)..(492): n is a, c, g, or t
  misc_feature (510)..(510): n is a, c, g, or t
  misc_feature (561)..(561): n is a, c, g, or t
  misc_feature (590)..(590): n is a, c, g, or t
  misc_feature (652)..(652): n is a, c, g, or t
  misc_feature (756)..(756): n is a, c, g, or t
  misc_feature (1169)..(1169): n is a, c, g, or t
  misc_feature (1235)..(1235): n is a, c, g, or t
  misc_feature (1252)..(1252): n is a, c, g, or t
  misc_feature (1318)..(1318): n is a, c, g, or t
  misc_feature (1471)..(1471): n is a, c, g, or t
  misc_feature (1492)..(1492): n is a, c, g, or t
  misc_feature (1548)..(1548): n is a, c, g, or t
  misc_feature (1556)..(1556): n is a, c, g, or t
  misc_feature (1564)..(1564): n is a, c, g, or t
  misc_feature (1571)..(1571): n is a, c, g, or t
  Probeset Number=SeqID_13777
ntgatggtatgtcgttacggtggcgattagcgtatgcgttgcgatngnctatgtcgagtctccatagtacgatgatctcatagatanttgcctctgcatcgtaactgtcttatctactgcgtagtgtgattgtattctgtagtgtgtgtcgagatgacaggatagcgagtagtngatgtatagaaacgatcacanatactcgcacgtgatgcgnagatattgatgtctagaacagaagcagaatatcgcacactgcacgatgtagccgtatcgacttacgagagtggtgtgactcttatatgacatgaatacactatcgtctcgacgatatagtgtgaagtatacgaacacacattagtcgttcgccatagacgtagatcgagggtcgcaactcagtncatatgtgataagcaaagctgatgagacagcatctagtcgacgatcaccggtcgtactcgatacgagtgaaataatggatactcatgtgntgantatagcagtgacgctcgntagtgcgcgcgaacgtatgacgacgtgcactcagtactacagtctgacatncatcatctcatacataccatcaataagtntgcagacactgtctatgggacatacaactgacgagaactgcgcgcgcgaactatatatcatnctgacatactgtgacgtctacagaagttggatggcgtatcgcgatcgtgacacacaaagcacatcatgatcgtcgtgctcagacgcgtacagcacacagcatangtagaatctgataagtagcggtcaatatagtagtatatggcgactcacgtagagcgctgagttatacgcgactaatcgcacgtgacatagtcagtgacgagctcaaggatgtgtgacgttcttgctgctgcaacgctggtagcgcagctagatgactagctgtgcatttcttcgttgtcagatactgtcgacacgacatagagcatcaacactccgcggtaacactgcgagattgagagatacgagacaagagctctagacgatagtatagcacgtgagagggcgcgctcgggagtgaggagagagccgcactcgcatcgaaccgttgcttgcttccgtccgatgtacgtgaacgtcggatgtagtatcgttaatccttcgcactcgtgcttcgacgacgacgagcgcgtcgntcatatagcatattcctcactgttggttcatatatctcgcgcttcggatcgttagtcgcgtcttgnatcaatactcgcccgcngcacactctcgattcataccgagaggtggttgacagcgagcgagacgttcttctatgagggctgantgagaatcattactcgacgagcagccggggcaggcagtcaacgtgagacgcaatatcactcgacagcatcaccgcacagaacaagaggcgaggaggatagagagtacgttcgaacacctcaataatagacgactcacctcatcagcaagtagnagcacacagcaagacgcaacnccgagcgtcagcctcgcgtctcgctgctcagcctagtagctcttcgtctcattcgntctctctncgacatcnctcttcnctcgcgcgcctctcactctcgc

SEQ ID NO: 3999 - DNA, 998 bp, Glycine max
  misc_feature (994)..(995): n is a, c, g, or t
  Peptide Sequence Number=SeqID_7813
  Probeset Number=SeqID_13778
gaacttgtattgtaacaaaccttacatcactcacaaaggttggaccatggtacttgactgtgtgtgctgccaggtaggctgcttttagtaggctgcacttgtcatcctgttcatggcaatactctagtatgccaaacatgtactttgaccacatctgtcttgtagcacagtgcccctgacagactggtcttgacagacttaccttgtgagagtcaccttgtcagtctgacagtgtcatgtcagactgggaagtccctacaatcaacatgcagtaagcatcacttgtatcacaacacaccttttacaaagttcctgtgttctcatttggattcagtgtcaatcacacatacattttgccacccaatttgccacccaaatgacatgagcctactgatttgaattttgaacaacttggatgaaagatgccctatgctgtattggcaagacatatgaatctcagaccaccagactgagtcacagatggtcatatcatagagagacagacacatgcagacctcccatatcttttctaatccctccctcatattttctaacccctctcccagattctctaacccctgttcctacctccccatagacccctgcagcctggcaagccatgagtgtgacatgtgtggtggtcatgttcataacatgtaccacatgctgagtgcataacaagtgttttaaaatatcattacaaaagttgtccctaaaatgggcactttcccatacaaatctctttgggtgagtcaaaatgagcctgagcccatgtaaaaatgttttataaaaatgtcatataaaattgatttttatggattaatgatatttgggtcgcgtcggacctcagcctagcaacctcatgaaagaagagcattagtagtatagtctactaatgtgatgacactttctgactaaagatgtttgatcaccttatggctgaacacatctttatgtctatatcacttagtaatgtatttgaaaagtgaggccnncgc

SEQ ID NO: 4000 - DNA, 467 bp, Glycine max
  Probeset Number=SeqID_13779
ataatatcgctttgatcgtcgtcacacagatcctccattttcgagaatagacgcaagtgtacgtaatagttttcgtcagatcttggacgttatcagttcaaagagaggagaagaaaggtcaaaggcaaaagggggttgaaggaaggatgtcttctttcacaggaactcaacagaagtgcaaggcttgcgagaagacggtctaccctgtggagcttctctcagctgatggtgttacctatcacaagtcttgcttcaaatgcacccactgcaaatccaggcttcagctgagtagatattcatcgatggaaggagtgttgtactgtaagcctcactatgagcagctcttcaaggagtctggtagcttcaccaagaactttcagtcacctgcaaaaccagctgagaaatcaagtcctgagctgacaaggactcctagccgagttgctggcatgttctctggcacacaagag

SEQ ID NO: 4001 - DNA, 1836 bp, Glycine max
  misc_feature (49)..(49): n is a, c, g, or t
  misc_feature (108)..(108): n is a, c, g, or t
  misc_feature (204)..(204): n is a, c, g, or t
  misc_feature (305)..(305): n is a, c, g, or t
  misc_feature (331)..(331): n is a, c, g, or t
  misc_feature (507)..(507): n is a, c, g, or t
  misc_feature (565)..(565): n is a, c, g, or t
  misc_feature (668)..(668): n is a, c, g, or t
  misc_feature (693)..(693): n is a, c, g, or t
  misc_feature (716)..(716): n is a, c, g, or t
  misc_feature (781)..(781): n is a, c, g, or t
  misc_feature (811)..(811): n is a, c, g, or t
  misc_feature (814)..(814): n is a, c, g, or t
  misc_feature (917)..(917): n is a, c, g, or t
  misc_feature (1090)..(1090): n is a, c, g, or t
  misc_feature (1144)..(1144): n is a, c, g, or t
  misc_feature (1170)..(1170): n is a, c, g, or t
  misc_feature (1187)..(1187): n is a, c, g, or t
  misc_feature (1227)..(1227): n is a, c, g, or t
  misc_feature (1255)..(1255): n is a, c, g, or t
  misc_feature (1356)..(1356): n is a, c, g, or t
  misc_feature (1552)..(1552): n is a, c, g, or t
  misc_feature (1554)..(1554): n is a, c, g, or t
  misc_feature (1576)..(1576): n is a, c, g, or t
  misc_feature (1741)..(1741): n is a, c, g, or t
  misc_feature (1815)..(1815): n is a, c, g, or t
  Peptide Sequence Number=SeqID_7814
  Probeset Number=SeqID_13780
cgcagtgacgcgctgtcgcagtgcgtcatcgaatcgtacatatcgatgncgctctggcgtatcgcggatgttgggcacaatgcgagcagtgagagctacaccatcgancacggcgaggtggacgagagtctagcgcagcacagggcaggatgcgtgtgactcattacgcgactagagaccgtttgcgtgagagagatcgtcagnatatcagtccgatatagtcctgcgacgatagcatgcgagatagtgatatagattagcatgtggtcagtacagcgtgacgcgaagtgcacgatcgcacacanctatagcgcatctaacatatatctcnagaggaatctccgcgacggacttgacgtcatctatacagacgatcacagagcagtcgggtggacggtgaatatccgtgtgccgagagtcgagtaacgtcgtctatagagcgacagtcgcgctaggtgtgacgctgagtctcagctgcacacgcgtctgtcacgtgcgttcggcctncgtgtgttgtagcgctgacagcggcacgatgcgcgagcgttgctagactgtggcgctngaggcgatcgtatgttatacaggccgccagttgtgccgatgtagatcagtcagcagaccgcgtgtagcaagtagatagtcgtggagtaattgaatcaggatangtgtctattcgcgagtatctgcacnagtcattcacagttgcgcgttgngagtgtcatatatgtatagtgacatagctggcgcgacgatagagcgacagtaatcatagatatcnatagctcgcgagcgtagacacgcatgtgtnggnggcatatgtgcagcggtcgcctacagactgatttgcatggtgactctacgctctaggtcagagatgttcaggctgagactgtcgtcgtatgacgtcacagatnaagcacagcatacgctgtgcgagagcggcgcgcaggcagaggcgatcggttctgtcatccatacgatgcgtatgcggagatatgagcgatcaggatctgtccagaagactagagtcccgaggtgtagatatggccaggagccgaatcgcgtttgctgctatagatgactaganggattacgagggatagattcgcgttgaagtgatcgactgttaagcagcatgcgnacatccacgtgcctctattttcatanactacggtgcgctcgtnccgatctcgtcgagctatacgagcgcatatcgtcatagcntatgtctgttcggtagtgtgtactgtcntgctagtgtactagtaggcgtagaagctagaggtatatcgtataagtacgtagtgttcacgctctgcacgatcgagcgcagaggagtatgcgtcgtcacantgctgagtgctatctgcgtcgcgtctccatgtatagattgagctgtgagggtgctgagcgtgatgttctcctatcagttgatgttatgagcctaagactgatggtgccgtgctgttcctcttcgtcgacctgcggtgaggagtgatgatgtgtgctctcgtagtgcacgtctacgatgactgagctatagttactngngctagtcagaggcatcgacacnacatgtcgagtccgatgcagcgctacgtcacggcctactcgcacgagcaggagagcgtgtgtgtgtgagagtgtgtgagactctcatgcgatgcgtactcgcgactctcagtacgagtagggcgtgagacaacctgacacggcgccacgcaatctggacgtgcanacgcgtcggcggctgcaggagtagttgtatgcggtcgtcgagacgtcgggtggaagtcactgtgctggtacagntgtgagcaggagagtgatctc

SEQ ID NO: 4002 - DNA, 458 bp, Glycine max
  Probeset Number=SeqID_13781
gtccttatctatattcacctccatcttaaaacagttcccctagaaacttcgatctgaagatgggtggcattgcatttggacgctttgatgattctttcagtttaacctcaatcaaggcctatattgctgagttccattcaaccttgctctttgtttttgcccgtgttggttcagccatagcctatggtaagttgacatcagatgcagcacttgatcctgctgggttactggcagatgctatttgccacggttttgcactctttgttgcagttactgtccgggccaacatttcttggggccatgtcaaccttgctgtgacttcggaatggctgtgggggccacataccattcctactggctgttctaaggattgcccagttcttggttcatcggggatgtgtcttcttaacttgtgcgagggggggggcactcccattcacattagcgttagcgttaga

SEQ ID NO: 4003 - DNA, 532 bp, Glycine max
  Peptide Sequence Number=SeqID_7815
  Probeset Number=SeqID_13782
cccacgcttccgggctttacaggtgtgtaaaaagtggcgcacaaaatgtgatgttggtgaagcgtgtcaaacccgaagagcaggaggcgccacgtacttggctgacttattgaaatacaaatacaaagggacattcggaggaatttgtctgctgtgaacgagacagtgatggcacccgaagacacagagtgtatatcgaaactgttcaaacccatatacctgaaggaggtggctgtgctgactcagaatgtccccaaccccacaacgccagccaacccactccctctcaccccctcccctgacaccccgccactccaccaacaaacgggataacatcttacttaaaccgttctgggactccgccagatcggcaacgatctctctccctcttcccgcttcgcctaccaccgcgctggtccacgcaaaaacatctactttgacccttccattgttcgcgttgccattgtcacctgcgggggtctctgtcccggccttaacaccgtcatccgagagcttgtcgtgggcctgtggc

SEQ ID NO: 4004 - DNA, 1785 bp, Glycine max
  misc_feature (4)..(4): n is a, c, g, or t
  misc_feature (53)..(53): n is a, c, g, or t
  misc_feature (79)..(79): n is a, c, g, or t
  misc_feature (114)..(114): n is a, c, g, or t
  misc_feature (116)..(116): n is a, c, g, or t
  misc_feature (122)..(122): n is a, c, g, or t
  misc_feature (133)..(133): n is a, c, g, or t
  misc_feature (157)..(157): n is a, c, g, or t
  misc_feature (275)..(275): n is a, c, g, or t
  misc_feature (307)..(307): n is a, c, g, or t
  misc_feature (314)..(314): n is a, c, g, or t
  misc_feature (324)..(324): n is a, c, g, or t
  misc_feature (358)..(358): n is a, c, g, or t
  misc_feature (375)..(375): n is a, c, g, or t
  misc_feature (400)..(400): n is a, c, g, or t
  misc_feature (431)..(431): n is a, c, g, or t
  misc_feature (433)..(433): n is a, c, g, or t
  misc_feature (450)..(450): n is a, c, g, or t
  misc_feature (569)..(569): n is a, c, g, or t
  misc_feature (615)..(615): n is a, c, g, or t
  misc_feature (684)..(684): n is a, c, g, or t
  misc_feature (717)..(717): n is a, c, g, or t
  misc_feature (807)..(807): n is a, c, g, or t
  misc_feature (894)..(894): n is a, c, g, or t
  misc_feature (957)..(957): n is a, c, g, or t
  misc_feature (976)..(976): n is a, c, g, or t
  misc_feature (1030)..(1031): n is a, c, g, or t
  misc_feature (1056)..(1056): n is a, c, g, or t
  misc_feature (1066)..(1066): n is a, c, g, or t
  misc_feature (1140)..(1140): n is a, c, g, or t
  misc_feature (1142)..(1142): n is a, c, g, or t
  misc_feature (1148)..(1148): n is a, c, g, or t
  misc_feature (1176)..(1176): n is a, c, g, or t
  misc_feature (1232)..(1232): n is a, c, g, or t
  misc_feature (1253)..(1253): n is a, c, g, or t
  misc_feature (1284)..(1284): n is a, c, g, or t
  misc_feature (1287)..(1287): n is a, c, g, or t
  misc_feature (1394)..(1394): n is a, c, g, or t
  misc_feature (1428)..(1428): n is a, c, g, or t
  misc_feature (1430)..(1430): n is a, c, g, or t
  misc_feature (1490)..(1490): n is a, c, g, or t
  misc_feature (1600)..(1600): n is a, c, g, or t
  misc_feature (1606)..(1606): n is a, c, g, or t
  misc_feature (1644)..(1644): n is a, c, g, or t
  misc_feature (1665)..(1666): n is a, c, g, or t
  misc_feature (1670)..(1670): n is a, c, g, or t
  misc_feature (1672)..(1673): n is a, c, g, or t
  misc_feature (1675)..(1675): n is a, c, g, or t
  misc_feature (1677)..(1680): n is a, c, g, or t
  misc_feature (1682)..(1682): n is a, c, g, or t
  misc_feature (1689)..(1689): n is a, c, g, or t
  misc_feature (1705)..(1705): n is a, c, g, or t
  misc_feature (1710)..(1711): n is a, c, g, or t
  misc_feature (1714)..(1715): n is a, c, g, or t
  misc_feature (1717)..(1717): n is a, c, g, or t
  misc_feature (1721)..(1721): n is a, c, g, or t
  misc_feature (1725)..(1725): n is a, c, g, or t
  misc_feature (1727)..(1728): n is a, c, g, or t
  misc_feature (1731)..(1732): n is a, c, g, or t
  misc_feature (1740)..(1740): n is a, c, g, or t
  misc_feature (1742)..(1742): n is a, c, g, or t
  misc_feature (1744)..(1744): n is a, c, g, or t
  misc_feature (1746)..(1746): n is a, c, g, or t
  misc_feature (1748)..(1748): n is a, c, g, or t
  misc_feature (1750)..(1753): n is a, c, g, or t
  misc_feature (1755)..(1755): n is a, c, g, or t
  misc_feature (1757)..(1761): n is a, c, g, or t
  Peptide Sequence Number=SeqID_7816
  Probeset Number=SeqID_13783
ctgncatagtccagcagagtatcgctcatagctgaagagctctgatcatcgtncggaagcgcatcaccgactcttcacncgcgcgtgtgacgcactgtctgtgcagccgtcgcncntcatantgaagcgacanagagtaagcagacgcactaggcgncgacaggcgcaggacgcgatgtgcacgatactcacactagtaccgacattgagagatatggattcgttaaattacgtctattgtgatagagtagcgtgtcctactagggctgttgcangatgtatgcgctattgcgtgacatatcgcgtngtgtgcntggtcatccntatcatctgatgtgagaactagtgcgtacggtcncatatctatctcatatnagcgcatgtaccgttacgtcatgancgagtgacaatcgtaatgagacgatcgccancnctcacactggatcgagnctagattgtgtatagatgatatatggtggtatatagtatctagacatcgtgtctgagcacgtgatagctatcattcatattctgaccagcatatagggagtgtgataatgtcgtgttgnttttagacgcagatagccatatgagtcgtctctctcatcgtctcgnctgtgatatgagtctatgacattgtctcacatcttagaagctgagtcatcgagtatacctactgattantcacgtcgtgaggtctcggatcgagacgcgtgnctgattctgtcgcctcactcttacgcacgtacactagcgacctgtggtccgatagctgtagaggagtagtctgcactccactacttcacngatcgatgattgaattccgcgctcctagcgtcgcggtagcgcgcccttctgacgtcgtaagtaccacttcgactgttgctctgcacncgcgtcgcacgctgcgtacgtcgacgcgtatagtaacgcgagacggagatagcaaggaccgtnacagaagagttgagcagcncatcacggcatcacacataccgtgagcagaccacgcagagagcgtgcacgcagnngcggtgcgtgatagcaccgtacgcnccggactcantataacgagaggtgcgtggctacgcctacgactcgatgagagggtacgtgatacatatatcacactacgctcanantctcanctcagtacacgactttactacttgtgtngtcgatgcgtgagagtgcgattggctgtatgtcatactgtgctctctgcacctctngtctacggtctacttatgttnatctacccctactcgcgcttgcgcttataantantagctagcatctgctagacgcagacactcgtctagcaggcgtgagcgtctctctggtgctgcattttatactacgtatgacatgatacttattaactctagcacacnaatgactcgactcgccatgcatgtgcgaggcgangncggcgagcgggcatccttctctttagcatgactcagaggtgatagcgtactatcgtgagngagttacttgtgctacctcttacctcatcccagacaacgacacgcaccacagcgacgccagcgcagggggagcgatatcaactacacatatataatactatataaacgangtgacncatctgtctttttcctcaatgcgtgtagtgaacagccnccactctaaccacactaatgnnggtngnnantnnnntntactcancaatactacacaacanagacnnggnngngagnggcntnnttnnatataaanananananannnnanannnnngaggagcgcataactaaaaaatac

SEQ ID NO: 4005 - DNA, 1975 bp, Glycine max
  misc_feature (108)..(108): n is a, c, g, or t
  misc_feature (155)..(155): n is a, c, g, or t
  misc_feature (190)..(190): n is a, c, g, or t
  misc_feature (210)..(210): n is a, c, g, or t
  misc_feature (222)..(222): n is a, c, g, or t
  misc_feature (293)..(293): n is a, c, g, or t
  misc_feature (298)..(299): n is a, c, g, or t
  misc_feature (404)..(404): n is a, c, g, or t
  misc_feature (415)..(415): n is a, c, g, or t
  misc_feature (470)..(470): n is a, c, g, or t
  misc_feature (495)..(495): n is a, c, g, or t
  misc_feature (546)..(546): n is a, c, g, or t
  misc_feature (550)..(550): n is a, c, g, or t
  misc_feature (595)..(595): n is a, c, g, or t
  misc_feature (786)..(786): n is a, c, g, or t
  misc_feature (788)..(788): n is a, c, g, or t
  misc_feature (1296)..(1296): n is a, c, g, or t
  misc_feature (1341)..(1341): n is a, c, g, or t
  misc_feature (1627)..(1627): n is a, c, g, or t
  misc_feature (1640)..(1640): n is a, c, g, or t
  misc_feature (1683)..(1683): n is a, c, g, or t
  misc_feature (1687)..(1687): n is a, c, g, or t
  misc_feature (1690)..(1690): n is a, c, g, or t
  misc_feature (1733)..(1733): n is a, c, g, or t
  misc_feature (1802)..(1802): n is a, c, g, or t
  misc_feature (1881)..(1882): n is a, c, g, or t
  misc_feature (1893)..(1893): n is a, c, g, or t
  misc_feature (1909)..(1909): n is a, c, g, or t
  Probeset Number=SeqID_13784
ccagcagcgtggtgtcggtagtgaaggagaagggcagggtcgggaggaggcggagcaagttggaaagtaatgagacgtgcagcaccatgatataagaagaagatgatntgtctcagatgattactagacagatgaggcctcgttacgtgtcgtantactccgtatatgagaaagacgtgtcatgtgaatnaatatcatggcagacgacanacacacacggcncgcgagagcagaaggcgaggactggagagacgaagcgccaaatgacaagtccgacgggacgagagtcatantgttnnagaggtgcgcaagcacggaattgtcgatcaacactctgatgcgtagtatgatgatatgctgcagactggcatcacatgctcgacttcacgcacgctctcctccangtgatgatatntatagtatatatgtatcgataactcttctctccacacatcatccgagtagtgcanctatcgctcgttactgtactgtcangtatgtagtcactgcgtgatgatcggaacgacactcaccatcgatgatatnaatngacattccgacacatgacgtgtaatggacaagtgagtcacgcacnatactatacacatctcttgttgctctactccatatgatatcttctatacatctttctaattagtcgatgtattgttttattatctctcgaatctcatccacgacgaagcgtgtagtttatagagtagtgtgacaggtatccaacctcattgtagctatagttgtctcccagctatggagtggagtaggtgngnatgcggccgcgccgtctacagtcatgcgctggcgcttcctatttgttccctccgctaccacgtcaccgttcagtggacgttggagtgagatcctcgttaccactctattagcagccaagcgtgtaggatgtgacgcctctgctcatccgtatctcgactcatgattatttcctcactcatctcgtctccagtgatactataattgataccagtccttatcctcgcgcgcctcccacattcatctattcgttttttctactccgtcttctgtgtctgcgtctcccccagtattatttttgttatttctcaccactatctacctctcgcctgacttattgaaagacggtcgtccacacgagtcgcaagaaacagcagcagaaatctacgacacacacccaccaatcctcacaacactacacttatcttgcgttacagccactgcattacgacatcgtagtttgctatcttctacgttgtgatgcacgtcgtcccacaagacggaaacatnctcaactgaatatacgtacaagaacgaggctcatctctgccgatntcgcacgctctgatctgcacctctcgcccgacacgaatgtgcgtggcgaggagaatacactgtatagccgacattcagtcagaccgacaagatgcggaggcgtatgcacagcgagagatgcagctcatcatacgaaatagcatcgaaaggtactacgatgtcgcactcgagcaaggggggcagagcgtcgataacagggcgcagatggcggcgaatagacaacatctgtaagtatatatatgtgcggcgcgaatgtaccgcgaatcataaatattcaccagcgacngagcgtgcccctnttggtgtgtcggggcggtcgagtgagtttatggtgcagtgttnctanatntgcgtctttgtaggagttgttatttacttagcgtcgagaagtnagagaggaatagagaggtctgcgacgggtgtggagtgtaagtcgtgacgaaggaggcggaacggagatngaggagagaacagcgagcaagaaattatatgcgcgtaatagactggaatcccgacagagaaattggaggaggaggagcnngagagcagagnaaagaacagagaaatntagagcagctgagagcagagacagagaggtatacaatacttgatagctcagttgacagctttcttt

SEQ ID NO: 4006 - DNA, 389 bp, Glycine max
  Peptide Sequence Number=SeqID_7817
  Probeset Number=SeqID_13785
ctgggattgttgcaatgcttaataaactgagcagcacggttgtgtttgacaggccacataatgaggaatttatccgcaagtggcagttagcatgcaaaggtaatatcgcacatgtggtggtgatgccaatcatccccactgagaagcttgatgattttctgaacgagcttttggccaagcgtgatgcctggtttcaagatgtcaaggatcaacctttctgtatatcttcaaatgtaggtgcatagaattgcctttgttctttgcacaagtacttttggcctcccatttagagtctcctccggtattgggttattaaagtgttattaaagtctcatatttattgttttcgctgagtttaatatcatatccctatttgttctctgcgctgg

SEQ ID NO: 4007 - DNA, 1963 bp, Glycine max
  misc_feature (1)..(3): n is a, c, g, or t
  misc_feature (8)..(26): n is a, c, g, or t
  misc_feature (31)..(38): n is a, c, g, or t
  misc_feature (45)..(48): n is a, c, g, or t
  misc_feature (53)..(59): n is a, c, g, or t
  misc_feature (75)..(75): n is a, c, g, or t
  misc_feature (78)..(78): n is a, c, g, or t
  misc_feature (99)..(99): n is a, c, g, or t
  misc_feature (219)..(219): n is a, c, g, or t
  misc_feature (221)..(221): n is a, c, g, or t
  misc_feature (274)..(274): n is a, c, g, or t
  misc_feature (436)..(436): n is a, c, g, or t
  misc_feature (439)..(439): n is a, c, g, or t
  misc_feature (464)..(464): n is a, c, g, or t
  misc_feature (517)..(517): n is a, c, g, or t
  misc_feature (570)..(570): n is a, c, g, or t
  misc_feature (615)..(615): n is a, c, g, or t
  misc_feature (640)..(640): n is a, c, g, or t
  misc_feature (840)..(840): n is a, c, g, or t
  misc_feature (872)..(872): n is a, c, g, or t
  misc_feature (960)..(960): n is a, c, g, or t
  misc_feature (1028)..(1028): n is a, c, g, or t
  misc_feature (1151)..(1151): n is a, c, g, or t
  misc_feature (1197)..(1197): n is a, c, g, or t
  misc_feature (1309)..(1309): n is a, c, g, or t
  misc_feature (1326)..(1326): n is a, c, g, or t
  misc_feature (1340)..(1340): n is a, c, g, or t
  misc_feature (1365)..(1365): n is a, c, g, or t
  misc_feature (1400)..(1400): n is a, c, g, or t
  misc_feature (1463)..(1463): n is a, c, g, or t
  misc_feature (1596)..(1596): n is a, c, g, or t
  misc_feature (1616)..(1616): n is a, c, g, or t
  misc_feature (1625)..(1625): n is a, c, g, or t
  misc_feature (1687)..(1687): n is a, c, g, or t
  misc_feature (1694)..(1694): n is a, c, g, or t
  misc_feature (1702)..(1702): n is a, c, g, or t
  misc_feature (1755)..(1755): n is a, c, g, or t
  misc_feature (1759)..(1759): n is a, c, g, or t
  misc_feature (1763)..(1763): n is a, c, g, or t
  misc_feature (1793)..(1793): n is a, c, g, or t
  misc_feature (1836)..(1836): n is a, c, g, or t
  misc_feature (1840)..(1840): n is a, c, g, or t
  misc_feature (1881)..(1881): n is a, c, g, or t
  misc_feature (1884)..(1884): n is a, c, g, or t
  misc_feature (1886)..(1886): n is a, c, g, or t
  misc_feature (1897)..(1897): n is a, c, g, or t
  misc_feature (1929)..(1929): n is a, c, g, or t
  misc_feature (1935)..(1935): n is a, c, g, or t
  misc_feature (1956)..(1956): n is a, c, g, or t
  misc_feature (1959)..(1959): n is a, c, g, or t
  misc_feature (1963)..(1963): n is a, c, g, or t
  Peptide Sequence Number=SeqID_7818
  Probeset Number=SeqID_13786
nnnttttnnnnnnnnnnnnnnnnnnnggggnnnnnnnnaattttnnnnccccnnnnnnnccttttttttctccgnttntgcctcttgtctagctgcgcnacccaccacgaataatgtattataagtgtagctcttcctagtgtgtgttaaaggagaaagtgtacgtatcagcccgagatgcttagtagctaggctgttatcggccgcgcagcctagcgngntgcgctgcgtcctgatatatcgttgtaccgtgacacttggtctagccgatgtnagctctcgacatctcgcgcgatctccactcgctaagcagtccgtcgcgatacacatctaatattcactctagcttactagcactatttccaccgctatccccctcctctgctccgactgacgccctccacaagctagagcgagcgccagcacactacctcgnccnagactccataacatcttacattacntcatatctcaggtgtataggagataaatctgatgaactattagtccgtgccgngcgcataaccgagaattacctccacacacagtctcacacttagagggctgcgngtatctgtaggtgagtgggagagaggaggggtgaggtaatcgaantgggtataggatcaagtatgtatgnttatgatgtcggatgtcgcatccgcgagaccgagaacttgcaccaccactcacgcgtcgctgtgatgcacgtcgttagcagagtcgcttcttgattggctttggtgcccctcgtctctcggtcgcgcgtgctccatcagccttgttgctcttctctcttctcctctcatcacgtgcccagcacgacgagcgcgtacgccnctagtatcgacattgtcgaattgctagagagncaccaacgcgcacagaacctacagactccgccactcctgagcacgcggagagagaagcgctcgtctgtctctacgcgtatctatgggnaagcaatgctactcaccgataaccacttcgtctagatgtgcgcttgccctccttctcgcgtcacctcntctactctatctcctctactctctcttcacctctcacaaatactgttcacacgcttgtctcgaacgcgcgcgatgcgcaccacgacaaaagcatagagaactctaacacctctttcctctccnctccaccctcatccattcggacttgtgtcgatgatagtgatctatncactctctctaacgcgatcgagtataactcacaccacatctcactccgcatgactcaagcaacgatcgaccacactatcacacacatcctctatgactcacatgagaatccncacacatatcatctctngtctcacgtcgttntctcacacgaactattgcatcgtantgcattcgtgctgatcttccgtcgtcctatctacncgttattatctagtctctcgatatatgcacacacagactccatctatatacgaatccgcaccngtccacctacgatcatacggacatacgctctagatcaactatccacaacacacctcacgcctcctttcacacctcgttgtctctcacattgtgtcacgtacatcaattagaccacataaagcactacacaganttactcatatccacgtcggnacgacgcgncgtgcactcacttcatagaggtattgagagatactagctactatatacctctcgaaagtcangacgacnacgcgccnatcactctcgtcttctcatccctattcaacgcaacgccgcatatacgtagaantgantacntcgataagtatgatgtcataatcgatctantatgcctgcatgcctcccttcggtgctcgacatatgtgtgtgntacntttcaccctccctaaacctcgtatgagacgatacacttagncgnantgcgccacggncagagacgagatagttgagttatgaccacgcnacgcgnacgcgtctccagcacgtgacntgngcgn

SEQ ID NO: 4008 - DNA, 311 bp, Glycine max
  Probeset Number=SeqID_13787
ggatgagggaattatagctcccatcgccataggtttcattgtctgcgctaacattttgttgggtggagccttctgtggagcggccatgaacccatctgtgacatttgggcctgctggcaggagctggacctgaaccagacactggatctactgggccgggcctgatataggtggcggaatcgctggccttgattacgaggctgactttatgagctcacacgcacgagcaggaaaccaccactgactactacatggagggaaatgaaaataacaaaaagattgagtattatagaatttatctggactcttct

SEQ ID NO: 4009 - DNA, 421 bp, Glycine max
  Peptide Sequence Number=SeqID_7819
  Probeset Number=SeqID_13788
cccccccccgaattggcttgccattgttctttcagttacttccaatgcccaaagaaaaatagctttactgctttaatttggtatattactactagctaaacttgttttttccaagaactagcaaatggcagtaaaccctcaatgtggggtctagcttgctaaaaatcatgtgtttattatggtagtgttttgattctgcaaaggaagaaaaatatttggtagcaccaaaaaggctgtccatgtagaaaaaaaatcaaaaactggaaatcagattctgacatgtgtgtaacattttcccgaaccataatccttagtgaccaactgtgtttatgtccctgtaacactgatcgttgggcttgatcaaaggcaatggcatggtacaaggtgtctaatgagtaatgataaaaaaaaaaaaaaaaaa

SEQ ID NO: 4010 - DNA, 1565 bp, Glycine max
  misc_feature (186)..(186): n is a, c, g, or t
  misc_feature (992)..(992): n is a, c, g, or t
  Probeset Number=SeqID_13789
gataatggacagcatactgtgtgcgctaccgttattggtgccgtccgatatttctcccccgcccatatacccgctggccgcgttttgcgctttcgttttttcatgccctgttccgccggttggttgatccgattgttctgaagcgtatccgcgtataagacagactgagggttattgatataaaangcggtgtcgcatactgcgccccccaaataacacattgcactgttttgcacccccaccatttctttaacaccattgttcgcgcgcgcgcacatttatgtcgcccacgctaaatatttataggatagacccgcgacgatccgctcctaattatccccctatattatataaaattacctattcccgcccgcctacgatgatatttataccaaccgcgctatgttatttgagatatcgctaaaggccacgcgacttatatataggggggggggcgtgcgaacccccccgagacccaaatatacacgctaagaaggctggtttaggaagtcccgagggagggtaatttataaaaagttatacaacccccgcccgcagggaaattatatatataataccccccttgagtacaaatatcgcatgagaccggcggcatatatgatactgccttatcttttctccccccgcttgctataattaattagtgagatataaacgcaaggagaccgcgccacgcccgcggcgataataatatagggctggggggcgccgcgcatttatatataacacgcgggcgtataattgtctgatgcacacaacgtgcgtgagaggagtgaacagagtgcgtgacgcctattaatagatgcgatgaggagggcggggtgagttttaaatatggagattcaaggaagaaaatcagagtgtgtgaagacacgaccgacgatttattgtgtacgaacaaaacctgtggtgtagtctcgtttcgtacatcgactctgtttgtttaccgcatccgcactctgggggcgctnctaggatgtgtgtatagtgttgtgatcatgaacaaacagcggcgcgcgcgaaataatacgcaaacagtagaacgagatggtaacacgacgccgtcgcacgcgttgtgtccgtcttcatttacaccgctcccgtattgctcggcccgccgagttttatggatatataatatatcgccgcgggccgacagatataataaaggcgtgcgcccggtgcgataaggagtagtgtataaacatggtcgcgactgcctggccggccgataataatcatacaacaatagatgggtgatacacaaactgacagtcagggcgagttgtgaactctcatgatataatagacgtaccgtggtcgcgcagtaataggggataacactcgacaagagagcggtcggcgggcgcggatcgcgcgacgtataaattactatagagacataatgatgtcggcgcgcgccgcgccaacgcatatatagcgaaatgtaggtagtgacgagccgcggcgatacccgatgtgattgtgacgtctggatcttgctgtcgccatattaacaccacagtttgctctgatatacggcg

SEQ ID NO: 4011 - DNA, 215 bp, Glycine max
  misc_feature (195)..(195): n is a, c, g, or t
  Peptide Sequence Number=SeqID_7820
  Probeset Number=SeqID_13790
tataagcaactacaagaaggtattgttagagcacttgtgttttcggaattatgttttttagcggctatttggtattggatttattggaatttagaaattttttgtgatgaagatatggaaatccttctttggatttgtccaaaaaaaatttaaattcatttattttttgtacgtaggagtggcttgtttttcatnccccactgctcacaacacac

SEQ ID NO: 4012 - DNA, 1702 bp, Glycine max
  misc_feature (8)..(9): n is a, c, g, or t
  misc_feature (13)..(15): n is a, c, g, or t
  misc_feature (17)..(21): n is a, c, g, or t
  misc_feature (26)..(26): n is a, c, g, or t
  misc_feature (30)..(31): n is a, c, g, or t
  misc_feature (51)..(51): n is a, c, g, or t
  misc_feature (53)..(53): n is a, c, g, or t
  misc_feature (55)..(56): n is a, c, g, or t
  misc_feature (68)..(68): n is a, c, g, or t
  misc_feature (75)..(81): n is a, c, g, or t
  misc_feature (90)..(91): n is a, c, g, or t
  misc_feature (109)..(110): n is a, c, g, or t
  misc_feature (118)..(119): n is a, c, g, or t
  misc_feature (129)..(130): n is a, c, g, or t
  misc_feature (132)..(132): n is a, c, g, or t
  misc_feature (137)..(139): n is a, c, g, or t
  misc_feature (143)..(143): n is a, c, g, or t
  misc_feature (170)..(170): n is a, c, g, or t
  misc_feature (173)..(173): n is a, c, g, or t
  misc_feature (183)..(183): n is a, c, g, or t
  misc_feature (220)..(220): n is a, c, g, or t
  misc_feature (231)..(233): n is a, c, g, or t
  misc_feature (455)..(455): n is a, c, g, or t
  misc_feature (1163)..(1163): n is a, c, g, or t
  misc_feature (1181)..(1181): n is a, c, g, or t
  misc_feature (1276)..(1276): n is a, c, g, or t
  misc_feature (1279)..(1279): n is a, c, g, or t
  misc_feature (1381)..(1381): n is a, c, g, or t
  misc_feature (1507)..(1507): n is a, c, g, or t
  misc_feature (1551)..(1551): n is a, c, g, or t
  misc_feature (1596)..(1596): n is a, c, g, or t
  misc_feature (1604)..(1604): n is a, c, g, or t
  misc_feature (1611)..(1611): n is a, c, g, or t
  misc_feature (1622)..(1622): n is a, c, g, or t
  misc_feature (1649)..(1649): n is a, c, g, or t
  misc_feature (1702)..(1702): n is a, c, g, or t
  Peptide Sequence Number=SeqID_7821
  Probeset Number=SeqID_13791
tttttttnncccnnntnnnnnccccncccnnccccccccccccccctcccntncnncttcccctctcntaccctnnnnnnncccccctcnnattttcccggagtgtgtnngggcgacnntgttatgctnncngtttnnnattngccccccctagcttcgccccaccaccntgntgtgcgccgncgacgcgcggagagcccccgtctaccgccaccaccanactcaaaagannnaggtaaatgggtggcggtagatctgacggatagatgtgttatatgatggctaagtgtgagtggtggtgaccctatcactatcgtggttggatctttattcttggaggcgttctatattttctttataatgttttgcgtcctctcgctttctatcacatcctgtgtccctgcctcccacgtctctccaccaccctctcgccaactctcgcgagatgagcgagnaatctcagcctccgcgtcatctctagcgcgctgctgcgatcgcgctcagccgcacgcgagagtgagcatgcgccggcgtggcgccgctgttcggttgatcgtgtgtagtcgtgtctagcgtgtgcgggttgtcggcatcggtaaggagtgtcgtgcggcggtatgtgtcaaaagccggcgacaacgcgagataaactccagacagcgatcatctcctcgtcgcctcgccgcagtgtttgattatctatagatatagtctgcgactcgtgctcgtatgtgttctctcgtcgctcattctacttttttatgtgattccgctattcctcacccgcgtctattaactgcttgttaaccccttatgctgctcatactctctctgtgctatctgtctgtcgtcgtaacgagaagtccacacacgttgtgaagcactagtaccgctatcactgagctggtagtgtgtgcggagaccggtaaccattcatccacaccactcagctatcgtgtccttcacgactatctcacgcatgtcgcttgcatctcataacgacaccacacgctgtctcacacaatgctacctcctacctctgtgtgtgtgcgagctatatgtacgtctcgccgtctttctcgttagtctgatgtctgatcatcactagtatcctatccttgtgtgctctgaacgctgacgcgatcaccctccgacgcaggcanacgtgtacaaacattgcntagcacaccgagatgacaagatcacgcataggaagcacccgtgcgctcacgtcctacacagttcgcgtcacataccactggatcgatcgacagtngcncgtggcggatgtcacgtctctgtgtggcgctccggctacgtcatgcatcatctctcgtatactagccactctcttctcctagtggttatcggaatacatacntgggattacaacgcgtgctctacatgccaccccagtcgcgccgaagcacgacatacctcatcctctcgctactcggatcgaccgacaaacgcacatcatacaacacaactgagatacatagacaanacatgatatgcttcagacaaactacctacccagcccacacacgntcgcacagaacggtaatacgacgactgaaccatgaatatgagtgntaacatgnagtaatntcgagcggtgngttggcagcactcaccactcatctcanttgacgcatgtcgcacgcgccgcgcccgctctcgaaatgacgataccactcgn

SEQ ID NO: 4013 - DNA, 1990 bp, Glycine max
  misc_feature (1)..(1): n is a, c, g, or t
  misc_feature (9)..(10): n is a, c, g, or t
  misc_feature (12)..(16): n is a, c, g, or t
  misc_feature (18)..(18): n is a, c, g, or t
  misc_feature (23)..(23): n is a, c, g, or t
  misc_feature (28)..(28): n is a, c, g, or t
  misc_feature (30)..(32): n is a, c, g, or t
  misc_feature (34)..(35): n is a, c, g, or t
  misc_feature (38)..(38): n is a, c, g, or t
  misc_feature (41)..(42): n is a, c, g, or t
  misc_feature (45)..(45): n is a, c, g, or t
  misc_feature (58)..(58): n is a, c, g, or t
  misc_feature (65)..(65): n is a, c, g, or t
  misc_feature (92)..(92): n is a, c, g, or t
  misc_feature (94)..(95): n is a, c, g, or t
  misc_feature (97)..(97): n is a, c, g, or t
  misc_feature (106)..(106): n is a, c, g, or t
  misc_feature (140)..(140): n is a, c, g, or t
  misc_feature (156)..(156): n is a, c, g, or t
  misc_feature (168)..(168): n is a, c, g, or t
  misc_feature (175)..(175): n is a, c, g, or t
  misc_feature (178)..(178): n is a, c, g, or t
  misc_feature (187)..(188): n is a, c, g, or t
  misc_feature (236)..(237): n is a, c, g, or t
  misc_feature (278)..(278): n is a, c, g, or t
  misc_feature (280)..(280): n is a, c, g, or t
  misc_feature (305)..(305): n is a, c, g, or t
  misc_feature (308)..(308): n is a, c, g, or t
  misc_feature (310)..(310): n is a, c, g, or t
  misc_feature (320)..(321): n is a, c, g, or t
  misc_feature (326)..(326): n is a, c, g, or t
  misc_feature (345)..(345): n is a, c, g, or t
  misc_feature (369)..(369): n is a, c, g, or t
  misc_feature (374)..(374): n is a, c, g, or t
  misc_feature (449)..(449): n is a, c, g, or t
  misc_feature (459)..(459): n is a, c, g, or t
  misc_feature (468)..(468): n is a, c, g, or t
  misc_feature (490)..(490): n is a, c, g, or t
  misc_feature (524)..(524): n is a, c, g, or t
  misc_feature (532)..(532): n is a, c, g, or t
  misc_feature (580)..(580): n is a, c, g, or t
  misc_feature (586)..(586): n is a, c, g, or t
  misc_feature (601)..(601): n is a, c, g, or t
  misc_feature (624)..(624): n is a, c, g, or t
  misc_feature (640)..(640): n is a, c, g, or t
  misc_feature (647)..(647): n is a, c, g, or t
  misc_feature (666)..(666): n is a, c, g, or t
  misc_feature (691)..(691): n is a, c, g, or t
  misc_feature (730)..(730): n is a, c, g, or t
  misc_feature (763)..(763): n is a, c, g, or t
  misc_feature (780)..(780): n is a, c, g, or t
  misc_feature (802)..(802): n is a, c, g, or t
  misc_feature (814)..(814): n is a, c, g, or t
  misc_feature (914)..(914): n is a, c, g, or t
  misc_feature (932)..(932): n is a, c, g, or t
  misc_feature (945)..(945): n is a, c, g, or t
  misc_feature (1049)..(1049): n is a, c, g, or t
  misc_feature (1093)..(1093): n is a, c, g, or t
  misc_feature (1099)..(1099): n is a, c, g, or t
  misc_feature (1101)..(1101): n is a, c, g, or t
  misc_feature (1114)..(1114): n is a, c, g, or t
  misc_feature (1172)..(1172): n is a, c, g, or t
  misc_feature (1174)..(1174): n is a, c, g, or t
  misc_feature (1297)..(1297): n is a, c, g, or t
  misc_feature (1301)..(1301): n is a, c, g, or t
  misc_feature (1306)..(1306): n is a, c, g, or t
  misc_feature (1309)..(1309): n is a, c, g, or t
  misc_feature (1311)..(1311): n is a, c, g, or t
  misc_feature (1393)..(1393): n is a, c, g, or t
  misc_feature (1433)..(1433): n is a, c, g, or t
  misc_feature (1460)..(1460): n is a, c, g, or t
  misc_feature (1484)..(1484): n is a, c, g, or t
  misc_feature (1595)..(1595): n is a, c, g, or t
  misc_feature (1605)..(1605): n is a, c, g, or t
  misc_feature (1667)..(1667): n is a, c, g, or t
  misc_feature (1670)..(1670): n is a, c, g, or t
  misc_feature (1673)..(1673): n is a, c, g, or t
  misc_feature (1692)..(1692): n is a, c, g, or t
  misc_feature (1721)..(1721): n is a, c, g, or t
  misc_feature (1750)..(1750): n is a, c, g, or t
  misc_feature (1764)..(1764): n is a, c, g, or t
  misc_feature (1794)..(1794): n is a, c, g, or t
  misc_feature (1796)..(1796): n is a, c, g, or t
  misc_feature (1865)..(1865): n is a, c, g, or t
  misc_feature (1879)..(1879): n is a, c, g, or t
  misc_feature (1881)..(1881): n is a, c, g, or t
  misc_feature (1905)..(1905): n is a, c, g, or t
  misc_feature (1914)..(1914): n is a, c, g, or t
  misc_feature (1921)..(1921): n is a, c, g, or t
  misc_feature (1923)..(1923): n is a, c, g, or t
  misc_feature (1955)..(1955): n is a, c, g, or t
  misc_feature (1980)..(1980): n is a, c, g, or t
  misc_feature (1986)..(1986): n is a, c, g, or t
  Probeset Number=SeqID_13792
naaattttnntnnnnntnttttntcctngnnnannccncgnngcngcggacgtagcgngtgtagnggtaatatcataagagtccgatctacncnnanacatcttcnacacaacattcatttatcacatacacgcgccgcncgtcgcgcggcggacntctctgtagagncataganagnagaagatannaatgggaactgagactctctatccacgatctactagcttacgctcgtnntatctcatctcttctctcacagacatccgcgtacgatacanantcatataaaagagcagtattttttngtntnatgtagtgtnntattngttgaagtctatcgtctgncgacgatgtgtgtggtagttgtcntatcnagtcagtatgaacgtaccgcatcgactcgactgatgtcacgacgctatcctgagacagatgcgagatagtgtgtncgagcaagancagatacgngccttcactatatcgatacacntgaagcgacacatcctctctagcagatcagtatntacctacntcatactactcattcacatcatatcatcgtcactagtgactgtcgtgntgttanataattatatgagtngttgatgatatgacgagtggatngagtattcgtacgcgncgagtgnctctcgtgctatctctgtngggtcttcgtgatgtgttctcttcncgctgtctgcttgctggctatgtactagtgcgacggcgnggctgtgtcttcgtgtactaactctaaaaccgntgatgatcgagagagcngcgtcgacagtcatatcatgangagaggaacgcnagtatgaagcctcatatcacgatacgattgatatcgagcatcacgatcagtacgcggcatcgcacacatagcatgactcgtccgcctcgcgcccgcgctngagcgggacgtcggcgtngtatctgatgcantggtctgtgctgtcatcgctacattgttatgtatgttggtcgtctggtatactaccgctgatgtcctatcctgcctcgccgtacggcgatctctcacatgacgntaacgtacctctcgctacacactggacgttccgtgctcgctatngactcncngtcgtgcacgtgntatctcgtgacgactacaagagatgtgagtatgtacgataagttacgcgaatcagtanantgaatacgtctgtagacgctcgtgagatgatagaggacgcacatacttatatctgtagaatccctcactactgtcttacatggttatctcgactggagtcgagagtccatatagattatgttnatanatganaananccatgagtgatgcgctgccacccccccaccaccacgcagcaggcgagaggacgacacgaatgcacgtagagaagacagatcngtgatcatggtcgctcgtcatatcactcctggacagccanccaccactaccatcacctctctgcgancccatgatatgtagctcgtaagangtgtcgttgccgatctctcacgtgcgtgactcgcgtctgcgtcgttgtatctgagatatattgtctatagctatatcggtacctgcgacgacgacgtcgcgcacgcgcctnctgctactgngatgcatgtgctacattgcgtcctgtcgtagcaccttcgtacactcgtgtaggtgctatatnttnagnatgactatatcactatgcntgcctgtctcatcgctacgcgtatgacanttctacatctatctatcgctctttacttncatctctgccaagnggtctcgcatgactcgtgagactgggacgntnagcagactagttagtattgacgaatacgcacacgtcacgcacgatctgatgatatggcattcgagaggngccagcctgatgangncatagagtcagtgtgacgtacaanacgtgtaanaatatgncncacatgccaatccatccgcagggtcgactctnactcaagtgctgagacgcatcgagnacgcgnagtg

SEQ ID NO: 4014 - DNA, 240 bp, Glycine max
  Peptide Sequence Number=SeqID_7822
  Probeset Number=SeqID_13793
cccccctgttgggaatgatgatgctgttcaggggtctcttgactgggctgcattttgggtcaaagatttgccttttgtcaagtccttgtctggatattggaaatttttcattgctgacagtcccaacaatgtccctacttatttttatgaaagtgagttccaggattcagggtggaaaactttgccagttccttcgaattggcagttacatggatttgacactcctatatatacgaacgt

SEQ ID NO: 4015 - DNA, 1496 bp, Glycine max
  misc_feature (10)..(10): n is a, c, g, or t
  misc_feature (48)..(48): n is a, c, g, or t
  misc_feature (118)..(118): n is a, c, g, or t
  misc_feature (125)..(125): n is a, c, g, or t
  misc_feature (169)..(169): n is a, c, g, or t
  misc_feature (244)..(244): n is a, c, g, or t
  misc_feature (247)..(247): n is a, c, g, or t
  misc_feature (350)..(350): n is a, c, g, or t
  misc_feature (567)..(567): n is a, c, g, or t
  misc_feature (781)..(781): n is a, c, g, or t
  misc_feature (989)..(989): n is a, c, g, or t
  misc_feature (994)..(994): n is a, c, g, or t
  misc_feature (1041)..(1041): n is a, c, g, or t
  misc_feature (1111)..(1111): n is a, c, g, or t
  misc_feature (1116)..(1116): n is a, c, g, or t
  misc_feature (1194)..(1194): n is a, c, g, or t
  misc_feature (1270)..(1270): n is a, c, g, or t
  misc_feature (1336)..(1336): n is a, c, g, or t
  misc_feature (1380)..(1380): n is a, c, g, or t
  misc_feature (1399)..(1400): n is a, c, g, or t
  misc_feature (1405)..(1405): n is a, c, g, or t
  misc_feature (1417)..(1417): n is a, c, g, or t
  misc_feature (1438)..(1438): n is a, c, g, or t
  misc_feature (1442)..(1442): n is a, c, g, or t
  misc_feature (1457)..(1457): n is a, c, g, or t
  misc_feature (1482)..(1483): n is a, c, g, or t
  Peptide Sequence Number=SeqID_7823
  Probeset Number=SeqID_13794
ccacacgccncagctgtgtctgctctgttctacactgagcgacccagnctcttacagatccatgaactagctgtattgctccctctatcttatctgggtagtagtccgcagaccgatnaggtcangcgccatcgtgtcgtcgtgaagagtgcgacatcacatcgacagngtgggagagtagaggtgcgacagagcgtgaggataggggaggagcgagtgagagagatgagacagcatgtgaatnacntcacagctaccacatctcgcagagcatatccgagtacgagcagcgagcgggttagtgagaggtagcgaaagatcatgtcagagcgcgcgtgaggtggagcagngagcgagcgagcagccgagcgcgacgaggggagaccacagaccacgacccacacagagatgacacgagcatgagcaacgaggcagaagcgacagtcagctgcgcaagtccacacaatgacaatgcatcgaggagtcacgcgtggcctacacacgtatcgcgctgaatcgatatatatctacaccccgccaggcgccggtgcgtgaatcgatagcacncgtactaccacgcacactgagctcgagagttgtcgcaatgtgttcattatatagaccccagccattttatcagcacgaccacgcagaggagagacataagatgggccagcaacacagcaggtgggatcagataccccactggttgaggagtagtgagtggagcagtatgtagaggaatacagacccaccacagctgccacgctagacatggcgntctcacacagtcgtgtgacgttcagacgctatatgtctcatcacatactcccgtagttgtgtgatgtacctctccctggtcgctagcgtgtaggtggtctttgctgccgctagtgtgtgttgtacccgcgcccccttggtgtgtgctgggtgtgtatacaccataggaagagatagataccaccaagctcagccggctgtggacgcgnggcgnggcgcgcgaagtaagggcaggagggggaagccgcgcgccggagcggnatacagaagagaagacgcgcgtgtatcaagatcacaccccccgcaacgcatgctcagtccgacgccagcncatcncgacatcacagaaaacgaaccgataagaccagccgcggcggctgtcgcgccgagcgtctgacgctagagggccgcggngtgtcgcgcggccgtggaggggacggtgtgtgacaagagaagactacagatgagatcagtgccgaggcactggagnaacacggcacaacattctaacccactgtcctcctcttggtttcccctcctcttatataatacacancccttctaagtatgtcatgtttgttagtccgtcgtattgttcgnctttacacgatctggtggnnggcgntcgcatgcttcncccttgccgactcctccgcgntgcntctcgcgcttccgcncgtctcccacaaacaacacaacacnnatacaaaaaccaa

SEQ ID NO: 4016 - DNA, 411 bp, Glycine max
  Probeset Number=SeqID_13795
ccccgatatttcgccactctctcgcctcctcaatggtcctctctgtcgagggggagaagcagccgagccccctgtcgccgcccgccgtcgctcaccgcggtgaccgcctcccccgtgctcctccgattggttcaacacctccgccgtcttccgctgctacctctacgtcgacgcgcgcgagccgggaggcaccacagcaccggatcgagccgtcttcttcctcggatccccgccgtcggtcgccgtcgattcattcgcctccagcaaccccggcctccccgagatgctctccctctccgctaccccgagaccgctgttgatgcccctgtgatcgactacgtcgacgacgacccttctttccgtttcagcgaagcttccagatggtggatccctggaaccagcatgccaccg

SEQ ID NO: 4017 - DNA, 1044 bp, Glycine max
  misc_feature (932)..(1044): n is a, c, g, or t
  Peptide Sequence Number=SeqID_7824
  Probeset Number=SeqID_13796
ctcgagccggattttgctcactccacgccacaaacacatcacctagttgcagatttttattctttttcttccaagtttgtttatccttatcctaattccatttggctttaacttttaataacagcagttttctttttgttatttattgctattatgatgtagtaatttcaatcgttttcataatgactccataatggcgattaatgaagtttctgagctgtgtgagcgatttagcataaagtatacgatgcatcgtttctggttctggatgttcatgttcgagcaaagatcttttgtgtgtgtgcagttactgctttgacgttttggattttcagtaagtaaaatctcggaagtcctcagttaagctcttctgcttacttagggtttggaaagtcacttcatgtagggattagtatttgcactagatccgtggttagttttgaataatttctaaggttggatttgaagtgaatggttttagaaagggatactctgctagagtgctgtggatatatggtcagggcatttgtttgtcttacttgtatagttgtataggttcttgctattttcttttacctgcatatctagtgatttgcagttgcatttgggttaggggttcctggtgattattgcatgtgctgattttctttggatgagaacgggttgcactaatcactggtgaatttccacattctggatgacgggcaacggggccctgaatgttgatggcgaatctagcaagctgaaggaactagatctatccttatctgatgccattactagtacttgtgattctcagatgcatagtggagaatttgaagccctaaataaaaaacccaagtcctcagatattgaaaataaaggtactaataatgatgaagaattgccatctcttgagctcagtttaaagaggctcagaggagttgaagatnnnnnnnnnnnnnnnnnnnnnnnnnnnnnnnnnnnnnnnnnnnnnnnnnnnnnnnnnnnnnnnnnnnnnnnnnnnnnnnnnnnnnnnnnnnnnnnnnnnnnnnnnnnnnnnnn

SEQ ID NO: 4018 - DNA, 845 bp, Glycine max
  Probeset Number=SeqID_13797
atcccacacactcagtactgcacacactgattcataatgtcttggactaagcttatatcgcttagcctggttgtcctgtttagcgttggattagccagcgctggtagggtatctagatactctagttcccagggaacaggcactggaggcggagagggtggaggagcggtgaacggcggcggcggaggaagcgggaatggccagggagctgctcagagtggaagcggaggaacccatgcaagtgctggaggcggcggaagcgggggtggttggtcagggtataatggtactgggtatggcgctgggtccggcagcggctcaagctctgggccagatgagccaaggatcatcaaattatggtggtgatggtgggagtacaagcgcaggtggttccggtggcggcggcggtggtggagaggccgccgacgacgacgacgactgcccggctgactccgctggctttgggacaggtggcggcaccggatctggatccagcgaggcgaataatgacggtgatgcctcctatacaaatgcaaatgcttccggtaatggtggcggcgagggcggtggtaaaaatggtggaaccggcggtggcacaggcggtggaagcggttacggtgacgcaaacccatgaagcctctccgtccaatcaaagcagaccgagagcccaagctatcgtcgttctcttttcttttatttgcatttgttttgttcttacgtttccatgtactattagggacaactaataaagggcttcattacacaagtgtctgtgagtgacgcggagactagctatttcactgtgagatacctttgtgtatcactcacagccgtgtgtcgcgctg

SEQ ID NO: 4019 - DNA, 431 bp, Glycine max
  Peptide Sequence Number=SeqID_7825
  Probeset Number=SeqID_13798
gaatccgcctcctccccatccaatctgccgttccaccaaaccaatcctcgccgcagttcgtcgtcgccggcggcggcggcgcgcagctaagtggggactgccggtgccgcggctggcgtcgattggttcctccctcctcctcttccgtcttcttctctcgggtatatcttccgcgcggactgttgatctcagttgaagcctcaggcgcggcgcagcttgtcttcccaaaaaaatggcggcgggaagtctgtttccatgattccctcgctcggcgggactgggagaggttgggtgggttggatgtgatcgggattgccaagccatagcagttcttatggatcagctggctttgctcgcgacggagttcggagattcgtccgacttcgaggtcgacggcatcaacgagaacgatgtcagcgacgaggagattg

SEQ ID NO: 4020 - DNA, 1556 bp, Glycine max
  misc_feature (30)..(30): n is a, c, g, or t
  misc_feature (66)..(66): n is a, c, g, or t
  misc_feature (110)..(110): n is a, c, g, or t
  misc_feature (123)..(123): n is a, c, g, or t
  misc_feature (130)..(130): n is a, c, g, or t
  misc_feature (156)..(156): n is a, c, g, or t
  misc_feature (176)..(176): n is a, c, g, or t
  misc_feature (275)..(275): n is a, c, g, or t
  misc_feature (301)..(301): n is a, c, g, or t
  misc_feature (437)..(437): n is a, c, g, or t
  misc_feature (462)..(463): n is a, c, g, or t
  misc_feature (510)..(510): n is a, c, g, or t
  misc_feature (546)..(546): n is a, c, g, or t
  misc_feature (724)..(724): n is a, c, g, or t
  misc_feature (795)..(795): n is a, c, g, or t
  misc_feature (862)..(862): n is a, c, g, or t
  misc_feature (1001)..(1001): n is a, c, g, or t
  misc_feature (1166)..(1166): n is a, c, g, or t
  misc_feature (1210)..(1210): n is a, c, g, or t
  misc_feature (1248)..(1248): n is a, c, g, or t
  misc_feature (1293)..(1293): n is a, c, g, or t
  misc_feature (1339)..(1339): n is a, c, g, or t
  misc_feature (1345)..(1345): n is a, c, g, or t
  misc_feature (1410)..(1411): n is a, c, g, or t
  misc_feature (1456)..(1456): n is a, c, g, or t
  misc_feature (1458)..(1458): n is a, c, g, or t
  misc_feature (1503)..(1504): n is a, c, g, or t
  misc_feature (1517)..(1517): n is a, c, g, or t
  misc_feature (1526)..(1527): n is a, c, g, or t
  misc_feature (1529)..(1530): n is a, c, g, or t
  misc_feature (1533)..(1533): n is a, c, g, or t
  misc_feature (1535)..(1535): n is a, c, g, or t
  Probeset Number=SeqID_13799
cgaagcgcagcgggagagggggaggagcangtcgtcagaggtacacgacgcacgtctgcagagacngaggagtcgtatagctcttcgtgtgtactgtgatatatctgcangcatgtagtatcnatcgctngtgatacttccgatgtgtcacatctntgtgtgtgtacatcataganatgcgccgagtatcgaacattaacagaccatagctacaggtgcagatcacgctgatggcgtcacgctcgacttgtgagagatgccataacaacaggaanatacgcgcgagattcttcgccgtgcncggcgaaggggtgaggtgctctatccacttcctcatgcaacgtgcgaggtcagcgcgcgccatcacacgacacctgaccgcgccacgtaggcactccacacgtcgtagtagctacgcgtagcgacgtgatacagtncgctcgacaggagataaacgtgtannagttcacgcatgtacttgtatagtgtgagtgcacttgctaacatcanaagtagtgatgtatagtactgacacgtgatacggtnggcaccagtgcatttttatatctatattttcatgcgccggcccgtcagacagccgtgcgtcgcagatgagagtgggacaggcattcagctacagaaggtataggagtagtcctctttctgcgcgtgatatattgtgagtgtatcttattcctacatgatagtatatataaaagtattnactatctcttcattatactatcactgcatctatatcaactattcttgcctagctagttatacacatataanatttcgtcattgcacgctaataatctcggtcgtgccttaaggatctaggcacgatctcaacagacancacagaacatccatgtggagctctcgtttattctcatgcacatgccggcgagcgccgccgcacggcgctgcaagtacggtcatgcgagtagtgtgtggagtgactattcatacaatacagctgctatcagtgcgtcttnatatcactatcgagtatataattaattgcatcacatatcaactaataatgagacatcttctactgagctagtcacagtgagtatgacgagtgtcatctgcacagtggcgtgcgacgtgatagacacgatctctactggagatcacacatagggcgatgattactnatcgctacaccatcgcgcactagcggctgccctatacctatccnaacatcacacagtgattactagctcgtcactccaattncccgctacgagtcggcgctcataatgcgtatgcaggtaggcatgnttggttgtggcgacctacactaccgtctcacacgcaactaatacanccatanatacatacatatttcctctatttgtcgtaattatcgtagtcagcgatccttcatcatagtgaagnncgcatcctactcataaccactgctacatagcgcgatataataatntntgcacaccgagggggacggcgcgcgagtaggagagacgtgggggnnggagaagggaganaaggcgcannannacnanaccgcccccaactcaccctcc

SEQ ID NO: 4021 - DNA, 2250 bp, Glycine max
  misc_feature (1)..(21): n is a, c, g, or t
  Peptide Sequence Number=SeqID_7826
  Probeset Number=SeqID_13800
nnnnnnnnnnnnnnnnnnnnnaaattccaatctagtcaaaatcttggaccgctttatcctacgccctcctccctacttatcctgcgcatatttcgccgttttctcgccgagatcttgaactatctcctccgtgttctcactttctcaactacacaatattcttattgaattccagcggaaagaatcatgagttgcttcggctgttgtgaggaagatgactaccagaagactgctgaaagtggaggacagcatgtggtaaaaaactcaacaggaaatgatggaaacagtcgtgcatccgaaactgcaaagcaggggactcaagctgttaaaattcagcccattgaagttcctgaattacaagtggatgaactcaaagaaatcaccgatggctttggagaaagttctttgattggagagggatcctatggaagagtatattatggtgttcttaaaagtgggcaggctgcggcaatcaagaaattagatgccagtaaacagcctgatgacgaatttttagcccaggtttcaatggtttcacggctgaagcatgacaattttgttcaattgcttggttattgcattgatggaaactcccgagttcttgcttatgagtttgcatctaatgggtctcttcatgatattttacatggcagaaaaggagttaaaggagcacagcctggtcctgttctaacatggactcagagagttaaaattgctgtaggggctgccaaagggcttgagtacctgcatgagagggctgatccccacattatccaccgggacatcaagtcaagcaatgtactaatctttgatgacgatgttgctaaaattgcagattttgatttgtcaaatcaggctcctgacatggcagcacgtctccattccacccgtgtccttggaacctttggttatcatgcaccagaatatgcaatgactggccaattgaatgccaagagtgatgtatacagctttggtgttgtccttctggaacttttgactggaaggaagcctgttgatcatacactaccacgtgggcagcagagcctggttacttgggctacaccaagactcagtgaggataaagtcagacagtgtgtagatgcaagactaggaggagaatacccacccaaagctgttgctaagatggccgctgttgctgccctgtgcgtgcaatatgaagctgatttcagaccaaacatgagcattgtagtcaaagctcttcaacctttattgaatgcaagacatgggcctgctggtgaaactccaaactaatctttgtctatatttatatctgtatcaatgagtatgtgcataagtgtgcacgtgagatataagaaagtgactgcttcagaagcggatggaaatttgcttgaacatgtttatatatcccattgtttacattgcatttattttgttcataatccataggttctctgagatttacttgcttttatttttcttttttgtcacactgcattcattttgttcataatccatgaggttctttgctgtttccttgcttttattcattttaatgtacttgctttgtctattttttttcctttcaatcctttacttctgggatgattgccgtctttacgataaagtgttgggaaatacaaaacagaattgtgtatactcaaagctaagagcaagtcaatggactatctctactggaaacagttattcaccgagagccgttcttattagattgattcttttaatttttttcattaaaatgtttgtcaaattgagagttgcatacatctcaaaattactccgttttggcggggggggaaaaagtttgatgttgttcatacactaccacgtgggtagcaaagcctggttacttgggttcccccaagactcagtgaggataaagtcagccagtgtgtagatgcaagactaggaggagaatacccccccaaagctgttgttaaaatggcccctgttgctgccctgtgcgtgcaatatgaagctgatttcagaccaaacatgagcattgtagtcaaagcttttcaccctttattgaatgcaaaacatgggcctgctggtgaaactccaaactaatctttgtctatatttaaatcgggaccaaagagtatgtgcataagtgtgcccgtaaaaaaaaaccaagccctcccttcaaaagcggatggaaatttgcttgaacatgtttatatatcccattgtttcccttgccaaaaaaaaaaaaaaaaaccccccccccccccctcttttttttttttt

SEQ ID NO: 4022 - DNA, 398 bp, Glycine max
  Peptide Sequence Number=SeqID_7827
  Probeset Number=SeqID_13801
aaaaaaaaaaaatggcttgtgggattttgttgttagttttagacacccttacctctctcttgtctccacgagtttctctatctctcttcggcctctttctccatgcgaacccactctctcgccgtcgttcttccgtggtcactggtcgctggtcgtcgccacctgcctctcgcctacggtcactgktttctttggggaagtagagacttgkttaaggggagtagatttgagggtttttctgagagggtttttttatctatgtgtgataatgtgtatgtgtatgtgtattaattgatgaaggggatatcatgctcaagctttcatttgaatctgktgttaattgctcaagccttaaaattttgatttctcttttctgttaaccccatatctctcacgtt

SEQ ID NO: 4023 - DNA, 413 bp, Glycine max
  Probeset Number=SeqID_13802
aaaccaccacacttgtggtcttaactctgctttatatacaatagaaaaagctgtgtgtttcatgcttgttttgattccttctatcatgtgagtcatttctgtcttttggtgtcgctgtcgcgcggggaagaaaaagttgtgtttcaaatttcaatgacttctgctactagttatactccttcacctgaaaacaaacctcagatccagcacataattaacattcctgaacaaatggagcctgaggtgcatgatcaatgttgcatttacaaggttcctcatcatctcctgaaattgaatgtggaagcttatacaccacagttcatctcaataggccctcttcacagtgacaagccagaactaaagcaagagaagcagaaacaaaggtattttcatgctttttggaaacgtctatc

SEQ ID NO: 4024 - DNA, 1416 bp, Glycine max
  misc_feature (1181)..(1181): n is a, c, g, or t
  misc_feature (1239)..(1239): n is a, c, g, or t
  misc_feature (1255)..(1255): n is a, c, g, or t
  misc_feature (1257)..(1257): n is a, c, g, or t
  misc_feature (1314)..(1314): n is a, c, g, or t
  misc_feature (1364)..(1364): n is a, c, g, or t
  misc_feature (1416)..(1416): n is a, c, g, or t
  Peptide Sequence Number=SeqID_7828
  Probeset Number=SeqID_13803
ggcccactcactataccccccccaacatccatccaagaaatacattctttactttctcctcttaccaaattggcgaaccgcggtcccacccctcgcaaccagtctacgattgcgccacccccctccatctcatggcatgacaatcctagaagccgtcgtccaatccacaggaacgtcaactctcgccacccaaggacaacagaatgcaatcaacataactggcctgcaactctaatcgcatgcttatattactcctctcccactaccacttcaagaccctcccgtacaaacttcctacagcaatgatactctccgaaccatttctctcatgacactgcacctttgaagcccacttgcacaaactcaccccatcaccatataacgttcctacctcttacactgatacaacacatccctccgtctcttccaacgtatacaacagcattggtctttgcatgcctgcctcatcgatacaaccattacctatacaacattcttccacaacctaatcgtatctgcgataaacaatctcaccccacatgtgcctcgatctcctctcatgctacccccacacgcgctcctgctccaatcacgagcagcaccacaccccatccatcacttctaaaatgtctaactctccacagcacccacgaaatccctatttaatcaactcctccgataaccggaccctccaacgaacatatatggtatattacgcccccaaaccaccgcgcacaacctaatacacctctaactccgccagatctctatacttagatgacactcaagcactcgggcacggctcatacgccatcttatcatcttagcacacatttatggaggtatgctcctcaatcccctgtctactccctaatatacttctctgtgcgtcgcatgttcgtcctctcaatcgcaaacttccttcccctctccgctacactacatcctctcgtctctatttatctactctcctcttctcacaaaatacctctcctacacgcagcacgccacacgtataattcacacactatgtgacaacaagctctaaacctaacctgcttctccatccccgaccgattattccatctatagagtcgatacgctctgcctccgactcttcaccttcctgcaatgtatccccatttaatgcctattggtgactcgctctattatgactaccnaacttgtctctattctttaatccacctaatacaagactacacaacaaagggctatatnataagtgacagattananaactacaatcactttagtcattcctcatactatacaaacatcgcgcagctgcactcncgtcgcacatcatgtattaatcttctatatctggagcaccttattcgatntgatttgcactcaagcacaacacgcgatactcttcacaaatacagcgcgagn

SEQ ID NO: 4025 - DNA, 1785 bp, Glycine max
  misc_feature (20)..(20): n is a, c, g, or t
  misc_feature (305)..(305): n is a, c, g, or t
  misc_feature (702)..(702): n is a, c, g, or t
  misc_feature (771)..(771): n is a, c, g, or t
  misc_feature (882)..(882): n is a, c, g, or t
  misc_feature (894)..(894): n is a, c, g, or t
  misc_feature (1237)..(1237): n is a, c, g, or t
  misc_feature (1296)..(1296): n is a, c, g, or t
  misc_feature (1357)..(1357): n is a, c, g, or t
  misc_feature (1364)..(1364): n is a, c, g, or t
  misc_feature (1383)..(1383): n is a, c, g, or t
  misc_feature (1391)..(1391): n is a, c, g, or t
  misc_feature (1417)..(1417): n is a, c, g, or t
  misc_feature (1641)..(1641): n is a, c, g, or t
  misc_feature (1674)..(1674): n is a, c, g, or t
  misc_feature (1683)..(1683): n is a, c, g, or t
  misc_feature (1695)..(1695): n is a, c, g, or t
  misc_feature (1721)..(1722): n is a, c, g, or t
  misc_feature (1771)..(1772): n is a, c, g, or t
  Probeset Number=SeqID_13804
ctatcatagctcatccacanacgcgaaatagcacgctagatatagcagtaggcgcgacgtcgacgtgatagtgacgagtcatagtggttggtagagaggatagggcgcagcgagatacgtagagcgattaggtgtattatgctcacatcgagtgcagagcgcatgagtgacgacagtgcgggcggcacgcgccggcgcgcggagggcgcgcacgcgaccgcacgaaactacggccgcctagtgcacatctgagcgctcaggagcacgcatccggcacatatcatctcttcactgtgctctcatancttcatgcggcgtcaccgtcggccgcggagtgggagtgtatcgtggtttcgtacgcctcgatctcgttctttccctcctatctattgtcagtgcgtagatgtctagtcgtgtggctgtatcctatacgcgtctttatcacgtgatatgaacatatagatacgttaatcgtgcgacagtagatggccgcgagcggtagtgtagtgttcgctatcgccgagccgtgcgtgatgctgacttatcgctgtgcgggccacgtgtccgatcctgcgcgtctgacgcgcttacgcagctttctctttatacgtatgaactgctacagatgctacgccgtatcgatttcacatatatactctgcatgtgtctgattgtatcgctccattgcacgcgtgcaccgtntcgcgatcttcggcatctcactgtatattgacgtgtagtctcatccgctcctgccgatcgtcagtagtnggcgcatcatatatgagaaagtagagagtatgcgtgaatttgcagttatggaggcgccacgccggcgtgcgctcgtgggcgtatagtatataaacggagcgatcgagtagntaatacactctncgttcgtatattgctaagacatcatatatacattactatcgtcttggccgttcatatgagttcgtgtattgtgacattggctgtgatactttcgttgtatcacgacactatactcgctcttcgtcacagcgcagtcggctcggtcgatactctcgccacacgtgatatggtgtccgcggcgacacgccgctgcagcgtacgcattgttttgtctcggtctgtctttatccggacggatcacactgctattctatgcgcctctcttcttcactcacctatagatatccttacacactttagtgtatgacctgtcatcgcccggtggtgtggtgcgccgtacgcnctgctgtagaacatgggtgtcgcgcgcgtcgccgtctcagtctatatgtcgcgcgcgtncgctgcgcgtgcgcgctgtcccgagagcagaagaagaataaatacacatagactagtgatncgccacnacacagattagattatagncgcatatntatagtataagagcgatacgatactncactagtgctcgcatcagaatgcagcacacgtgcgtagccctgtgagcgtgtcccgaatagacgagcggtggtcacgacattccgagtcgagtactacatctcgatcacatgttcacagatcaacactcgcacatatgaacatgcagtcactgagcgaagacaactgctacacataaggtgtagcatcgacagccggcagtccacaccgaacactactgtatgnccaagcaaagtaagcagcgtgaaacaggcacangagtgtganggagaagatganataagaccgcgggttcgtgaatgcgnncgcgcggtgtgtgtgactaggtaaataatacaaaaatacaaagagagannaacagagacagcc

SEQ ID NO: 4026 - DNA, 610 bp, Glycine max
  misc_feature (610)..(610): n is a, c, g, or t
  Peptide Sequence Number=SeqID_7829
  Probeset Number=SeqID_13805
tcagctacgtaggccccccccccctcgccaatctcgaaaagcacgttgttgaatgcgatgaaaagttgaccaaggttcttcaagaaaattccgaagccatctcacaaataagaaccaaacttttaacagaaaagaaacaaagagaagatgctgaagttgatatgagcaagatgaaacctcaattagacaaaatccttgctgataacgtcgacttgagaagagaaagcgaactcagagaaatcaacgaaagattgactaacaagagagttgatgaagatgaagctttggataaagaaagcttggaagtcaagaaaaaactcatcgatgaactccaatctgaaaaagcgagattatttattgtcacagaaaaggatccaagattacaatcattgagagaagataacgaaagattcttgaaggaagttaagcaagctgaaaagaaggttgatgatgctaattacaaagttcttgaaactgaaactcgtcaacttttgagtgttagaaagaaggatgaggatcaagaagctagaaagaagcttcaagctgaattagacaaatggagagatcaactcgatgatactaccaagtctaatgaattgaaagtcgaaan

SEQ ID NO: 4027 - DNA, 1502 bp, Glycine max
  misc_feature (26)..(26): n is a, c, g, or t
  misc_feature (65)..(65): n is a, c, g, or t
  misc_feature (75)..(75): n is a, c, g, or t
  misc_feature (88)..(88): n is a, c, g, or t
  misc_feature (120)..(120): n is a, c, g, or t
  misc_feature (163)..(163): n is a, c, g, or t
  misc_feature (187)..(187): n is a, c, g, or t
  misc_feature (207)..(207): n is a, c, g, or t
  misc_feature (212)..(212): n is a, c, g, or t
  misc_feature (228)..(228): n is a, c, g, or t
  misc_feature (259)..(259): n is a, c, g, or t
  misc_feature (274)..(274): n is a, c, g, or t
  misc_feature (301)..(301): n is a, c, g, or t
  misc_feature (305)..(305): n is a, c, g, or t
  misc_feature (309)..(309): n is a, c, g, or t
  misc_feature (351)..(351): n is a, c, g, or t
  misc_feature (470)..(470): n is a, c, g, or t
  misc_feature (474)..(474): n is a, c, g, or t
  misc_feature (485)..(485): n is a, c, g, or t
  misc_feature (544)..(544): n is a, c, g, or t
  misc_feature (633)..(633): n is a, c, g, or t
  misc_feature (1119)..(1119): n is a, c, g, or t
  misc_feature (1194)..(1194): n is a, c, g, or t
  misc_feature (1286)..(1286): n is a, c, g, or t
  misc_feature (1394)..(1395): n is a, c, g, or t
  misc_feature (1405)..(1405): n is a, c, g, or t
  misc_feature (1421)..(1421): n is a, c, g, or t
  misc_feature (1424)..(1424): n is a, c, g, or t
  misc_feature (1431)..(1431): n is a, c, g, or t
  misc_feature (1444)..(1444): n is a, c, g, or t
  misc_feature (1451)..(1451): n is a, c, g, or t
  Peptide Sequence Number=SeqID_7830
  Probeset Number=SeqID_13806
tctcgtgatcttacatgacatatatnacagtgctctcactgccgacacacacattaagatagtanagcacgcgtntctcacaattacnacagaaatataaatatcttggatgagcggtantatataagctttagatgactcgtcgatcgtagactatctgacnccgagcggagctcacaaacgacgnaggccattagacataacatnaatantacaactatgtcacancaagcgagatacgagatcgcatgttcatatnaatgagagtagtatntacattcaagatacgagtaagattagnctcnaatngacgctcacgccgtcgttctcaacacatatcatagtagcgtnaacactctgtatactaagtcgacacactcgcgattggacaggcatgcgccgatagaggtgacgtgaactgtaacgcaccaccacacatccaatagtcagatgcgccctcacattcaccnccanattgatataanattgctagcacgcgaattatcagtgtctgccggacagttgtccacacacatgtgagganatgtgcttactctgtaactagactcacctcctgtcggagataactatcaccatactccacacccagacagtattcttccagttcgatanaggcgagagcaggtcacgactctggttcggctcatagcggggattaagaatccatcacataaccatccgccagtctcggcgagaccgcgcgccctgctgcatggaggcgtctaggatatcaagttccgatagcgtgtttatagatatatacatggattatgaatcaattacctaggtggacaaagcagaaccgcgccactctccaagtgagataccagagggataaatcatccaagatcttatcttccttcctctaccacgtatgtggcagcagtcgctggcgagcacgccaccacaactggacaaggagggctagagatacaagtagaatcgtcagatgggaacgatcatgttacatggaaggtgatcattagatcgtgtcgagaagacttagtagggtgtgtctaagatatattcttctgtcatagtggcctccatgatatatatgctcacctcacaccgtaactaataatactcatatattcnagtttctatccttatctatttctttctgtgcgaataagagcaatgaaacaataaactcgtaaggttggcggactntattctttcttttattaattttattattctagaagttctgaggctcatcatataacaaaataattttctactcctaccttatatgtctatantctacaactctcgggagaggagaggcccattaacctcttgctactcttccgtaaggggtggcgccccaccctccactccaactcagaattgattaatggtattatatnnggcccatttnttcagtgggggagtantanatttgcngtctcacactcgngaaccgntgcgcggctcgctgcatataaaaaaaaaaaaaaaaaaacaaaccacacccc

SEQ ID NO: 4028 - DNA, 1600 bp, Glycine max
  misc_feature (1)..(1): n is a, c, g, or t
  misc_feature (10)..(10): n is a, c, g, or t
  misc_feature (77)..(77): n is a, c, g, or t
  misc_feature (81)..(81): n is a, c, g, or t
  misc_feature (90)..(90): n is a, c, g, or t
  misc_feature (119)..(119): n is a, c, g, or t
  misc_feature (135)..(135): n is a, c, g, or t
  misc_feature (163)..(163): n is a, c, g, or t
  misc_feature (281)..(281): n is a, c, g, or t
  misc_feature (296)..(296): n is a, c, g, or t
  misc_feature (318)..(318): n is a, c, g, or t
  misc_feature (320)..(320): n is a, c, g, or t
  misc_feature (336)..(336): n is a, c, g, or t
  misc_feature (346)..(346): n is a, c, g, or t
  misc_feature (384)..(384): n is a, c, g, or t
  misc_feature (406)..(406): n is a, c, g, or t
  misc_feature (469)..(469): n is a, c, g, or t
  misc_feature (526)..(526): n is a, c, g, or t
  misc_feature (598)..(598): n is a, c, g, or t
  misc_feature (651)..(651): n is a, c, g, or t
  misc_feature (714)..(714): n is a, c, g, or t
  misc_feature (820)..(820): n is a, c, g, or t
  misc_feature (852)..(852): n is a, c, g, or t
  misc_feature (857)..(857): n is a, c, g, or t
  misc_feature (859)..(859): n is a, c, g, or t
  misc_feature (863)..(863): n is a, c, g, or t
  misc_feature (884)..(884): n is a, c, g, or t
  misc_feature (912)..(912): n is a, c, g, or t
  misc_feature (926)..(926): n is a, c, g, or t
  misc_feature (937)..(937): n is a, c, g, or t
  misc_feature (966)..(966): n is a, c, g, or t
  misc_feature (977)..(977): n is a, c, g, or t
  misc_feature (991)..(991): n is a, c, g, or t
  misc_feature (1000)..(1000): n is a, c, g, or t
  misc_feature (1022)..(1022): n is a, c, g, or t
  misc_feature (1024)..(1024): n is a, c, g, or t
  misc_feature (1026)..(1026): n is a, c, g, or t
  misc_feature (1028)..(1028): n is a, c, g, or t
  misc_feature (1030)..(1030): n is a, c, g, or t
  misc_feature (1041)..(1041): n is a, c, g, or t
  misc_feature (1045)..(1045): n is a, c, g, or t
  misc_feature (1056)..(1056): n is a, c, g, or t
  misc_feature (1086)..(1086): n is a, c, g, or t
  misc_feature (1109)..(1109): n is a, c, g, or t
  misc_feature (1111)..(1111): n is a, c, g, or t
  misc_feature (1113)..(1113): n is a, c, g, or t
  misc_feature (1117)..(1117): n is a, c, g, or t
  misc_feature (1132)..(1132): n is a, c, g, or t
  misc_feature (1151)..(1151): n is a, c, g, or t
  misc_feature (1163)..(1163): n is a, c, g, or t
  misc_feature (1189)..(1189): n is a, c, g, or t
  misc_feature (1193)..(1193): n is a, c, g, or t
  misc_feature (1211)..(1211): n is a, c, g, or t
  misc_feature (1217)..(1217): n is a, c, g, or t
  misc_feature (1235)..(1235): n is a, c, g, or t
  misc_feature (1241)..(1241): n is a, c, g, or t
  misc_feature (1374)..(1374): n is a, c, g, or t
  misc_feature (1383)..(1383): n is a, c, g, or t
  misc_feature (1397)..(1397): n is a, c, g, or t
  misc_feature (1416)..(1416): n is a, c, g, or t
  misc_feature (1422)..(1422): n is a, c, g, or t
  misc_feature (1449)..(1449): n is a, c, g, or t
  misc_feature (1462)..(1462): n is a, c, g, or t
  misc_feature (1481)..(1481): n is a, c, g, or t
  misc_feature (1506)..(1506): n is a, c, g, or t
  misc_feature (1522)..(1522): n is a, c, g, or t
  misc_feature (1524)..(1525): n is a, c, g, or t
  misc_feature (1527)..(1547): n is a, c, g, or t
  misc_feature (1549)..(1551): n is a, c, g, or t
  misc_feature (1553)..(1553): n is a, c, g, or t
  misc_feature (1555)..(1565): n is a, c, g, or t
  misc_feature (1568)..(1568): n is a, c, g, or t
  misc_feature (1570)..(1571): n is a, c, g, or t
  misc_feature (1576)..(1578): n is a, c, g, or t
  misc_feature (1580)..(1580): n is a, c, g, or t
  Probeset Number=SeqID_13807
nagggagcgnaagtactgtctctcattgcgtacaaagagaggatgtagttgtgtcataatatatatacatctcatcngagngagcagatncattgtcctaggtgggccactactactantatatatgttcatatnagcagcgcgcgcgcgtggcggagcgcanttctctctataatatatactatatatcttacatcctcgcacgactccgttgtggggggcgtcgaagtcgctcatatatttatgttgtggttgcgcggggcggcggcgtcgggggaggnatcgcaactagtatntattatcttccacaaataacananaccacgtagagagagngtgctattgnacgcatagagactctatgtcttctcacgagatgtactncttaactaactgccaacaatantacatattaagataatctctcttcagaagagatatgacgagaggcgaatgacacctcgtcatngcgtagggggtgttgatattatgttatacttatctctcttcctagcaggaagtgagnagtggagttcgagcctacatataccttgtggggtggggcataccatgcgagctcgtgccactcagtacatangacgacctgaagtagctagaatgacgaacatcttggcagacgtgcgttcgtcnaggcagagaggctctctctacacttaaataaagatggtgtgaggagcggacagcatcgcgacncattcattgtctttctacacctatctgaactcgaaggcacgggcgtgtgcggtctgggctgcctcttacgctcacttccatatcagagagatgcgaggtatagagnggcgatgtcttccgtatacgtaccaagctagnacagntnagtntgcatgtcctcggtgttgcgnttgacctaacgcgggcgtggttggtggngcctcctgcccggnagacgagaacnttacacagcatgtaattctctcattcctngcaggtgctcngctcacaggcatgngtaccaatngcatacacactctctgtctgtncntncntnatacaaatagnatgngaatgcagagntcgcgagcgggagagtcgtgtagctaccantcagacatatatctatctgaatngnangtgnaatcgggaatgacangattgctacgaagcagcancgatctcttctntgtccttcgcactctctcaactatcncaancgtggctcgagagacggngccgancaagatatcataaaccanacctgnatatcagacatacacagctggcgtgcaacagcgcactcgcgcgctcgcaggctctagcgctcgctcgctactagaatattacgcgcatcgctctgcgtgacgcgctcagagatgcgcgccgacgcgctgacgngcacatctnctcctgtccagctnctctcgcgcgcgtgcatgnccgtanctacacgtctgctgaggcacgtctgtnccgcctacacgtncgcgtaccgatgagcagtncctacccgatctctttgtgaagggntctcccgtgtcggctntnngnnnnnnnnnnnnnnnnnnnnntnnncntnnnnnnnnnnnggngnnggggnnngngggggggcccccccccatac

SEQ ID NO: 4029 - DNA, 690 bp, Glycine max
  Peptide Sequence Number=SeqID_7831
  Probeset Number=SeqID_13808
caacctttaactacatttaaacgtcctttaatcttttaaaaaattgtcctaaatatattaaccaagtgactaaacaatcgataacactacttaatcgtcgttaactttgttgtatttttttaacaccacttaatcgtcgttaactttgtggtattttttaacgctacttaatcgtcgcatatttgatacctaaaatctgmttttatcaaccttttactacttttaatcgtcgtttaacccttttaaaaatagttaaattatataagtgactgaaccgttaacactacttaatcgtcgttaattttattttatgttttacactacttagtcgtcgaatatttttttaacaaaaatrtgtttttatcaacctttttaccacttttaatcgtcgtttaaccctttaaaaatagtttaattatttaagtgactgaaccgttaacactacttaatcgtggtttattttaatttattttttacaccacttaatcgtcgcattattattactgaaatctgtttttttttaatcaaccttctactacatttaatcgtagtttaatcctttaaaccatgtttttaaaaatattaacgaagtgactaaacgatcgttaacactacctaatcgtcgttaactttgttgtatgtatatttttaacactacttaatcgtcgcatatttttataagtaaaatct

SEQ ID NO: 4030 - DNA, 454 bp, Glycine max
  Probeset Number=SeqID_13809
cggccgcattgggatggagctgtacgtccactggactccaaacaccgatgagcacttgcacacgctctgtatctgatataagggggctgggcggagcgagaatcccatacactactaaagcgccacctttcaccgcgtgatccctaacttaatgtgacacggccgctacttgaccggcggcaacggcacctgaggctagtcaatctacggcgccaagttcgacgacgagaacttcatgaagaagcgcactggtcccggtatcctctccatggtgaacgcctgtcccggaaccaacggatctcagatcttcatctgcacgacgaagacggcgtggcttgacggaaagcacgtcgtgatcggacaggtcgtcgaggggatggacgtcgtcaaggagatagagaaggtcggatccagctacggcaggactcgcaagcctgtcgtcgtctccgactgt

SEQ ID NO: 4031 - DNA, 546 bp, Glycine max
  Peptide Sequence Number=SeqID_7832
  Probeset Number=SeqID_13810
aaagaaatgagacatatcggatacttattaaattctatggaatacttataactcgtatttttcagttttttgattttttttactaatatactacaatgattagataaataataacatttcgttatttttcactataattaaagttgaattatgaaacattgatgcgtttattctaattaatgtgatttcatgttaatattatattttataatgccagtgttatcaatggcgcataaccaatattctgccatacaaacactccattgtggcctatggcgctgccgaagcgagccttccttcataaattgcctatggcagttggcaaaagatccgccagaccattcccccatggcaccgccagttaacaataatgcttagccatacggcgtcatagtttttagaattcacattgttcacacaatcataatcatgtcatctttgatatgattctatatacgtggttcctaaatcaggccaacacatctctgtagtctcttgaaatggtaaaggaatcatagacccctccatcactacttctcttgtact

SEQ ID NO: 4032 - DNA, 562 bp, Glycine max
  Probeset Number=SeqID_13811
ggaatttcgatgctcagtcatctcttttaccattctcttctctcttgctcttgcaggagagagccatgtccatgcatcgctacctgaggaagattattgggaagctgtttggccaaacactcccattcccactgcactgcgagagcttctaaagcctctccctgcaggtgttgaaatcgatgaactccctaagcaaattgatgatacacagtacccaaaaacattcttctataaagaagaccttcatccaggcaaaacaatgaaagtacaattcaccaagcgtccctatgcacaaccttatggtgtatatacatggttaacggatattaaagacacctctaaagagggatatagtcttgaagagatatgcatcaagacagaagcgtttgacggagaagagaagttctgtgcaaaagccttgggaacacgtattggttgtgccatttcagagcatggaaagaacattcgagatctatcaagttcctttgtcaataagcaagagcaatacacttgtgaatgagcgctgattcttggagacaaagcacggatatgtcataggcta

SEQ ID NO: 4033 - DNA, 1409 bp, Glycine max
  misc_feature (1)..(42): n is a, c, g, or t
  misc_feature (51)..(51): n is a, c, g, or t
  misc_feature (54)..(55): n is a, c, g, or t
  misc_feature (60)..(61): n is a, c, g, or t
  misc_feature (63)..(63): n is a, c, g, or t
  misc_feature (70)..(71): n is a, c, g, or t
  misc_feature (90)..(90): n is a, c, g, or t
  misc_feature (98)..(98): n is a, c, g, or t
  misc_feature (205)..(205): n is a, c, g, or t
  misc_feature (304)..(304): n is a, c, g, or t
  misc_feature (311)..(311): n is a, c, g, or t
  misc_feature (324)..(324): n is a, c, g, or t
  misc_feature (336)..(336): n is a, c, g, or t
  misc_feature (504)..(504): n is a, c, g, or t
  misc_feature (682)..(682): n is a, c, g, or t
  misc_feature (698)..(698): n is a, c, g, or t
  misc_feature (772)..(772): n is a, c, g, or t
  misc_feature (876)..(876): n is a, c, g, or t
  misc_feature (966)..(966): n is a, c, g, or t
  misc_feature (1177)..(1177): n is a, c, g, or t
  misc_feature (1205)..(1205): n is a, c, g, or t
  misc_feature (1238)..(1238): n is a, c, g, or t
  Peptide Sequence Number=SeqID_7842
  Probeset Number=SeqID_13812
nnnnnnnnnnnnnnnnnnnnnnnnnnnnnnnnnnnnnnnnnnaaaaaaaanggnnttttnnanccagaanntaaggcaagatgggtagantatcatancggcacccaccaaacagcacgaccacagaattctttcttatatctcgtaaggttaaccgctcgtccgtcgcatctcgcccgcaagacagctacacctcacacacgtnttatatgtttgttctgacgtatcggtaggcccgtcgctgagcatactgtagtcgcctatcgcgactacgtgtcctgccgcgacacaggctgtgattcgnctccacncccacaagtccanctccatccatcnacgcccttcgcgctcgatatatccgcagtctccgccgcctccccgccgcccagcacacccgcatctctctctctatacccacactccaacatcttgtgcgttccttgtcttctcccgcgctccggtcgccgtctcactccacgacccgacctgtcgctgtgttgctcnctcgtgcttgtgtcgcgcacgtgctcagtatagcatactcactttatatggtagtcgtcgttgtacagataatactggtacgggacgtgtagtggtgatctgtgtagaggatgattatagaaaaaagatctcagatcacaccagcactattaaaagaactacgcacacagatacacanatcgacttcactcacngctttcgctggaccgcgcccctcgcgtcacggcactcctctgtatgctcgcccacgtcaacacatatgatgtgnatgagcgtgctcgatgtgatggatagtcgtgagtgcatgtcgggaccggcgccatgctactatacaatttctctacaccgggtccacgacgtccgtcgtttagntcaatacattcaatagatattagttgttaaacttctattacataagacacataacatacgactaagttcacaacttaacacgagcgcganacgtgcgagtcattgcgctggatgtgagatggagcgcactaaacgagtatagatataagattcgatacgtacataagcgcaggctacgtctacatagtgtgagctgcagtgaccacgcgcttgcgatgcgcacgcgttgtgcagtccgctgcgcctgacgtcgatcttgtatcggcgatggatgaagaagcagacattgaagcatgacaangagcagaaacgacgctgacagagagccngagtcacgcctatattgacgccgcggcgtctcntgtcaatccgctctcgagtggtgtctctgtgtgttagatgtctcattataattactaaatactgatttacataacatatgaagtcgttcctagtctcatcaatatagtcatcaccgcgaatccgctctatgcatctctatgctcaccgcgcttacgtgaaacactgctact

SEQ ID NO: 4034 - DNA, 410 bp, Glycine max
  Probeset Number=SeqID_13813
agacgaaaaaagcgtgcgagaacctgtttagaaatacaagggggtgagaatatggggggggataaaggacaatggggggggggatataacaagagtttgactcccggtagactttaatgagccgatatcatccctacaaaaagggggtgaggacttggagtactattatcttgtggatcaagcttatgaggacggaaaatgaggaaacggggtccttcgggcactttatgttgctgactttgcagtttacggatatgcgtgatctgaaggtggtaattggaaaccctttaatcctttattaggagaaacctacgaaggtgatgaccccgacaaaggaattcgctgcttttccgagaagggcaggcaccatccaactctgattggctgccactgggaaggaagaggatgga

SEQ ID NO: 4035 - DNA, 1380 bp, Glycine max
  misc_feature (12)..(12): n is a, c, g, or t
  misc_feature (16)..(16): n is a, c, g, or t
  misc_feature (154)..(154): n is a, c, g, or t
  misc_feature (232)..(232): n is a, c, g, or t
  misc_feature (325)..(325): n is a, c, g, or t
  misc_feature (335)..(335): n is a, c, g, or t
  misc_feature (980)..(980): n is a, c, g, or t
  misc_feature (1147)..(1147): n is a, c, g, or t
  misc_feature (1235)..(1235): n is a, c, g, or t
  misc_feature (1295)..(1295): n is a, c, g, or t
  misc_feature (1310)..(1310): n is a, c, g, or t
  misc_feature (1316)..(1316): n is a, c, g, or t
  Peptide Sequence Number=SeqID_7843
  Probeset Number=SeqID_13814
tgggggggggcntggngtggctgtggtgttggtcctcttgtggtgttcgcgccgctggccgtgctcgctgcgtctcttcttctcttctcccttccgtgccgttcgtgtccgtggtttgtgttggttgggctggggggggcggctgtgctcctcnacgctgttactgtgtgtgccgcggcgcgggctggccggaggacgagggaggaggagaggcgggtgtgcaggcctattnttccttgcatgcgcactagttgagaactaggtcctctctggctatagcttacccacacgtactcgacgaagacattacactagtaggcagggnatcgacggcnctcctcgccctatcctccctttcacacgcacttctgcgccgggtgcggcgcctatagtgtggtgggtgtgggtgaggagggtaggtgagagagataatactaatgaattagaatattggtgtgagattctacgatgcgagttaagtagaaataaaaataactgattatgaaagtgtggggcaaacacgagcctaagatgtgaggtggggtacgtgtgagcatacgccttcaatcgtgggtgaactccgagctatctctggctttctacgttgtccgtggtcaccgtccatcacaaccgacatcgttctcgtatgctctccacatggctactataatatgagtgtacggtagaatgagtgaactcatagtccatcgacgaacacgacacatacacatgaacaaacaaggagggcgagaaacgagatatgcagatacatagtaactaccgtctaccacactctccacccacgaagctccacaaagtttgcgtacgaaagcacgcacagagcatctgtggtggatgtctagatagatgttcacttagttttgagtgacttatctcgtccacaatgaataatcttaacggcgcgcccatctccgctacgacattctgctctagcacctcaggtcgactccgatatactntcatctatgtgtagcatgctacaccacgaccactgatagtcagctatgaactctggatatctcggataagcactattggagcctaactgcacacgactatatcgatcgtcgtgtatctgatgacatgactgtctcacgccgcagctctcacacctctctgtctatgnacgccactgtaactcaccggtgcgtgcgagtacagatgacctctctcggctaccctcgctgttgtgtcgacgcctttgtctgcgcgtncgtccctctctccatcaatcgctgatcgctactatcgctatgcatcctactcgtgctcgntctgtctatcatctntatgtncacgccacgttgtgcacgactaggtcagcacgagtagtgcgtggctcgtgctgatgtgatgttg

SEQ ID NO: 4036 - DNA, 1631 bp, Glycine max
  misc_feature (14)..(14): n is a, c, g, or t
  misc_feature (20)..(20): n is a, c, g, or t
  misc_feature (23)..(23): n is a, c, g, or t
  misc_feature (25)..(25): n is a, c, g, or t
  misc_feature (27)..(27): n is a, c, g, or t
  misc_feature (30)..(31): n is a, c, g, or t
  misc_feature (33)..(33): n is a, c, g, or t
  misc_feature (39)..(39): n is a, c, g, or t
  misc_feature (53)..(53): n is a, c, g, or t
  misc_feature (56)..(56): n is a, c, g, or t
  misc_feature (60)..(60): n is a, c, g, or t
  misc_feature (69)..(69): n is a, c, g, or t
  misc_feature (72)..(73): n is a, c, g, or t
  misc_feature (75)..(75): n is a, c, g, or t
  misc_feature (80)..(81): n is a, c, g, or t
  misc_feature (93)..(93): n is a, c, g, or t
  misc_feature (105)..(105): n is a, c, g, or t
  misc_feature (120)..(120): n is a, c, g, or t
  misc_feature (149)..(150): n is a, c, g, or t
  misc_feature (179)..(179): n is a, c, g, or t
  misc_feature (187)..(187): n is a, c, g, or t
  misc_feature (198)..(198): n is a, c, g, or t
  misc_feature (201)..(201): n is a, c, g, or t
  misc_feature (203)..(203): n is a, c, g, or t
  misc_feature (229)..(229): n is a, c, g, or t
  misc_feature (235)..(235): n is a, c, g, or t
  misc_feature (364)..(364): n is a, c, g, or t
  misc_feature (379)..(379): n is a, c, g, or t
  misc_feature (389)..(389): n is a, c, g, or t
  misc_feature (625)..(625): n is a, c, g, or t
  misc_feature (713)..(713): n is a, c, g, or t
  misc_feature (1088)..(1088): n is a, c, g, or t
  misc_feature (1110)..(1110): n is a, c, g, or t
  misc_feature (1222)..(1222): n is a, c, g, or t
  misc_feature (1299)..(1299): n is a, c, g, or t
  misc_feature (1334)..(1334): n is a, c, g, or t
  misc_feature (1488)..(1489): n is a, c, g, or t
  misc_feature (1535)..(1535): n is a, c, g, or t
  misc_feature (1613)..(1613): n is a, c, g, or t
  Probeset Number=SeqID_13815
aatatataaatacnaagagnttntntntanntnttcttnatatactgtactgngcnaagncgggggacnctnncnacatnntccatttccacntgcggcgcgtcngcgctgtgagtgtanccccccccctcccctccccctcgtccgcnnccccccgcacagactaatacccgacgagntgctgtgnatatatcaaanaananagaacaccaacgtgcggcgtgctacnatatanattgatgatgtgatgcgaggcaggtcgtcgaacggtgtttactcctacatacatatgcgctatgtacacactcatgtcgtcactctcatgtatatgatctcgtggtatgtttgatttgttgtttatttntgtgactccacaganatgtaccgcntatactatacaacatcacatctactgttgcatagtggcaataagagagcgacagtcgcgtggcagctacaccactcacacagataatattgcgaccaccagctaccaccacacacacatcgagagagacaggaagcaaaacaatatagaaagagacatgtcatacaacatactgtgccacgagtgcggatgcaaactcaataatatatactcacaccacatatagacacgcgcatntatgcgcgcacacccgcgtcattattataatatgcatatatggtatgttgattactcgttatcattctgtgtattgcagatatagagnagatagtgcgagatatgtgtagctcgaactgcatctctgactcccttactctatcataacatcaacacggtgcgcagactcgagcagctctctgcaaacacacactatatcatgtaggagctagactaacgagaagacactgcgagcacacagacagatacacgagttaatgattgttgatgacggactacggcgcagcatatgttatcacttcttacatctctgcgttgtgcttggttgtctcatcgtcgtttctctaatcactcgtcatgtgcaggtgagtcaacattagagtcgacatatacatccagacagatcgctgctacagtgattgagatgagatccgatcgcatataatgtgtgatgtgcgtctcncatcgcaagtgcatatgctcancacgagcacgcgagcgacgacatacgagcgcgcgctatctacttacggctatcacacgtagtctcgaggaggaatcagagataggtacacaccgaacgggtgacgtgtgagngtgaagtccacactacgactagacttgtacaacgtgactctacatactcacgtactacagtgctaggacgatatgantgctatatactctccgcatgactacttcacctatnactctatacttagatacttcgatgcctcgtggtgtctgtccgctgatagaaacagagcatgagacgctcagaacgagctatcagcacagtgacgcgtcctgtgcgcaaagctcagagccgcgatagcgagagaacactccatcacatcacacannacaccactccatcggtgatcacggagactgattgtacccgatcgcnattcgcgcacacgcgagtacactgacacgcgcgacgtgcgtcgctatatctacccgctctcgtatatatgtatgatcncgatctacttgactcgcg

SEQ ID NO: 4037 - DNA, 541 bp, Glycine max
  Peptide Sequence Number=SeqID_7852
  Probeset Number=SeqID_13816
gttgccatgccaccctaaatctggtgaccttgatggtacattatctggtgactgttgatccaactctaccgcatgcgctgaactaccagcgaatctatagaggtggagatagtcagatctcattcactgcagattggccatgctggatgttccagggattctggttactgaggcattgggcttaagcatctgcgtaacggctcaagaatgcgcatcattttctgtgggccaaccaacctacttacgcgattcatttccatggtgcaccctacccaccatactggccattgaattacttgatattacctttgtggagcaccagaagagcatggagaaggacccatagattaagaaataccctgatggtgcttttgatcctttgggatactataaggaccctaaaacattccatgaatgcaaattcatagaactgaagaatggacgtttcgttttgatgtcttatgctagatactgagctcaacattcagcttattcatggactgaactattgaagatcttgactgatcatctgaacgatcca

SEQ ID NO: 4038 - DNA, 450 bp, Glycine max
  Peptide Sequence Number=SeqID_7853
  Probeset Number=SeqID_13817
aagatctcagcgccatggattctgctcatgacgacggctttgcgctggagatggcggagctgccgctggagacgcggtgcccgccgttcgcgctgcgccagtactccggcttctagctgccggaggcggtgctggcgcgcggtctcccggcggcgcgcgaccggttcgcgccgaggccggacgacgtgctcctcgccagcttccccaagtccggcaccacgtggctcaaggcgctcgcctacgccaccgtgcaccgcgccgcgcacccaccgtccgctgacgaccacccgctcggccgccgcagcccgcacgactgcgtcccgttcctcgagatcagcctcgcgcgcgccgacgacgtgggcgccgcggcggccgagctcgaggcgctcccttccccgcgcgtgctcgccacgcacctgcccttctccctcctccccgagcgcatccgga

SEQ ID NO: 4039 - DNA, 1903 bp, Glycine max
  misc_feature (47)..(47): n is a, c, g, or t
  misc_feature (93)..(93): n is a, c, g, or t
  misc_feature (100)..(100): n is a, c, g, or t
  misc_feature (153)..(153): n is a, c, g, or t
  misc_feature (219)..(219): n is a, c, g, or t
  misc_feature (221)..(221): n is a, c, g, or t
  misc_feature (233)..(233): n is a, c, g, or t
  misc_feature (256)..(256): n is a, c, g, or t
  misc_feature (261)..(261): n is a, c, g, or t
  misc_feature (355)..(355): n is a, c, g, or t
  misc_feature (408)..(408): n is a, c, g, or t
  misc_feature (664)..(664): n is a, c, g, or t
  misc_feature (1397)..(1397): n is a, c, g, or t
  misc_feature (1492)..(1492): n is a, c, g, or t
  misc_feature (1653)..(1653): n is a, c, g, or t
  misc_feature (1670)..(1670): n is a, c, g, or t
  misc_feature (1772)..(1772): n is a, c, g, or t
  Peptide Sequence Number=SeqID_7854
  Probeset Number=SeqID_13818
tatcatgtctctgcggcatcatgcccggtcgcacgcatacgcacgcncgacaacatcgcgtgctgacgtctcatcctctagcacgtctcgcancggtacngcactctctcaagacatcgctcctaccatatgtacgtacgatcctgcgtcgtnctctgacacattcacactacactcgcacgacgacgtcattcactgttcatacgacatcccacgctncntgatgtatctcnatcttcatgatgctgcataccgnactanttctacgtctctcgttctcacgtcttcgagacatctcgctatctgtatatcgcctactcacactccgccacgtccacacacatcacccataccnctcaacccaattctacaaccaacgctacgagcgtacgtccgctctgatcaatntgtccacgctccatcaatctcagtcttcgtagtccgcttcacgcgatctctcgctatcttcgcaccgtcagtctgtctctctctccgtcggtctctccacgagcgtccgcattcgtcacctcgcctgtcccacgcgtgtaatcaatctctctcgcacttccatcacgtcaccccacctaccctctctcatctcacacactttcacattccacatgcgctacgctgagcagctcacacctcctccctccgcgctatnccatattgcgtctctttcacatgcaccgtacatttgacacgcggctctctccccacatcactctattcggcatcccgctcctccaatcacattcgtctgtgccatcaacgcgctgactacctcgatgcatctctgtatcttcatcacgcattctcccgtcactaccctcgctccctccacactcacactctcccgcgtccgaccctccgcttccgacctacacctcatcccgcctcatataatcgcaacgttacactgccgccctacgcctacccacatctcattcactcgatctcacgtctcaccgcctcacatactcctccgcactatattccccgccctctcgtcgctgtgggatccaccagcatcacattccctccaactacaccgacgcccccctctgcacttcaactccgccggtcgcgcctctcgtcgctctcacgcccgcgtccgtgccaacaccaatcatctgcgcaccgtcgtcacatcctctgtctcctcctcgcctctccccgtcgccccgctattacactcttcatcacatactatcacatacatctcgcaactctcccacccatcgcgccccgtttcgcgcgcctcctgccccgatccacctctcctcggcgtcctcatctctcctcaacgacgacctctcgcgcctccaacgctcgcgctgttggcagcgcacgacccaccgtctccacctctcttacagctacccgcgcctaccagnacgtgacacacatcacactcacacacccgatcctgatgcgatcttgttgagtctcctccttagcattcgatatcatccatgtaatctggtttcgnctatgacttccctgttgtattatactctcctgctctctcccaacctctcaatttatctctcttgggcggcgcatagacactacgctagctcgctcctcgtccgtttcagcacgatatctatatacggctgctctattccgtattacatcaaccgccgcagntccgtcgctcgctgtcngtcctgtgtggagacaataatctcttcctctccccctctcgcttctcactctctcctatttctatgggagaaaaactctcaccacatcctcttctccactcnccgccagcacagcaccctccctccctctcctcacctccacgcaccctcgttcctcgcccaacgcgtgataccagtttgttgttgttgtgtgcaactgtgttctcttctccattccactcgcgctcctccct

SEQ ID NO: 4040 - DNA, 553 bp, Glycine max
  misc_feature (510)..(510): n is a, c, g, or t
  Probeset Number=SeqID_13819
acttctcatacaatacaagaggtcacatatacagaccttctctccctctctctctttctctctcaacattctaccttcttttcttttcctcttttcacaaccatttgtgagattcctccaatgttcttctctcttccattggattgtacagattcccagctacactacacacatcaatcccttcaattctagttgctgtgggattgtttgtttatgtgaaaaaattttaaggactgtaaaagacaaaacttttctgggtttattggtttctgctttatatttattttttcttctgcaaactatcattctgggtttgctcataaaacaaagcctttcaagataactgttgtatttttcagaaaaaaaatccatttttcttagcttatttgtcaaaagaataattttttttctttttcttcctcatttttctgcaaattttcttcatattcctttttattaatttgcggaaaagattgagacatgggcaagcaaggaccttgctatcactgnggagttacaagcacgccactctggcgcaatggaccacccgaga

SEQ ID NO: 4041 - DNA, 1511 bp, Glycine max
  misc_feature (294)..(294): n is a, c, g, or t
  misc_feature (327)..(327): n is a, c, g, or t
  misc_feature (367)..(367): n is a, c, g, or t
  misc_feature (441)..(441): n is a, c, g, or t
  misc_feature (443)..(443): n is a, c, g, or t
  misc_feature (466)..(466): n is a, c, g, or t
  misc_feature (491)..(491): n is a, c, g, or t
  misc_feature (495)..(495): n is a, c, g, or t
  misc_feature (537)..(537): n is a, c, g, or t
  misc_feature (552)..(552): n is a, c, g, or t
  misc_feature (667)..(667): n is a, c, g, or t
  misc_feature (908)..(908): n is a, c, g, or t
  misc_feature (1004)..(1004): n is a, c, g, or t
  misc_feature (1011)..(1011): n is a, c, g, or t
  Peptide Sequence Number=SeqID_7855
  Probeset Number=SeqID_13820
ctaagagagacgagtggcgatacgatagagaagagacacacgaggaggagagcgttagtagtgtagtgttgtatacagttgctacagcgacaaggagttatctggacgtactcagatcatcgtgtctcgattgtatgtgctgaatattaccagcggtacgcgcgcgcgtagatgaacggacttagagatatagaacagtgtgtgcatacgtgatcgtcatacgtgctcatagctagaggcgatggctgatgtgatagtacgtattaagtccgttcgagtctcagcgagatgtangagtctcgatgtctatgtgcacatatacgtacncgcttcgtgcgtgcgcgtgattctctgcggacagaggctngagaggagtcgatatctagatcggtctatgctacgcttgtcagtacatatcaatatagactatatgcgtgagtngngagtgtgcgtcacttcatacatngatgtgatagactgtactcgatcgncctntgcatctgtcgctactgcatctatcactcgtgtgtctagtanttgaattccttcagngtcgcgctgtctctagaatagaatataagttggtcatctgagtactcagtcatgtctgatgtgacgtgatgcgttagtcgtgtgtatagatacacagatacacgacgcgcgatgnagttcgatcgtctgtcttagtctcttgtctagagcacgctgctcatcaaagacgtacgagtagtgaggtacgataagataatatacacgctcgctcgcagcaacgagactggtgtgactgtgctcgcatcatcaatcatatcatcatgtatcgtccaaatatattcgctcaagactccagttgtagtatgatggaatcacactataatatgtgtagtgcgttcgtgcgtatgtgtgtgagntgcatcgtatcagcggggtatagtctgtgagatgagcgcgtatcatgagacggcgcgcgctagtgtattatgatggcacttatgattctataactncgctgtnctctctcgcatcgttcgtcctctctatcgatcagcacagcgtgccatgcacgcgcacgcacgcatcgttgcatcgactacatattcacactctactgatgcgatgacagatctgatctatgaattgacagagcgtagtcataattagctctactccactcgcgacttcccctgcgcgcctatcgcgatacgatcatgttgagactagatgttatgacagtatgcgctcagtagtgaagtggaggcgaccgcgcgacgcgagtctattcgatcacatatatatgtctttttcgatacgagtattgtgtcattcggcacagctagagtgatgtaggtagtagataataaacaagtacagacacgttaatttatgagtgaggagacggaggtcctatacgtagtccgcatacgcaccgcagtaagcaagacgactataaggagatagtgagtgtttgtttcattctattttcccactctcatgaatcgacggagcgcgcgtag

SEQ ID NO: 4042 - DNA, 390 bp, Glycine max
  Probeset Number=SeqID_13821
ctgcagcatatagatcaggggtgtacctcataagggaaggtggaagggctcttgaattcatatacagcagtggcaggttgaaaacaaagggaggaggaacaggaggaaccgttgcaacacactactatgctgggggagaattcataatgaagcagaacaagaccaagtcatgcacttgtagccctcaagaagagatttctggtggagacgacaagcaatacacatattggtacctacttcttggcctatacttcactgaccaaggtgagtctataacctgaactattatctacagcatggggcaagctctcaccactttagaggaacgttggaaagaaatttgcaatgacataaaagatggaactcttagcttaggaatcaagacatcca

SEQ ID NO: 4043 - DNA, 1709 bp, Glycine max
  misc_feature (597)..(597): n is a, c, g, or t
  misc_feature (962)..(962): n is a, c, g, or t
  misc_feature (1177)..(1177): n is a, c, g, or t
  misc_feature (1393)..(1393): n is a, c, g, or t
  misc_feature (1439)..(1439): n is a, c, g, or t
  misc_feature (1450)..(1450): n is a, c, g, or t
  misc_feature (1455)..(1455): n is a, c, g, or t
  misc_feature (1709)..(1709): n is a, c, g, or t
  Peptide Sequence Number=SeqID_7856
  Probeset Number=SeqID_13822
tcttccctctaccctcctacctatcttcctcatacgcctccttattttataacttaacttcttctctcgttgttctacttttttgagtattttcccacccgtggatgtggtgagagtccagcgttcttaagtaaactagattgtgtattatctctcggccgtcctgtacagtgaacattcccactatatgatcgactctattcactctatagataatctctttacttatatccgctacatatgatgctactcactgtcaacacggttattataggctcacgcccatataacgcgaaaaccatgctcgcgctgcggtatcaacttactggcattcatataacttcagtcaacatagaccttcgttcatatcgaaacgccctgatacatcaacaactaacactacttctttcgatacagtagcactactagatgaaccgtggatgcttagactagctctctttcaatttttcgatcatgtacaatatacttatggcgtacactaagtgtcaactctgtcacacacattatagcgtcgcaacagttggatgctggtcgcacatgttactcttcacttggtcatatgtcttataaacaccncaatcgcaccatcgactctttcgcttacatattctcgacgacaagaattgtacaccatcggcaatgtgtatttgatcgcacaatttgcctcgtcttacgtatattagctaccaagtatcgcgaactctctaactcatcgcatattactcgtctcgccaacacttagatatacctacgaagtaagcctcgtatgttttctgtataccacacacacgatctattttctatattatcttggtaacacttcgatctgtgcacactgtccggccataatctagttatctattgtcatccactacagaacttggtaatcactactcactcatagtctctagtgataacgttcacgaccgagatctgtacgntcggttagacattccggtcagtcactgttggtgtttgtttctcttagcctgactgaactcttgggaccacaacatattaagacacatatgacacacgttacgtgagagtgttgtactgtcagtattatgtggcgcaccactaacatacaatctctcactgctcgctacttcatattgtaaacacacatctctatgtctatataaactcatatcgnataacatatgtcttatctcattgacatatacatgcgactgctgcctgtgtgcatgcataccattcatatagatataatactgatcatattgtcgtcacgctactacgcgtgcgcatcacgtctgtcacgtcgtacacttactcttatgtagtcatcacaatcatctgtacgtgtgatatgtaatcatctctattcgacaacagtataatctcttancgtcatctctcactcttcagtcgactcatgctaatttgttagtacnaatgtacgcantctcnctctggtataaagcaagtaacatgacttcttctatcttcgatttcgatctaatagacggagtagagcatatataaatagtagcatacatagagtactcatgtcatctatctatcgtactcattaaagcgcggagaagcgctataccatgctacgcgaatgtatccacagcattctctctcatgtccactcgtacgctacgcattgcgactcttctatatgtcacacctacacatctcatacccacgctcgttgn

SEQ ID NO: 4044 - DNA, 1790 bp, Glycine max
  misc_feature (29)..(30): n is a, c, g, or t
  misc_feature (39)..(39): n is a, c, g, or t
  misc_feature (113)..(113): n is a, c, g, or t
  misc_feature (129)..(129): n is a, c, g, or t
  misc_feature (147)..(147): n is a, c, g, or t
  misc_feature (149)..(150): n is a, c, g, or t
  misc_feature (288)..(288): n is a, c, g, or t
  misc_feature (314)..(314): n is a, c, g, or t
  misc_feature (359)..(359): n is a, c, g, or t
  misc_feature (361)..(361): n is a, c, g, or t
  misc_feature (414)..(414): n is a, c, g, or t
  misc_feature (435)..(435): n is a, c, g, or t
  misc_feature (448)..(448): n is a, c, g, or t
  misc_feature (487)..(487): n is a, c, g, or t
  misc_feature (526)..(526): n is a, c, g, or t
  misc_feature (530)..(530): n is a, c, g, or t
  misc_feature (651)..(651): n is a, c, g, or t
  misc_feature (666)..(666): n is a, c, g, or t
  misc_feature (678)..(678): n is a, c, g, or t
  misc_feature (722)..(722): n is a, c, g, or t
  misc_feature (789)..(789): n is a, c, g, or t
  misc_feature (802)..(802): n is a, c, g, or t
  misc_feature (837)..(837): n is a, c, g, or t
  misc_feature (843)..(843): n is a, c, g, or t
  misc_feature (918)..(918): n is a, c, g, or t
  misc_feature (1010)..(1010): n is a, c, g, or t
  misc_feature (1054)..(1054): n is a, c, g, or t
  misc_feature (1100)..(1100): n is a, c, g, or t
  misc_feature (1240)..(1240): n is a, c, g, or t
  misc_feature (1247)..(1247): n is a, c, g, or t
  misc_feature (1252)..(1252): n is a, c, g, or t
  misc_feature (1281)..(1281): n is a, c, g, or t
  misc_feature (1298)..(1298): n is a, c, g, or t
  misc_feature (1312)..(1312): n is a, c, g, or t
  misc_feature (1434)..(1434): n is a, c, g, or t
  misc_feature (1443)..(1443): n is a, c, g, or t
  misc_feature (1485)..(1485): n is a, c, g, or t
  misc_feature (1522)..(1524): n is a, c, g, or t
  misc_feature (1545)..(1545): n is a, c, g, or t
  misc_feature (1550)..(1550): n is a, c, g, or t
  misc_feature (1556)..(1556): n is a, c, g, or t
  misc_feature (1606)..(1606): n is a, c, g, or t
  misc_feature (1641)..(1641): n is a, c, g, or t
  misc_feature (1671)..(1671): n is a, c, g, or t
  misc_feature (1676)..(1676): n is a, c, g, or t
  misc_feature (1684)..(1684): n is a, c, g, or t
  misc_feature (1700)..(1700): n is a, c, g, or t
  misc_feature (1702)..(1702): n is a, c, g, or t
  misc_feature (1709)..(1709): n is a, c, g, or t
  misc_feature (1718)..(1718): n is a, c, g, or t
  misc_feature (1736)..(1736): n is a, c, g, or t
  misc_feature (1750)..(1750): n is a, c, g, or t
  misc_feature (1752)..(1752): n is a, c, g, or t
  misc_feature (1754)..(1756): n is a, c, g, or t
  misc_feature (1759)..(1760): n is a, c, g, or t
  misc_feature (1762)..(1763): n is a, c, g, or t
  misc_feature (1766)..(1766): n is a, c, g, or t
  misc_feature (1768)..(1768): n is a, c, g, or t
  misc_feature (1775)..(1775): n is a, c, g, or t
  Probeset Number=SeqID_13823
cgagtcatgtgcagtatcatcaccagatnnacgttaatnccgataagacacagctctggtgaagcgctatagattatcaagagtgagatagtgaagacgatagacagtagtgngcatgtatagataatntatgatatgagaacgatnannagagatgaggcggcagaatcgcagcacgacgcagagacaggcagccaccagcactcgatgcatatgtctgcgcacgagtggacgagctgtatatattcagttgtcgtgcatgcttctcgtgtgtaagatataatatgnactgtaatgagtcggtcgtgtcagcntgtaacatcgacgatagtacgttatataacgtagtcatgtgagcnantagttgtgatgctcgattgagacgatcgatcgtgtgtggactcagtgactgancgcgcagtgtatatatactcncgtcatctatacnacgcgctgtagagtgcgcgactacagtacggcgaggtantacgtgatggtgagtagagtcgcagacaggcgtgatgtnagtngaagtatgagtgtatgtatgtgtatatagtgtgtgtagcggtctcatgtatactattcgtatagctgatctctcctgatcatatgctctcagtgtcgtatgatctttgttatgtaaagcangcgatcgcgtgaacntatcgccggtgngggttggtgtggtgcgtctgcttgtagttagtgataagttgatnagatatctatcattatattcagtataacatcatctctactctatcatcttatgtacgtcgcacgctntgcaatatagtantattatcacaattacagaagaggatacattcgagntgaganaatcgacggcgtcagctgtcggttgattcatacatctgtgatgacagtaatatgcctgtctcatgtgcatgtganatgtaggcagtagatctcagcgagatgcgtatgtgctggcagtatatcgtctacgctcctagtcatgtgcatactatactcactttattcanttatgtatatacgacgagaaggaatcacacgtagatcgcagagngagaggcgagaggagagtcgatggcgagatcgtgactgatatatantatagtcaatactcgtcggtacatacagcaccgtcatatagtgtcgcagaccgcgtctacacggtcggtcgtcgtctctgtaggcgttgatgtagtagatattatagatgtgatacatgtcgttcgtaatatatcgaatnggggtangggtnggttggaggtgcgctctgcgaggcgaganatgtaatatatataatnaagtaatatatatntgatgtatatatattctatctgattgtatgtatattatggtaatattagttgatagtagtcagtatatcatgccgcagccacgcatacctccacctccgctctcgtacacagcgttgctatntgttaacanatagtgatgaatgtcgagatgagtctatgtagtattcgtacntattatctacgagggagacgttggtgagcgcagcagnnnaggtattattctttctcttcnttatntttctntcccctctcttactctactgtgttctctctgggcacgtctcgttttatantgtctagtagtatatattcatcttatcttcatctnctgctcacagtagtaatctagtattcgtantgttncgttcgtntttgtcggtgtattgntngtgcgtnccctctgcnttcgctgcgctcgctccncactctgcactccncnannntcnntnncgncngacagangggatacaaacatca

SEQ ID NO: 4045 - DNA, 279 bp, Glycine max
  Peptide Sequence Number=SeqID_7857
  Probeset Number=SeqID_13824
gcaatggcagtcttatcgatttatctggctaaatgataggagcacttgtagcccatgaagcattaatagtctacggggccggagctatgaaccgttttggagtggctcttttggtacccgaggagtctgtgtatgcaccaggtttaattttatgtccccatctagtcactttaggttggggggtaggtcctcctggggatgttatgagcgccagtccaaaagtaggggatgcagtacacctcttcatctggactgcaggtcggctcgagtgtataggat

SEQ ID NO: 4046 - DNA, 895 bp, Glycine max
  misc_feature (500)..(500): n is a, c, g, or t
  misc_feature (506)..(507): n is a, c, g, or t
  misc_feature (527)..(527): n is a, c, g, or t
  misc_feature (609)..(610): n is a, c, g, or t
  Peptide Sequence Number=SeqID_7858
  Probeset Number=SeqID_13825
aaaatgcttgctcatttccttggcagttcacattaacacacgctcctctctctctctctgtctgtgttctccacttcccttaaattcacgctcccccctgtaacccttctcccacacacactctcttgtttctctctcttcggtcaaaaacatgaatttggatacgcaacccggaacgccgtcgtattggtgctacagctgcactcgtttcgtgcacctctctgtccaagccaccatcgcctgcccccactgtcaaagcggtttcgtcgaagagatccgcgccggcgccgaagcctcgccacgccaccgtctaagtcctttccctgacgatcccctttctttccggcgacagggcttccgccgccgtaggagagaaggtgccggcaaccgctccccgttcaaccccgtcatcgtcctccgcggccccggcgacgactccgccgccgccgccacacgaccgtgccagcacgttcgagctcttctacgacgacggcgatggnaccggnnctcgccccccctcctccacnatgtcggagttcctccctcgctccggcttcgaccgggtactgggaacagttgcgcagatggagatgaacggctttcggcggnncgaaaatccgccgacgtcaaaggcggcgatcgagtccatggccgacgtcgagatcggggaaactcacgtcgaaacgacgggcactgcgcgtgggggaaaaggagtgtttgagctccacgcgaaaggccctgagattgcggtgcaagacattaaccactcgagggcatcctcccggggtttccgaggggaaacccgggcgcggtgggccggcgaggtttccttccattttggaaactaaagttccgcccaattcccgggagaggttgggtttaaagattggaggct

SEQ ID NO: 4047 - DNA, 2127 bp, Glycine max
  misc_feature (28)..(28): n is a, c, g, or t
  misc_feature (42)..(42): n is a, c, g, or t
  misc_feature (44)..(44): n is a, c, g, or t
  misc_feature (148)..(148): n is a, c, g, or t
  misc_feature (229)..(229): n is a, c, g, or t
  misc_feature (279)..(280): n is a, c, g, or t
  misc_feature (302)..(302): n is a, c, g, or t
  misc_feature (360)..(360): n is a, c, g, or t
  misc_feature (396)..(396): n is a, c, g, or t
  misc_feature (608)..(608): n is a, c, g, or t
  misc_feature (620)..(620): n is a, c, g, or t
  misc_feature (630)..(630): n is a, c, g, or t
  misc_feature (673)..(673): n is a, c, g, or t
  misc_feature (717)..(717): n is a, c, g, or t
  misc_feature (720)..(720): n is a, c, g, or t
  misc_feature (723)..(723): n is a, c, g, or t
  misc_feature (1090)..(1090): n is a, c, g, or t
  misc_feature (1197)..(1197): n is a, c, g, or t
  misc_feature (1334)..(1334): n is a, c, g, or t
  misc_feature (1342)..(1342): n is a, c, g, or t
  misc_feature (1475)..(1475): n is a, c, g, or t
  misc_feature (1579)..(1579): n is a, c, g, or t
  misc_feature (1582)..(1582): n is a, c, g, or t
  misc_feature (1617)..(1617): n is a, c, g, or t
  misc_feature (1737)..(1737): n is a, c, g, or t
  misc_feature (1739)..(1739): n is a, c, g, or t
  misc_feature (1809)..(1809): n is a, c, g, or t
  misc_feature (1861)..(1861): n is a, c, g, or t
  misc_feature (1873)..(1873): n is a, c, g, or t
  misc_feature (1924)..(1924): n is a, c, g, or t
  misc_feature (1954)..(1954): n is a, c, g, or t
  misc_feature (1987)..(1988): n is a, c, g, or t
  misc_feature (2010)..(2010): n is a, c, g, or t
  misc_feature (2028)..(2028): n is a, c, g, or t
  misc_feature (2086)..(2086): n is a, c, g, or t
  Peptide Sequence Number=SeqID_7859
  Probeset Number=SeqID_13826
cccccccctcttttaacatacgcccccntcttcttatcacananacaacgcgcaactagacaactcaggttacgagagcacaacgctcggagggcgccacgatccgaacagagtcgtatgttcaagtgcatgaagaacactggtatangcacgcagccgcactgcgcaagtgcagagaacgcgacagcaaacagccgtacacgcacatagcagcaattcaagcaaccanctagataaacacgacatagctgtctcatcacatggtacagacatcacacnntcttctggttgatggatgcggngaatagcagatatctgtgtgcacgctcctgcttgtctcgtgcgtgctcgtgtctcgcncactcaccatcgccatacgagacactgattgattantgtgaacgagcagtacgtgatcaaatgagagattacttatcctcacagtattatctgtatacaccacagcaccgcggtatggacgagcagcgcgtaggagcggcgggtgaggtcgaccgaactaacacaacacgccagaacacagagtcgtgcgattgtgttttctcaaccataccggcacacacgcacaaccacgcaataccaccgacccncaccaacatatncgtaactganatcatgatatacatatacaatgatacaaatagaactactgtcnaatacgatatacatccgcgtgatacgtaatgagcagagacttgnagnatncacatattctgttctgggtatattgtatatgtttgtgagtgttatctggtgttgtcgtcagcggacgcacaacaactcaccatatcgcctgtccttcgctgtgctcgcttcgcgtatgtgtgtgcgatggagacgtcgcgcgggcgcggcgatttgtcgcggaaccgcactcgttcataagcgtcgccctgtctatgatgtcaacaatcgcgccgagcagagtatagatataaatagacagcgacgtgatatatacggtgactcgtcgttgatcgataacgctcgtcagctgaactcgacagcgcactcgtagctgttaacacacggagttgtttcagcatgagctatcatgatataccaacgaganacaccgcacgcatgacagcgcacgcgtcatgagcatcctctgttcactgtcgtcgatgactcgtagagctgtgaggagacgtagacacgaaagtgtgtcaggacacnacgcgatacgcattgagtggagatgcgatgtgatgccagcgctacgacacgcagtgagcgcgcctaacatagtgcgtacgcgctgtcttctctatatactctcaccactagcgcgaacgtctcactatgttgtgtgntgtcgtcncagtgactatgaatcctcctcgtatcgatatacgtatgcgcgtgctcacctctagagcacaaatcgtctcgaccgctatatctcatcgaaatacgtgcgatataccacatcaaatcctacctgagccacgcangtgtatgatgcccactgattcggtttatatacatctcacactccgcgcactcctcaccacacgtttactagtgcgttcagtctcatgacactgtctgcataaanacncacaccgactatgcgatacacagctcctggtacanagcggagagagtgtgtgagtgggtcggtgtcacactcatcgctcgtactgcacaatattagcgacatctgatcgtgcatgctgtctacactagcactcgaatatagtagagtcgacgtgncnctcggactcctgacgagcctgcaacgaccgcgagagatcattgctatacagacgcaagcgactgaacacnaaccacataattgattacacacacgtacacgagagacagctgagctggtcgnagttactactanctagtaacacgcatccgatacactgcattcgcgtaggattccggcgggctncaacgacatgtgactactcgcactgactgnttagagtagcgacgacgtctacgctcgcgagcnngcggcacacagcgatactcgcntttcgctcacccgagganagcagtagaagtggctatactcgtcgttcagtgtactatctctagacgtctcattgcnacatgtcacagcacgcctctcctagctgatatctgatattt

SEQ ID NO: 4048 - DNA, 473 bp, Glycine max
  misc_feature (2)..(2): n is a, c, g, or t
  misc_feature (9)..(9): n is a, c, g, or t
  misc_feature (13)..(13): n is a, c, g, or t
  misc_feature (25)..(25): n is a, c, g, or t
  misc_feature (35)..(35): n is a, c, g, or t
  misc_feature (37)..(37): n is a, c, g, or t
  misc_feature (39)..(41): n is a, c, g, or t
  misc_feature (44)..(44): n is a, c, g, or t
  misc_feature (47)..(47): n is a, c, g, or t
  misc_feature (49)..(49): n is a, c, g, or t
  misc_feature (57)..(57): n is a, c, g, or t
  misc_feature (60)..(60): n is a, c, g, or t
  misc_feature (62)..(62): n is a, c, g, or t
  misc_feature (78)..(78): n is a, c, g, or t
  misc_feature (82)..(82): n is a, c, g, or t
  misc_feature (91)..(92): n is a, c, g, or t
  misc_feature (97)..(97): n is a, c, g, or t
  misc_feature (100)..(100): n is a, c, g, or t
  misc_feature (112)..(112): n is a, c, g, or t
  misc_feature (119)..(119): n is a, c, g, or t
  misc_feature (121)..(121): n is a, c, g, or t
  misc_feature (125)..(126): n is a, c, g, or t
  misc_feature (129)..(129): n is a, c, g, or t
  misc_feature (137)..(137): n is a, c, g, or t
  misc_feature (143)..(143): n is a, c, g, or t
  misc_feature (148)..(149): n is a, c, g, or t
  misc_feature (168)..(168): n is a, c, g, or t
  misc_feature (180)..(180): n is a, c, g, or t
  misc_feature (182)..(182): n is a, c, g, or t
  misc_feature (193)..(193): n is a, c, g, or t
  misc_feature (195)..(195): n is a, c, g, or t
  misc_feature (218)..(218): n is a, c, g, or t
  misc_feature (221)..(223): n is a, c, g, or t
  misc_feature (225)..(225): n is a, c, g, or t
  misc_feature (227)..(229): n is a, c, g, or t
  misc_feature (269)..(269): n is a, c, g, or t
  misc_feature (286)..(286): n is a, c, g, or t
  misc_feature (293)..(293): n is a, c, g, or t
  misc_feature (295)..(295): n is a, c, g, or t
  misc_feature (297)..(298): n is a, c, g, or t
  misc_feature (306)..(306): n is a, c, g, or t
  misc_feature (309)..(309): n is a, c, g, or t
  misc_feature (320)..(320): n is a, c, g, or t
  misc_feature (323)..(323): n is a, c, g, or t
  misc_feature (327)..(327): n is a, c, g, or t
  misc_feature (330)..(330): n is a, c, g, or t
  misc_feature (337)..(337): n is a, c, g, or t
  misc_feature (344)..(344): n is a, c, g, or t
  misc_feature (357)..(357): n is a, c, g, or t
  misc_feature (379)..(379): n is a, c, g, or t
  Probeset Number=SeqID_13827
anggagcgnaaanctcttaacatcntctatacttnancnnnaanaangngttatgtnacntntgctcctatgtttgtnttcntgcttgccnnttccnctntaatgttcccantgaacananaatnnctncatcggantgttgnatgtnnaccttttcaggtcgccacngtgccgctcacncngattgctggangngatgctataggaactatttgaanggnnncngnnnacatccgaactggactttcatcgtgcctgcggaatatgancatagcgaacatcccancttatgncngnntgatgatnaangcatgaactanagnaagnggngattttngcgctcngataccctaatanttatatcgattatggatggtgntttgactctgattctgaagcactgaaaggcttcttggccatgcctagggcaaccaccaagtaatatggtgggtatgccaaagtgggcatgcttg

SEQ ID NO: 4049 - DNA, 1669 bp, Glycine max
  misc_feature (19)..(19): n is a, c, g, or t
  misc_feature (21)..(21): n is a, c, g, or t
  misc_feature (26)..(27): n is a, c, g, or t
  misc_feature (29)..(29): n is a, c, g, or t
  misc_feature (114)..(114): n is a, c, g, or t
  misc_feature (118)..(119): n is a, c, g, or t
  misc_feature (131)..(134): n is a, c, g, or t
  misc_feature (163)..(163): n is a, c, g, or t
  misc_feature (189)..(189): n is a, c, g, or t
  misc_feature (249)..(249): n is a, c, g, or t
  misc_feature (281)..(281): n is a, c, g, or t
  misc_feature (1017)..(1017): n is a, c, g, or t
  misc_feature (1019)..(1019): n is a, c, g, or t
  misc_feature (1079)..(1079): n is a, c, g, or t
  misc_feature (1124)..(1124): n is a, c, g, or t
  misc_feature (1160)..(1160): n is a, c, g, or t
  misc_feature (1169)..(1169): n is a, c, g, or t
  misc_feature (1175)..(1175): n is a, c, g, or t
  misc_feature (1185)..(1185): n is a, c, g, or t
  misc_feature (1219)..(1219): n is a, c, g, or t
  misc_feature (1248)..(1248): n is a, c, g, or t
  misc_feature (1347)..(1347): n is a, c, g, or t
  misc_feature (1350)..(1350): n is a, c, g, or t
  misc_feature (1405)..(1405): n is a, c, g, or t
  misc_feature (1420)..(1420): n is a, c, g, or t
  misc_feature (1455)..(1455): n is a, c, g, or t
  misc_feature (1466)..(1466): n is a, c, g, or t
  misc_feature (1588)..(1588): n is a, c, g, or t
  misc_feature (1620)..(1620): n is a, c, g, or t
  misc_feature (1632)..(1632): n is a, c, g, or t
  misc_feature (1664)..(1664): n is a, c, g, or t
  Peptide Sequence Number=SeqID_7860
  Probeset Number=SeqID_13828
gagaggatggtgttgtttnanacaanntnagcacacaccagcacaactcttacacacactcacacacgacctacgtagaattaaaacatgagtgagtgttgttgtatgagtcancttnnttctcgtacccnnnnagtgatagtaggcaaagatacgtgtcagngaaacaccgacagaaaaagacagcantaatacccacaacttagtaaaataaagagcgcacccccgactaatacaaaggttatatanctatattcttaacaacactacatgctcgcctnatatcacacacgtatagaactacacctgttcgtcacgaggatgttatagtacagcttaagaatagtgatagtacacatacatagacactacataagcagacctactatgtacagtgccctcccgcacgacagcgcctgtcagccgcagataccgcatcacaacagtactgctgatattctctccaccctcgcactcttacatcccgtgcactccgtcgctacttcgctctcgatcccatcgtccgtagttcttcaccaccgctcgcctatggccagcctcgccatcaaaccgcacactgcattatcctcctacagatagtgtagtgtatcaactccctacagtttcgcacatacctgacagagatgagacatagtagagtcggactgttatatgcgcatcgtgtgaaataagattacaaatactgcacgtgcatgatatatgatcctcgcacacatgaccgccataagcgataccgtcaccatgacagagtgatagagagaagtgtagaggatgaggataccacatgcgtggcgcgtgacatctggatgcgctctggctacgaacatggacagagtcaccacactaatatgcgatgacattaattttatatatatgctagctctgtgactactgtctattcgagatatgattagtgtgacgtctcgacacagcgatgtgctcgctcgatcaagctgatgatagagatgatgtgtgtctcgttgactgtatacatanangataatgtgtatatatatcactataaacacatagacccacacgactcacatctaccctcntcatacgtctcacgtactctcagtacgacgatccgcacatcacantcactgcacgtggtacataaagacatcaataaatgnagtcacgtngttatnatgaatatgnccctacgtgtgtgcgcgtgtcagtctattcgtancgagtcttctcatcatccgcgtctctacnacgtatcactataccgattatctccacacacatatcctcaactaatcacaacagtactcgtcaccgaacagctatcatcgtcgcacgcgcgtcgcactnctnatgcgcgctatccatgaactaggatgtacgcgacacagacagtgacatgacggcnacgtcgacggtcgtntctcaatctcgctgacaaccgctacactaatatantacgcatcgantacatcacatatacacttatcatacatcagagcccacacgacacaagagacagcacaccgacgaaagagacctatcctgctacgcgcgcgcgttcagctcgaatacatcgtcagtattcgtncgtcgtgcgctgtggtcgtcattgtaccacangctcgtctcgcncggttgtagtatgtgcatactcggcacacgcntccgg

SEQ ID NO: 4050 - DNA, 1940 bp, Glycine max
  misc_feature (4)..(4): n is a, c, g, or t
  misc_feature (40)..(40): n is a, c, g, or t
  misc_feature (77)..(77): n is a, c, g, or t
  misc_feature (82)..(82): n is a, c, g, or t
  misc_feature (109)..(109): n is a, c, g, or t
  misc_feature (155)..(155): n is a, c, g, or t
  misc_feature (177)..(177): n is a, c, g, or t
  misc_feature (193)..(193): n is a, c, g, or t
  misc_feature (236)..(236): n is a, c, g, or t
  misc_feature (279)..(279): n is a, c, g, or t
  misc_feature (281)..(281): n is a, c, g, or t
  misc_feature (358)..(358): n is a, c, g, or t
  misc_feature (384)..(384): n is a, c, g, or t
  misc_feature (576)..(576): n is a, c, g, or t
  misc_feature (677)..(677): n is a, c, g, or t
  misc_feature (846)..(846): n is a, c, g, or t
  misc_feature (925)..(925): n is a, c, g, or t
  misc_feature (939)..(939): n is a, c, g, or t
  misc_feature (1289)..(1289): n is a, c, g, or t
  misc_feature (1644)..(1644): n is a, c, g, or t
  misc_feature (1809)..(1809): n is a, c, g, or t
  misc_feature (1811)..(1811): n is a, c, g, or t
  misc_feature (1849)..(1849): n is a, c, g, or t
  misc_feature (1861)..(1862): n is a, c, g, or t
  misc_feature (1864)..(1864): n is a, c, g, or t
  misc_feature (1888)..(1890): n is a, c, g, or t
  misc_feature (1899)..(1899): n is a, c, g, or t
  misc_feature (1904)..(1907): n is a, c, g, or t
  misc_feature (1911)..(1911): n is a, c, g, or t
  misc_feature (1913)..(1920): n is a, c, g, or t
  misc_feature (1934)..(1935): n is a, c, g, or t
  misc_feature (1940)..(1940): n is a, c, g, or t
  Probeset Number=SeqID_13829
catntatgtaatttttatcgtgtagtctcgtcgatctacntcacttcgcacatctacaaatccttacatagtgatantatgntatgctatattatcgttcaatcgtgtngtctcgtatatctatcatctatctcattattatatgtctgtgtctntcctctttgtcttcccattctntcatctctatctcctnctcgccgctatcctctcatgtattacatgctaccagactctgntctgtcgagtcgatgctcatgcgtctatctgtctgtcgtgtangngtgcgttactactcgattcgtcttcgcgccacgcttgaatgcacgttttaacgctatcgtgtcgcgacatcatcatntatcatcatatcgtcgtcactctcgntctccatcagtacacagacttatctctttcgtctcgcgtagctcttctagtcagcaccgctctcatagatctatacgattacatcgtgacgcgactcatgacgcatgtggtactcgtcgtctgattatagattcacgattctcacagtgtatatcacatattcatccatatcatcatatctctactactcanagcgtctcgcatctccgcttcttgcttgccatatgctcttattacaccagctactctacatatcctatgctttgtatgcagactcatagtccgtctcgcancgattcagcacgatcaatctaaaccttcatattcatgtacctatcatatacacactcgcgtcattaacaatcactcacatcaatacctctcttctatataaacctcatacactatatcctctatcatgatatatctcttacttcagacttctcctcatcagtctattantcatcggtctcgttggtgtgcgaccgcgatagctgcatctaggtcgtcgagatcgcagactcatctatttttcttcatntttatcgtatctantatcgtctcgctcgcaccgatacgtgcctatactacacctcactccgcataatcacttcatcaacatccgtaccgcgagtccgactatctcctcatcgtacgtcacaatgtgcgttctacattcgcggcgcgccctctctcaccatcctgcatcactaatgctcacactcccattaataatcattcattctatcctcagtgtcatttcattcgcgtcgtagtactatcatcatattctcaccaccgtatcactctcagctctagctgcaccgtcgttattatactatctcgtgtatattctcatatcacataacatcagtgatgatcagagtatacaagtacgtatatcnatgtatataatatacattagatctatctattatagatatccatccgctcttcactcaccaacaatcactcccacaccactcaatctctatcattcattagttatcctccatcattaactaataacgttgtcgactactatatctattcatattcatacatcacttttcttcacttcttgttctccactatctttttcttatatatcctctgagctagcaacaaagacctcattcgctctcccactccaaccacactgccagaacaacctctactcccctgtcccacacaccccttcccgcccgcgccgcgcctcacctttgtcccctcctcccaacgggtgagaccaaacaaacnattcttccactcctattctctgctctctactctcttccattccatactacatcattcagttattcgtatctatcctgttctttttctgatatctgtaattaatctctccccgtcgtatgaaataaatatcactctctatcgtctgtgcagaagaagattggatcnantctttgagttcgtcagtggatgagaggtagtagggtgnggagagaggggnngngggggggggaggggggaggggggnnnggtgggaanggggnnnnaggngnnnnnnnngggggggggggggnnggggn

SEQ ID NO: 4051 - DNA, 833 bp, Glycine max
  misc_feature (1)..(24): n is a, c, g, or t
  misc_feature (833)..(833): n is a, c, g, or t
  Peptide Sequence Number=SeqID_7861
  Probeset Number=SeqID_13830
nnnnnnnnnnnnnnnnnnnnnnnntttgattagtattttgcataatgatcaaatgatttctccactaaatgcaacgagtccatgctggcagttgctgcataaggacaaaaaataacatggtccgctgctgaacctgctcccccctcgccatgttttcgtatacaccatgcatggagcacatagccgcacatggacttgttagcaaacactttttgtgatgataaaatcaccaattagttaattttgtatttgactttgcttgttcggttgttatcattgttttcaaatttggcataatttctatctcataattaattggaatcccttcatgcaggaaccagatgctcccaaagttcttctggttgagtcgattacttactagcaatgatattcacaatgggaagcctttatagcaggctactttgattgattcccaaactatggcttagttacaaatattttggtggtgatgtttcatacaccagtccagtgttgctacccaatgatgagttgtatgaagcactttgaaatgctttgaagaaagtcttttaggtggtggttctactgatgctacttctgtgacagccaaggcgtaggttgcagctcgcagagctttaaggaggaaaggaagacatgatttcttcttgaagaggccttcaagtgcatgtggaagtgtagcatgcaagcattatgcgacaatgacacactgcttatcgtacgctcacaccctctaaagaccacaatcagactaagaagatgcttaaataagctgtaaaccaatataagtcattctactatatctgtactattatctgtaatacaatccacattgn

SEQ ID NO: 4052 - DNA, 1224 bp, Glycine max
  misc_feature (1224)..(1224): n is a, c, g, or t
  Probeset Number=SeqID_13831
agaatttgttagcatatcttcaggaagacatatagaatatggatcactccatcattgataaatttgttgattgtggcctttgatcccttgttgtttcaaacaaatgagttgaacttgtgattgtgtgaatacaccccttcttcaaatgatggtttttgtggcaaattagtttgattcagaaagtgccagaaaaagcaaagagagggcagtggcaatttgtgggtttgttgcctctatttgacccaccaaggcatgacattgccgagaccataagacgtgctattatgactgttgtcttcttctaggcgctgctcttacatcgaatttcttcacggacatatttggcgtgagatctatcaagaacaaccaccgtgagctcatagcagttgtttatcttcaagtattgtaagtcaggctttcattgctacacagtcaaggagctggacttacattgaaatggccatgatcatagctgtgtatgtgaattggggctttgcaaggattgaatggagtcaggcaggtgccatttggctctatagcatcatttaatttctacataccgttggatatattcaagttcatcatccaatatggattaacagacaaggcatggaaatataatcgagatcagggcaacatcttaatctctgccaaatttgttgctcaatctgagtgtttttcagtgttgtgatgcaggttgctttcacctcaaagaaggattatggaaaaggagggagagagagagagaagcacaagctgaagctcaacacagtttacatggtctgaatcctcttgaaatagtcaaaatcttgaatgaagaaamcaactatagagaactgtttgaacaggctaggaaatgtgctgaagttgcaaggttaagggagcttcacagtttacacactaaagggccatatcaagtctgttgtgaaactccagggacttgacattgagacatttcagcagcactacaccgtttgagtgactcaagttctgcgcaaaagagagattttgaagacaagataaaagcagcacttattctttgtacattgtcattattatttttcacctcatgaatcatgatgacaatgaactgtgatcttttgattgcttttagaatttgtcttcaatattttgttatatccttcttcaatactttccctggagagagagataagactttagttttttttgtcaattataagactttagttactgcaaataaan

SEQ ID NO: 4053 - DNA, 1407 bp, Glycine max
  misc_feature (746)..(746): n is a, c, g, or t
  misc_feature (852)..(852): n is a, c, g, or t
  misc_feature (1264)..(1264): n is a, c, g, or t
  misc_feature (1309)..(1309): n is a, c, g, or t
  misc_feature (1321)..(1321): n is a, c, g, or t
  misc_feature (1325)..(1325): n is a, c, g, or t
  Peptide Sequence Number=SeqID_7862
  Probeset Number=SeqID_13832
gtgtgtccctcccccgccatacataagtacgggcatatctaccccactatccccccctatttatcggtggtgtatcaaccgcgacccgcagcgatgcctttaataaatagtagtcacgtccgcggcgatgataggaaaataatggagtgggtgagcccatccccgcagagggagctgtagagcagagaatcatttagcaaactgcccccccaacgattaatccgctctttatacttatcgtgtaccccgaccctcccctataacgtacaaatagtaaatacgataccccaccctccactttattgattccccctcttttatattgtaatttgtgcgcccgtaaaaaaacccgcgacacgtctagccccccccccgccatcaacgcggttctgttgtacaatccggtccggcattattgcaacgaattgacgcacgctccttatttaataaatataagaattggatataaaaacaagttaatccccaaattaaactgtacgtttgattctccccctctcaatgaatagggggataagtgcgacaatcgtggccggcagccggagaataacatcgacccgcgccacacatgaaatataatgtggcggatattatccgctaaaaagtttgttgaaagttataacgcccccgccggcgataatatattataaagggagggtttgggtgtgcattacgaattaataaagcagtactgtttttggagtagagtcccacccgtatgtttacgnccttaagaacccacagcggacatgtctccgaccacttccttactttcttcaacacccgcgcgacgcgcagagtagaagtcgtagcgatggatatattacaagcacngtgcgcttgcgctaatgatgacaaataatcgctctatctacactatagggctcggcccctcccccacgattatatattactgcgcgacacactcgctaccagcgctcgtacttaaaatatatattataacgccgcccagacatataattacacgccgacctccctcgtgagaaacttgctgtttaaaataacgagcgcgtaccccccgccgccgcccgaaaatatgtagcatcataaatatttgtattatatagatatcatgtgccgcgacacgcgtcagtagctgtgcccatgatatacatcggtgcgctatgggccgtgagcatatgtggtataatgaagataggactgcacaagcgcgtgggtgataaagcctcgcgcggaagtaaaccacagagcgacaatatctcanccgctcgcgcgcgtgcgcgacattggagagaatcgacggtacaantacagacgcacnctgngcatgctatgtatgtagataatcatctcactcatgctgacgcgtaaatgaacaacacaggatttgcctacacacaatcgcca

SEQ ID NO: 4054 - DNA, 485 bp, Glycine max
  Probeset Number=SeqID_13833
atcacaaccctttgaagtgttgtcattactcattacacaaagaggcaatggaggagtcaaagaaatacgagaggatggtgaagcagacaatggacaagaacaagaagaagaataacaaaaggggtcatggctctgggtcaggatccgggttgcttggggtgaaggtgaggaagctccaaatactgataccgggtggaaagagatgcaaccacccggatctgcttttatctaaaaccgtggattatattgtccacttgaagttgaagattaggttccttaaagcactctcagatatgtactctctctgaaaatcctagcactattcttctgcttcttcctctcttcgttgtcatataagctatggtaaggattttatttctatgtatatcaattgtcatttggagtttgctttatgtcgtattttcatttgttaaattggttatctatattcatgtttatccgacaatgtgtaagaaattgagtag

SEQ ID NO: 4055 - DNA, 598 bp, Glycine max
  Peptide Sequence Number=SeqID_7863
  Probeset Number=SeqID_13834
ttttttttttttttttttatttttttttttttttttccttttaaatacttacccattgataagttaggtaaactagatcaatcaataacaacatattcttaattatatgataccgtaaaaacgtgtagttgcgcacttacactgttaaatagtaatcacgaaattgaaattgcgaattattcattagaccgatttgctaggacgatcgagtgaccgcagggggacacattgagtccttcttcagagaatgtcaccatgaccaacgaaactccttacacccaaccattggttcactacgggaaatcgttaactaggggtcattcaaggtgctatagtgttgttatagggaactcgcactttggtgtccaagtgtttttaaagaaaaaaaattagaaaattacattatctttttaatacataacatctgatctcttcaattctttaattaactttacaagacatggaagaagactctacttcaaagccacccagagcaaatatgaatatgattgtatcattgaaagtgtggattgcggagaagagaacagaaaggatcacgggtggaataaacgggtcatttgggggactccggtaacaa

SEQ ID NO: 4056 - DNA, 520 bp, Glycine max
  Probeset Number=SeqID_13835
ctgttagttcctgtcctttgataaactgattgctgaccctcgcagtggataggaactcgtccccttgctaataatgtcattctgggggcgcctaactccggatggacatgaaccaccttgtataccggaagccgggcgaggactacatgaaacatagaatgttcaagccccaccgtccccctgtgttggagaggccgatacaccaaaaccatacacgacaagatgcgccagaacaagtgactacagtaacgcctatgactgctcgattactgcggattcggaatctgtagcgtctcttggactacctccttcttgatcaagttgtctaggagaataaggactgactcagccatgcgaggagtattgtacccctcacctatccctagatgatgatgtccgacggtgtcgcactgaacgctttaaacactgaaaacatcgtcgcgaacatctcgctattgtctcctcctccgttgggcctgagtactatgtcggaatcctgtctttcgttgataaggatcag

SEQ ID NO: 4057 - DNA, 1408 bp, Glycine max
  misc_feature (3)..(3): n is a, c, g, or t
  misc_feature (26)..(26): n is a, c, g, or t
  misc_feature (62)..(62): n is a, c, g, or t
  misc_feature (144)..(144): n is a, c, g, or t
  misc_feature (152)..(152): n is a, c, g, or t
  misc_feature (401)..(401): n is a, c, g, or t
  misc_feature (406)..(406): n is a, c, g, or t
  misc_feature (497)..(497): n is a, c, g, or t
  misc_feature (544)..(544): n is a, c, g, or t
  misc_feature (604)..(604): n is a, c, g, or t
  misc_feature (703)..(703): n is a, c, g, or t
  misc_feature (755)..(755): n is a, c, g, or t
  misc_feature (1348)..(1348): n is a, c, g, or t
  misc_feature (1370)..(1370): n is a, c, g, or t
  Peptide Sequence Number=SeqID_7864
  Probeset Number=SeqID_13836
ctncgatagacgtcgctctcgcatcntgacgatcgtactgcgagttgactctccatctagtnaggagcatgttcataatcaagatggagcgcagactacgcggagtgcgatcgctcacgggtagtgatactgcgacggttgatngaaatagngcagtagaggatagtaggatcattgcacatacagatcaccagtagatctgtgtgcgctgcgattgtagcggactggagacgtggcgggcaatagatattctatagttgtcacgtgagtagttagtagagtgtccaggcataatcatgtgctagcgatgcgcgctactatgtcgtgtacgtctatctctccgtatctgtatctctgcagcgtgtactgcagtatatatagtatccaaatgtggtggcagnacatngatacgcgtagcgctgtgacgacggatgagcacgtgtcacagcgtggtagtcagatcggatataaagattcatgcgagtacagtggctcgntagtcatcaacggtatctccgtctctatcgtaagagacatctgttgngtggtgtgcgcgagttagtttcgtagtgagaccccatattcacagactaacagttaatcncctatgagcggtggggaaccgctatgcgagatgagtcgcgtagattcttacaatgtgctcagcggactcgttcgctcttacgttagctatagtgatgtncagaagttaagcgagagcgggtaccgtcgaagagtgagtctgagcatgtcgntcgtcatttgcgtatagcgcgctcgactcgcggtcatcctcatcttatgtacattacaatgcattctattagtgctcgtgcgttcacgcgagatgaaaacaaaaaaatgtgattataacgtagttcggctcgaaatataataatgtccactcgtgatttaggatgggagagagttagagggatacagtgaatttgacacatagtacgctattaccatcgtctcacaatcgtgtatactaatgagtacaagacataaggtcggcgctatatgcacgtgtgtaagcggctcgtcagcgctgtggtgtcgctcgcatccgccactcaccactcgcccgcgtacattgctcgtagtgtatgtgtatctttattgtgagtgaggagagagatggagtcaatagtagcaacaataataaccagctagaggcacagaaggccacagagtacgatctattaattggttcgcgagagtgttgttcgcgtacgagatgctgagccttcctttcacgtggaagggggtggtggtgtattcggctcttgttctccaacctctcgtcagttaagatatctctctccatctacatttgtctaccgtnaacagtgtgcggtgcgcctgcntgtagcgataaaaaaccacaaagcgggcggcggtcgaa

SEQ ID NO: 4058 - DNA, 1556 bp, Glycine max
  misc_feature (61)..(61): n is a, c, g, or t
  misc_feature (181)..(181): n is a, c, g, or t
  misc_feature (606)..(606): n is a, c, g, or t
  misc_feature (661)..(661): n is a, c, g, or t
  misc_feature (737)..(737): n is a, c, g, or t
  misc_feature (820)..(820): n is a, c, g, or t
  misc_feature (923)..(923): n is a, c, g, or t
  misc_feature (935)..(935): n is a, c, g, or t
  misc_feature (1032)..(1032): n is a, c, g, or t
  misc_feature (1093)..(1093): n is a, c, g, or t
  misc_feature (1115)..(1115): n is a, c, g, or t
  misc_feature (1154)..(1154): n is a, c, g, or t
  misc_feature (1165)..(1165): n is a, c, g, or t
  misc_feature (1269)..(1269): n is a, c, g, or t
  misc_feature (1343)..(1343): n is a, c, g, or t
  misc_feature (1357)..(1357): n is a, c, g, or t
  misc_feature (1362)..(1362): n is a, c, g, or t
  misc_feature (1418)..(1418): n is a, c, g, or t
  misc_feature (1460)..(1460): n is a, c, g, or t
  misc_feature (1504)..(1504): n is a, c, g, or t
  misc_feature (1506)..(1506): n is a, c, g, or t
  misc_feature (1518)..(1518): n is a, c, g, or t
  misc_feature (1547)..(1547): n is a, c, g, or t
  misc_feature (1556)..(1556): n is a, c, g, or t
  Probeset Number=SeqID_13837
tggccacacctcacccgattatccccctcttgtctgaaatttctggatgtattatcgagcnatccctcatacacactatatataaactaaccttcatcctccacacccgcacgaagggcgcgataaagattataagagcacaacatctcatgccgcgctagtggggtatgaatgggtagancaaggacgtcgcctatgtctccttaaagcaatcatttgctcacccacagaatacactaatacaagatgtctaacgagctcttcccccgacagaatccaatccagccctctagacactgacgctaacctagtagctcgtagaatgttctagatatattctaccatccagtccatgcgatagctaccatgatacgaagtagttagcgtccctgttcttgaactttatataaactgtagagaaccctattatgtataacacagcctctgcaatctcaatctaatactactctatcttgttgtttttatcggtgcagcgatattctactcatacgatccaatccttgtgttggttcgaggcaacagcacgtcttcatggcaacttttgcttgaataggcgagagtttagagaagtacttgtctatttangcacatattcgtcgacgttatcataacgcgcgacatggtcgaccgccatatcggnatgcgtaataacatactcatataaaacgtactatattaggttattgtcgctgatgctggagtgctaactatatcgntgataattaagcaccctcaccttactatattcgcatctacaacatgtccgatgaatatatacgcgacagtgttagtgtatttnggtataacaagatccaccccaccacacccggcgtctcgtctaaccctatactaacatctcttcatatcgtcgtaccgagcctgcggggccttcgcggacccantaatttgaactntatatagcgctctctatcatgtcacgctctacacccgtgcgaggtcgtcatctttatcggcagagcatggcctgataatatatgatattagacgtgngaacacaatctatatctactcagcgcattgtgctctctgtcgtactatatgtgccaccggnacacaatgatccacacagatangagttagcgtgtgtggatgtaacgccaatatcctagcantattatcgatngagtgtgcgaggctactacataacgtcagtcgtctgctctctccacgcgcgcatctatcgcacacgttgacgatataaatatataagaatatagcatgcgaggntgactgcttctattacccacaacacatggacgatgtatatgacacactatatgacgaccatttatatgcacgancgcgttcggatggnatgtncatgagatcgccgctcgcccgatcatcactctgtagctattgacatactatgactntcgcaccgtctgtctcttgataccagagagtgagtgatcatngatgatatatacaagtcgtcgtgtgcgtgacaggacggcgcacncntcgtatatatcncatctctatctacttagcaccagtgatcngcacgcacn

SEQ ID NO: 4059 - DNA, 1448 bp, Glycine max
  misc_feature (39)..(40): n is a, c, g, or t
  misc_feature (46)..(46): n is a, c, g, or t
  misc_feature (326)..(326): n is a, c, g, or t
  misc_feature (353)..(353): n is a, c, g, or t
  misc_feature (1368)..(1369): n is a, c, g, or t
  misc_feature (1393)..(1393): n is a, c, g, or t
  misc_feature (1425)..(1425): n is a, c, g, or t
  misc_feature (1435)..(1435): n is a, c, g, or t
  misc_feature (1443)..(1443): n is a, c, g, or t
  misc_feature (1448)..(1448): n is a, c, g, or t
  Peptide Sequence Number=SeqID_7865
  Probeset Number=SeqID_13838
gcctatgctatgttcttgatacgttacgacagaggtagnnccacanaagaaaaatgctacagtaaacgttgaatattttgtatagtgggtaagtgtgtgccttctggtaacactgaagataatctatacgcgaaggactggcgatgctcgagttctctggcgtgtatcagcctcgaacccgccgactacatgttcgctcattcacgacaaggtgtgaccacacggtagatcaggatcgcacctgtatcactctgtatatcgatcttacacgcattcgcattgtcgtctgcgtgtcgtgatgccgcgcaaggatcgcgtagacagancatgactcgtatcagcagatagtatangagattagtgtagtgtctactttgtggtcacgtgcggcagtcttcttctaggatcttgcgtgtagacgtgatcgtgtttattgtaggtcttgtcccgcgggtcacctattgtagcgagaaatcgctacagttgaatgaaattcgatacagctatcgattctaaggacttcggctagtgaaagccaatatatataggtagcgtatttagtatagctctgaagtgagattatggtatgtcttaagcctcgtgcgtacgagaatggcatccggggattcactggatcttcgagcagaactcatattcctccacgtgtctggagagtgtcagcgcatcagaactgacatggaagtcgtaaacaattgttccgattatcacgtgccaatgcatataagcgaatgtatgtataggtattctatgtctgactcttcatacaggcttctccggtgaacaatgctctagagcaggaagagatgcactctctataagagcagactagaaggggatatatgagtatcagtacgattacataaactagtttgatcttcgtgatatgatgagataacaggacagcactctctaatagtatgcttgtgtctcccctgggtaattgtaagcttctgaaacagactataatttacgccaatagtctcagatgctgcaggtggcttgactatccggcatgcgggacgcacttggctccactattctctggatataacaagtgtgcggttcttttagctcgtcgcacttccagtgacagtatggaaggggctacgagatcgtatatatattttgttgagtccttctggcctcataaccaacgatccatacgacgacctgctgttgtcgaggtgctctatctatctcgagggctggatagagtaggctcctgtgcgcgctggtgggcgaggagaaagaaaaaagagagaaggtctctcactgcctcgcggggccggggcgcctaccttctagttgttagatcgcccaccccccgcgagaggttggaccttcctnnttggctcggcgtgattgtataagnatagaataagacagatataacgccataaaaanaaaataaaanaaaaaaanaaaan

SEQ ID NO: 4060 - DNA, 1355 bp, Glycine max
  misc_feature (18)..(22): n is a, c, g, or t
  misc_feature (24)..(24): n is a, c, g, or t
  misc_feature (26)..(27): n is a, c, g, or t
  misc_feature (30)..(31): n is a, c, g, or t
  misc_feature (93)..(97): n is a, c, g, or t
  misc_feature (101)..(102): n is a, c, g, or t
  misc_feature (407)..(407): n is a, c, g, or t
  misc_feature (455)..(455): n is a, c, g, or t
  misc_feature (598)..(598): n is a, c, g, or t
  misc_feature (955)..(955): n is a, c, g, or t
  misc_feature (988)..(988): n is a, c, g, or t
  misc_feature (1001)..(1001): n is a, c, g, or t
  misc_feature (1141)..(1141): n is a, c, g, or t
  misc_feature (1171)..(1171): n is a, c, g, or t
  misc_feature (1226)..(1227): n is a, c, g, or t
  misc_feature (1309)..(1309): n is a, c, g, or t
  Probeset Number=SeqID_13839
atataaaatattatattnnnnntntnnccnnacccttgggttatccatctattcttctatgagtgtccgtttgtcttcgaggtttatgttgannnnnacannccccaccccacccccctctcagaagtgcgacaagtctaataatgacaaaatttcttacataatattattgatttaaatcagagtcttcgccctcgtagagagtagtatatgtatgatatgattaaaatacacattcattactttatattttataatattgtaagtttattaatttatataatcgagcatatacataaattataacattaatatcacctgtgtaggatctatatattagatgaggaatcctgtaatatttctttctttctttccatgattaatagtaatatatacttattatttgntatgattaatgatgcgttcatgacgacaggtgacccagtattttcatnttataatagattatatattatatattctaatataatctacattatatacattaaatttgatctgagatttaatatgctaatctagtactatgctagcggagagttgtgttgggtggtgtgaccccacaatctatctattattntcttcatgctgagatcacagacggagtgtgagtggcgatcacagaaagagatgacgaaattctatatatatatgtcacactaattgatataaataaataatactctttatgtatgtcatcatatgaagtgatgagattctctctttccatacatcttcaggagagtgtactagatacgtgtgcgcgatctcgcatgaaacaacagtgtaagagtgagagttgttggtagtgatagtagcggtatcgcacactaccacgacgtgagcctccacaagaatcggatgtaaatacatatatagatataaataatctcataccatccaagacgatatcagatatgtagagttataataatgntttcatcattagattactaatatacatgagcgnccagcacagtaanatactcgagtcgcatttctcacacggtgtatcattatagatcattggataacgctcgcgctgtcatcagtcttcctacatgaaacatcaagtagtaaccatgtgtctacaatattgacgatatatctatattactatganggactctatgattatatataattgactatntgtgtgttactctctcttctctgccattagatgtgtgatcttatatatgtatctnnttgacgcgcatgcttgtgctactatatcgtaattggtctgacagtagccttatgtatcacttatacactgatcctcgtatantcctattacgacataatataaaatacaacattccatactagtcaaa

SEQ ID NO: 4061 - DNA, 990 bp, Glycine max
  misc_feature (990)..(990): n is a, c, g, or t
  Peptide Sequence Number=SeqID_7866
  Probeset Number=SeqID_13840
gcacagcttgttccttaattaaagcaaaaaaaaaatcacaatggttaaaacctctctccctctcaccgctttcttcttcctcctcctcatctcctcctccttagccgcagacaccggccggctctttctcaccgtcgtcaaccactgtcccttcaccgtctggccagccattcagcccaacgccggccaccccgtcctcgagaaaggtggcttcgctctcccaaccaacacccaccgctctttctccccaccaaccacccactggtccggtcgtatctggggtcgaaccggctgctcccactacaacggcaaattctcttgcgtcaccggagactgcggaaaccgtctcgagtgcaacggtctcggtggcgcaactccggcttctctcgctcagttcgacctccaccacggtggacacagagacttatcctcctacggtgtctctctagtcgacggtttcaacgttccgatgacagttactcctcacgaaggccgtggagtttgtcccgttgttggttgtcgcgaagacctcttgagaacgtgcccggctcatcttcagctccggtcgggacacggtggacacgtggtggcctgtaagagtgggtgtgaggcgttccgcacggatgagttgtgctgtaggaaccattacaatagtcctcaaacatgtcgtgcttcgagccattcgctgttctttaagcacgcgtgtccttcgactatgacgttcgctcatgatagtccatcgcttatgcatgattgttcttctcctagagagctcaaagtcatcttctgccactaatgtgtctctcttgttcggtttattctgtatggttgtactagtgatatcgcactaatctcttatctttctggtttgattggtttagtttgtgatttcccgcgtcagttatgttgttgttcaaaaactatgtagtccaactatgcgattatgtattattatcttttgaattgattctgcttagttatcttcttcan

SEQ ID NO: 4062 - DNA, 1775 bp, Glycine max
  misc_feature (17)..(17): n is a, c, g, or t
  misc_feature (20)..(20): n is a, c, g, or t
  misc_feature (30)..(30): n is a, c, g, or t
  misc_feature (37)..(37): n is a, c, g, or t
  misc_feature (248)..(248): n is a, c, g, or t
  misc_feature (411)..(411): n is a, c, g, or t
  misc_feature (676)..(676): n is a, c, g, or t
  misc_feature (691)..(691): n is a, c, g, or t
  misc_feature (694)..(694): n is a, c, g, or t
  misc_feature (796)..(796): n is a, c, g, or t
  misc_feature (799)..(799): n is a, c, g, or t
  misc_feature (811)..(811): n is a, c, g, or t
  misc_feature (840)..(840): n is a, c, g, or t
  misc_feature (887)..(887): n is a, c, g, or t
  misc_feature (906)..(906): n is a, c, g, or t
  misc_feature (998)..(1000): n is a, c, g, or t
  misc_feature (1003)..(1003): n is a, c, g, or t
  misc_feature (1015)..(1015): n is a, c, g, or t
  misc_feature (1043)..(1043): n is a, c, g, or t
  misc_feature (1058)..(1058): n is a, c, g, or t
  misc_feature (1084)..(1085): n is a, c, g, or t
  misc_feature (1087)..(1087): n is a, c, g, or t
  misc_feature (1092)..(1092): n is a, c, g, or t
  misc_feature (1157)..(1157): n is a, c, g, or t
  misc_feature (1194)..(1194): n is a, c, g, or t
  misc_feature (1227)..(1227): n is a, c, g, or t
  misc_feature (1234)..(1234): n is a, c, g, or t
  misc_feature (1238)..(1238): n is a, c, g, or t
  misc_feature (1245)..(1245): n is a, c, g, or t
  misc_feature (1329)..(1329): n is a, c, g, or t
  misc_feature (1341)..(1341): n is a, c, g, or t
  misc_feature (1382)..(1382): n is a, c, g, or t
  misc_feature (1387)..(1387): n is a, c, g, or t
  misc_feature (1395)..(1395): n is a, c, g, or t
  misc_feature (1397)..(1397): n is a, c, g, or t
  misc_feature (1415)..(1415): n is a, c, g, or t
  misc_feature (1454)..(1454): n is a, c, g, or t
  misc_feature (1488)..(1488): n is a, c, g, or t
  misc_feature (1513)..(1513): n is a, c, g, or t
  misc_feature (1524)..(1524): n is a, c, g, or t
  misc_feature (1557)..(1557): n is a, c, g, or t
  misc_feature (1561)..(1561): n is a, c, g, or t
  misc_feature (1578)..(1579): n is a, c, g, or t
  misc_feature (1582)..(1582): n is a, c, g, or t
  misc_feature (1590)..(1590): n is a, c, g, or t
  misc_feature (1600)..(1600): n is a, c, g, or t
  misc_feature (1646)..(1646): n is a, c, g, or t
  misc_feature (1656)..(1656): n is a, c, g, or t
  misc_feature (1658)..(1662): n is a, c, g, or t
  misc_feature (1664)..(1665): n is a, c, g, or t
  misc_feature (1706)..(1706): n is a, c, g, or t
  misc_feature (1710)..(1711): n is a, c, g, or t
  misc_feature (1713)..(1714): n is a, c, g, or t
  misc_feature (1756)..(1756): n is a, c, g, or t
  misc_feature (1758)..(1759): n is a, c, g, or t
  misc_feature (1775)..(1775): n is a, c, g, or t
  Peptide Sequence Number=SeqID_7867
  Probeset Number=SeqID_13841
gcagtccaccgcacccnacnttacttgctnacttatnacaaatcatagaaacctgagactcgtcgtctaacccgagccagcgccacgaaatactgatgataacgccaatctcctcatctcgaccgcgccacgccgcgcccctcaccatagatactcattatgaggtatagcacacacccgcgacgccgacacagggacagaggccaactgcgtttgagtcgccgaacctcatccttcccacgccgccncgatataagatagcgatatcaataccatataacgctaccggccgtcaaatactaccatttcgacgctctgctctcctaaatatcataattgaggagctagagatttctactaatcagtcatgatcacaagagaatagtaatacataaatcgagacagcggcanatgtactagaatacgcgcgtgtgacaagcttagacacgtctaagcagacatatgcatccgaccccgtcccatcgatatagcacgaatggacactgaaatgtatgtcgctctagcgctcttggtcccgtgtactatgtataggaatatgtaactgttgtcttcaccgtctcgataaagccataagactcccgctcctcttacatgtgtcagctacggacgtatacgcgcatcgagaatgtagagaactatcgtgagtccgccgtgngacatctcgcccgcnacnatgacgctctgctgctggcctgtgacttgcaccgtgtctttcactcattatgtcatagacgggttatcgccgatgtgtgtgtgagctatggtatgtatcctnctnattcaatgtatnacatcccgatctggcttctcggctttctnctacctcgcatgcgtcgctgtctgttcacacgcagaagtagatgatntgatggttgagatagtaanagtatgcacgacatacgccgtactatcatgcactcactctccactcatcattgtgttctcttcggctgtatatgatagttgtatatggctcnnntantcactgatcacncaccagagactcgcacagcgatcgccgnctgtatgtcgtcttnactctgtatcgtctcaacaacggtgnngngtcgncattgtccacggttctgtatacatccttagtgtctcagactagtacgaacgaagcaacacacatntgtctaatcatatctagtactagaataatctaagcgncagagacctcatgtgttcgcttcacgctataantttgttntcancttaganttggcttgtgtatagtcacgagtatagttagtgctattgatctaaggtgtgtgagagacgcgccatctcactcgagctacgcgngtccatatattntcgtctctcatgacgtccgcgtacagagcgcgataccaganattangtctacananaccgatactagtgcgtantcacgactgttcgcatctgcctttcctgtcgtaattaancaagtgagagacagatattatcaacgtaggtatncactacgctagtatatatagttttntctgatcagtngtctaactcacactaacgacgttaacagatgtnctcnattgacgaatcgtgctnnttntctgtgtntgtccggtgntttctcaaactgtcgcacatcgaactacgacgctgacatcaccacntcacacacantnnnnngnntatcagtagagacaatcgctctatgccatcagaacgaaacnggtnntnncatgcatgactccacgacttcagatactatatcgaaatccgncnnactgtactcagacacn

SEQ ID NO: 4063 - DNA, 1545 bp, Glycine max
  misc_feature (21)..(21): n is a, c, g, or t
  misc_feature (30)..(32): n is a, c, g, or t
  misc_feature (35)..(35): n is a, c, g, or t
  misc_feature (350)..(350): n is a, c, g, or t
  misc_feature (787)..(787): n is a, c, g, or t
  misc_feature (803)..(803): n is a, c, g, or t
  misc_feature (1066)..(1066): n is a, c, g, or t
  misc_feature (1084)..(1084): n is a, c, g, or t
  misc_feature (1146)..(1146): n is a, c, g, or t
  misc_feature (1267)..(1267): n is a, c, g, or t
  misc_feature (1281)..(1281): n is a, c, g, or t
  misc_feature (1291)..(1291): n is a, c, g, or t
  misc_feature (1330)..(1330): n is a, c, g, or t
  misc_feature (1332)..(1332): n is a, c, g, or t
  misc_feature (1502)..(1502): n is a, c, g, or t
  misc_feature (1504)..(1504): n is a, c, g, or t
  Probeset Number=SeqID_13842
ttttctaagttgttgataatncaaaatatnnnaanattatattataacgatgtgccatctatagtgtatacaccccaacaaacaccaccacaaactattatgaatacgacagagatctcaccaccataataagaagtacatttatcgtatttatgagactccctcgacctcctcttctctgcagcacaacggagcacctacttctcttctatatcttcttatcacgtcgcgtacctgcacgatatgcaatgcatatcatatccacgatacaagtaacatacgctctgcatccttatggggcaagtggcttctatgtgggtgtgctgttatagagtgctacctaatccctngccgcgcgctgcgtagtacataaacacgcacgagtactagagataaatatagatacattaatacagcagtaaggaaaacttaatgttctatacctctctctcgtctatctcctcaatcaacaccaacgctctttcaaattctctattatcgttgatatcatctcggtatatcccaccccactcgcacacctctcgtagcgatctcagcgtcctattctctactcttctcattcgactctgagctctaatctacgctccctcgacgtcgacgacctttgcatataatggtgatgtgcgatggatgttaatgatgtaggagaatgatatctatcattcatacgatatgggagagaacgaaaaatgtagtcaggcactgtaaacgagtttaagaatgaaaatgtcttatagtgaactcgcaagatagaagtacgttacgntgcaaccgcataaagnataactagaaataaagactactataacaaatgcgttgtagagatttgtcgaccaccctctctcttccatacctcctatctcactatccacctcaccaccgtaatatgagttatgtatgttctggatatgtatgtatcgttcgtgagatgtgacatctcgcgacgtggtcactacacgtgaagattcgctctgttactgattatcttcgatgctgcgcctcctctctattctctcgcgcgctctcaacgacgtctggtcgttcngtcacacctcctcttcangctctagttgcgtgctatatacttcgcgaagttctctcctctgctcgagtcgctcgacacanggatccactacgagtagaggggaccctcttgtggtgtcgtctacggtcagtgtggtattagtctctctgtctctcaattcacacttatatgcccctatatatctctctatatcatcctctnctctccagtcacgncgcacgtgtnggggtgtatatacgatcgcacgtcgagcgatagcagtancncacgcacgcctctcatggagctaatagctggcacataccactagcgcctaggctatactccatgtgtacacactccgtatatacttcagtacatcattggcacagtgtcactgattcacgtcatcagacatactctaccgctatgactctatatcttatatatctacttntnatctcacactcatcgaccgctctatacactcatctctacaa

SEQ ID NO: 4064 - DNA, 346 bp, Glycine max
  Peptide Sequence Number=SeqID_7868
  Probeset Number=SeqID_13843
ccacaaagatacaaaatcctttccttacaaaagtatcaatatacagtacagtgtcatatatttagaataaagaataaacagattttattattttatttttttgggtgaggaggaggtgatcaatcatgaacgtggcttgtgtaatagtacttagtatgacaatcggtcaagtctacatgcaattttgtgtaagtcttttttggaaaacaaattgtattggaattgctaggaatgagaaaacaacgtgtcacagttgcattatgtttttaaaaaagtaaaatggtaccatagacaaaactgctaaaaatcataactgaagcatatacccatacatagataaaaatgg

SEQ ID NO: 4065 - DNA, 1628 bp, Glycine max
  misc_feature (14)..(14): n is a, c, g, or t
  misc_feature (69)..(69): n is a, c, g, or t
  misc_feature (71)..(71): n is a, c, g, or t
  misc_feature (100)..(100): n is a, c, g, or t
  misc_feature (108)..(108): n is a, c, g, or t
  misc_feature (110)..(110): n is a, c, g, or t
  misc_feature (117)..(117): n is a, c, g, or t
  misc_feature (119)..(119): n is a, c, g, or t
  misc_feature (135)..(135): n is a, c, g, or t
  misc_feature (150)..(150): n is a, c, g, or t
  misc_feature (181)..(181): n is a, c, g, or t
  misc_feature (322)..(322): n is a, c, g, or t
  misc_feature (324)..(324): n is a, c, g, or t
  misc_feature (344)..(344): n is a, c, g, or t
  misc_feature (362)..(362): n is a, c, g, or t
  misc_feature (370)..(370): n is a, c, g, or t
  misc_feature (473)..(473): n is a, c, g, or t
  misc_feature (490)..(490): n is a, c, g, or t
  misc_feature (513)..(513): n is a, c, g, or t
  misc_feature (524)..(524): n is a, c, g, or t
  misc_feature (532)..(532): n is a, c, g, or t
  misc_feature (534)..(534): n is a, c, g, or t
  misc_feature (580)..(580): n is a, c, g, or t
  misc_feature (584)..(584): n is a, c, g, or t
  misc_feature (603)..(603): n is a, c, g, or t
  misc_feature (627)..(627): n is a, c, g, or t
  misc_feature (719)..(719): n is a, c, g, or t
  misc_feature (722)..(722): n is a, c, g, or t
  misc_feature (724)..(725): n is a, c, g, or t
  misc_feature (738)..(738): n is a, c, g, or t
  misc_feature (765)..(765): n is a, c, g, or t
  misc_feature (778)..(778): n is a, c, g, or t
  misc_feature (785)..(785): n is a, c, g, or t
  misc_feature (888)..(888): n is a, c, g, or t
  misc_feature (890)..(890): n is a, c, g, or t
  misc_feature (893)..(893): n is a, c, g, or t
  misc_feature (921)..(921): n is a, c, g, or t
  misc_feature (935)..(935): n is a, c, g, or t
  misc_feature (977)..(977): n is a, c, g, or t
  misc_feature (1015)..(1015): n is a, c, g, or t
  misc_feature (1018)..(1018): n is a, c, g, or t
  misc_feature (1033)..(1033): n is a, c, g, or t
  misc_feature (1036)..(1036): n is a, c, g, or t
  misc_feature (1041)..(1041): n is a, c, g, or t
  misc_feature (1065)..(1065): n is a, c, g, or t
  misc_feature (1075)..(1075): n is a, c, g, or t
  misc_feature (1156)..(1156): n is a, c, g, or t
  misc_feature (1202)..(1202): n is a, c, g, or t
  misc_feature (1229)..(1229): n is a, c, g, or t
  misc_feature (1234)..(1235): n is a, c, g, or t
  misc_feature (1238)..(1239): n is a, c, g, or t
  misc_feature (1241)..(1241): n is a, c, g, or t
  misc_feature (1244)..(1244): n is a, c, g, or t
  misc_feature (1266)..(1266): n is a, c, g, or t
  misc_feature (1270)..(1270): n is a, c, g, or t
  misc_feature (1285)..(1285): n is a, c, g, or t
  misc_feature (1299)..(1299): n is a, c, g, or t
  misc_feature (1301)..(1301): n is a, c, g, or t
  misc_feature (1327)..(1327): n is a, c, g, or t
  misc_feature (1330)..(1330): n is a, c, g, or t
  misc_feature (1362)..(1362): n is a, c, g, or t
  misc_feature (1384)..(1384): n is a, c, g, or t
  misc_feature (1388)..(1388): n is a, c, g, or t
  misc_feature (1418)..(1418): n is a, c, g, or t
  misc_feature (1434)..(1434): n is a, c, g, or t
  misc_feature (1437)..(1437): n is a, c, g, or t
  misc_feature (1448)..(1448): n is a, c, g, or t
  misc_feature (1454)..(1454): n is a, c, g, or t
  misc_feature (1458)..(1458): n is a, c, g, or t
  misc_feature (1466)..(1466): n is a, c, g, or t
  misc_feature (1475)..(1475): n is a, c, g, or t
  misc_feature (1477)..(1479): n is a, c, g, or t
  misc_feature (1497)..(1497): n is a, c, g, or t
  misc_feature (1508)..(1508): n is a, c, g, or t
  misc_feature (1518)..(1518): n is a, c, g, or t
  misc_feature (1525)..(1526): n is a, c, g, or t
  misc_feature (1528)..(1528): n is a, c, g, or t
  misc_feature (1532)..(1533): n is a, c, g, or t
  misc_feature (1535)..(1535): n is a, c, g, or t
  misc_feature (1542)..(1543): n is a, c, g, or t
  misc_feature (1545)..(1548): n is a, c, g, or t
  misc_feature (1555)..(1556): n is a, c, g, or t
  misc_feature (1565)..(1565): n is a, c, g, or t
  misc_feature (1567)..(1567): n is a, c, g, or t
  misc_feature (1571)..(1571): n is a, c, g, or t
  misc_feature (1584)..(1586): n is a, c, g, or t
  misc_feature (1593)..(1594): n is a, c, g, or t
  misc_feature (1603)..(1604): n is a, c, g, or t
  misc_feature (1607)..(1607): n is a, c, g, or t
  misc_feature (1617)..(1617): n is a, c, g, or t
  Probeset Number=SeqID_13844
aagcaagcaacagnaaacgatccacgacgacacagcgatacatgcactgagggcagcgatgcgcgcgcnangcagcacgaggacatctagatagatatanttaggatnantatgatngnatacgagtgtctgcgngttgtgtacgtagtntcatgtcgtctcttgctcgtatctatatgtnttgttataatctactcattgaggtggtttagaaaaatagatatacatatgacgcctatgttggtcgtgcgcagatattcagtagcgagtgcgagtgtcagcagtgagacgagagagagacacacagcacgctgtgtgtgtngnatgtcggtacgtgtcgccancgctcagtacgagatcgngacgtggntgtagtggaccgcacgaacgactacgtcgcagagcgagcgcgaatgatgtaggaggttgttatcatcacatatataatcactcgatatatggagtgtgatacngatgtgtgtgaagtacntatactgtatacatttgtcgatntgtgtgcttantaatctantncgtgtgatacttcatatatcgataatctcgcactatatatagcatnctantcacatacgtgctgcagcnaggtgtctatcgtatcagtctgangcggtgactctgcttgcttgtgtgtcacatatctattaactgcgtgtgactatgtcgcgtgtttagtacgcttccttactctaggctacgantantnntgtgagtgtgcgncgtactcttacatatatactgtctacntcgtagcatcacncatgtcntgtcatcacgaatctgtctctccagacgaggcttgctgagagtatcgatggaaaatcgcagtgtactatcattgtgtgtgatgtagttgtgtatgtagttctntntcntctatattcatcggtgatgatgacttantagtcactgcactncatcgcggagtatatagagtcgtgtgtgtattcgtctgactnttatatgctggcgtcgatcgtgagcgtcacgtctacanacntgagtgctctgtatntgntgttngtgcctccatccacaccctctccntcctctcctngctctgcgtcttaactaagaagcgagctgtcggctctgccatcactctctcacctctctctacgatcccgaccacgcaccnacacacacacaccacggcccaccgcccatagagatgatggtgtagntacgcatgttcataagctatcagtcgngcagnngtnntntantatttcatatatagtactcacnccanagacacgctgtctantctattaatgtatngnagaagtgagatatatgaatatctatntcnacttcctgtcgtagcgcgatgagtgcgagtgngcgttgggttggtggtgcgggnctgnggcgcgacgacgcacgcggacgagggtganaggagaggggagaagncancacacaccacnaacccncaanaacacaancaaaaattnannnaactaaagagagagaaanaggagacaacnaagggagagnggtgggnngngggnngngagaggnntnnnngcaacanncaccaccancncccnagaccaaggaaannnggagggnnagggggagnnggngggggggganacaacaaccac

SEQ ID NO: 4066 - DNA, 446 bp, Glycine max
  misc_feature (282)..(283): n is a, c, g, or t
  misc_feature (287)..(287): n is a, c, g, or t
  misc_feature (381)..(381): n is a, c, g, or t
  misc_feature (406)..(406): n is a, c, g, or t
  misc_feature (417)..(418): n is a, c, g, or t
  misc_feature (426)..(426): n is a, c, g, or t
  misc_feature (430)..(430): n is a, c, g, or t
  misc_feature (437)..(437): n is a, c, g, or t
  Peptide Sequence Number=SeqID_7869
  Probeset Number=SeqID_13845
atcaaagttcgtgcactgaaaaaaatatgagaggactctccagaaactccggcaccgcggcgattctcgcgatctttgcaatcctcgccgttcagcacttgaccgtagccgctgatttccttccgttggagacagagtgccgcggtaccatcgccgagtgctcggtttccgccgcgctcggagaagaaggagatctattctacggcggaggaatgggagcagagttcgagatggactcggagatcaaccggcgcatgttatcgaacaggaggtacatcagcnncggngcgctgaggagaaacagtgtaccttgctcacgacgcggcgcatcttactacaattgccgacgtggcgctcacgccaaccccttactctcgcggntggagtgtcatcactcgctgccggngataaatctgnnacttttcncaanattcttntctttttct

SEQ ID NO: 4067 - DNA, 1411 bp, Glycine max
  misc_feature (17)..(17): n is a, c, g, or t
  misc_feature (19)..(20): n is a, c, g, or t
  misc_feature (24)..(24): n is a, c, g, or t
  misc_feature (32)..(32): n is a, c, g, or t
  misc_feature (54)..(54): n is a, c, g, or t
  misc_feature (120)..(120): n is a, c, g, or t
  misc_feature (124)..(124): n is a, c, g, or t
  misc_feature (416)..(416): n is a, c, g, or t
  misc_feature (799)..(799): n is a, c, g, or t
  misc_feature (801)..(801): n is a, c, g, or t
  misc_feature (1052)..(1052): n is a, c, g, or t
  misc_feature (1118)..(1118): n is a, c, g, or t
  misc_feature (1192)..(1192): n is a, c, g, or t
  misc_feature (1315)..(1315): n is a, c, g, or t
  misc_feature (1368)..(1368): n is a, c, g, or t
  misc_feature (1411)..(1411): n is a, c, g, or t
  Peptide Sequence Number=SeqID_7870
  Probeset Number=SeqID_13846
gagagtggggggggttntnntttnataaagantttaccaagtaacaacaaacanccccctcccaaaagcagcagtgataaatagagtcgcacaccccccgcgcgcccccgccccccccanctcnctagtcggtccgcagatttattttaatattgtgaggagtacgaccgacattttactgagagagggataaacataaccgagcaacatgctgtgggtgttgtgttgaacgagtacacacggtcatggctggtgtacgctcgggcaccaggcagacctcccgtcaactggccatgagaacccatgcgggtctgttaggcgctagcaggcggacgaaggcagcaagcggaggtgaggctgtcgagacggttcttttcgcttttagagaaagcgcgccaaagcgtatcgacggggtncgccgggtcggggcgcgctggcgtggcggtgaggggtgcgggactgcggccggggggcgaagcgccgcgcgtgtggtcggtgggcaagcatcgtcaaggtcactgttatgtgcccaaaataacattgcaaaattaactacctccgcttatgttctcgccccagcatctaccaccaatcccctcctacgctttccacaatacccaatcacgcacacacgaacagattgagagggagcgcacgccgccaactacactaagaccgatcaaccagccacaaatttagaatatattgagtactgcgagcgaggactaaactcgacagtatagcgcctcgatccgccgcgttgtcgcaacaaccaccgtgtgtggagcgcgggcggccngncgcgggctcgcgctggcttgtgtgtggtgtagcaaaactaacgggtatcgccccgctccatcgtcggccttgcttctagttcctatccgacgcagctatacaccgagacgcatcagagtaagcgcaatgtgcgccactcaccaacactagcgcgctctatttaactacagcgcacacttaattcgtacccaacgacccaagatccgccgcaacctcgaagtgaataacccatccaccgcgccgaccgcagncgtgtcgcgctatcaggacgtgcggataccgcacacacccatccacgatcagaaaagatccatgantggtgcggtgaatgtccagcgcggacagccccgtctctcctctctgacgcctacggcgcacccactcacgacanacagtccattatcccgtcgcgcgtacatacaacacaacattcaccacccgcacgcaacaagtaccataataacgactgtctccactactacgccgcggccagctctatatcaatgaccgtganatgagcagcaacaccttcgcactcacctgtacacgtcgcaccgcccctgcgtnctactataatataccgccattctagcctatatatcctaacacn

SEQ ID NO: 4068 - DNA, 1403 bp, Glycine max
  misc_feature (42)..(42): n is a, c, g, or t
  misc_feature (92)..(92): n is a, c, g, or t
  misc_feature (104)..(104): n is a, c, g, or t
  misc_feature (308)..(308): n is a, c, g, or t
  misc_feature (319)..(319): n is a, c, g, or t
  misc_feature (607)..(607): n is a, c, g, or t
  Probeset Number=SeqID_13847
atacgcagagacaggagaaggattcataagacaccgatcaantgtgcacacgtatagtagcatagacaatatccgtaacttcgctctatatntggtcgtccagncacgtgtccatagtgacgtcgccgtgcgcagagagatctagttacgcatatcatcagatgcgcgcgcgcgtggagcgtacgtagtgatagtatgtattgagatcgacgcgtgtgatatgtcgcactagttcatcgacagtatcaagctcaggcacatatactactcccactgacggcgctccttaaagcgctcgaaactatgcngccactaaagnactcaaggaagagtgcgcggtgcgatcaacaatccccacgccgcatattgtcagtggctgtcaggatcaagtatgatccgtagttagcattatagatttacagacctgaacggtcgattagcggcaccagagtattaagcgtcgcagtgttagctggtatcatggttctgatacagtttcagggaagagtggcgcgtgtacaatacggaatattgagacatatcacacgattagttcataagcataagtacgtaacccaatctcataccatcgccacatctggcaaanacgcgcgcacatatcgacttcggcccgaatcagggacggctagcataatcgctagtcccgagtcgctgactcggacaagacggtgacatagtcgactctataaataagctacgcatagccactcctagcgaacgtggcgcaggtgttcaagtgcgggatagtaatatcgcatttccatagcgaaagttcggtactctactgtgaatacaggtgcgagagacaagaacacacaatctatcgaagagttttatgcgagagacagcagagcggctgttatttaggcggatgcggagtggcgccacgtcaccctcatgttaatcctactcctctcctatattccacgatgtctaatgttgcatgtctgctgagtctccgagacggagcacttgactattataagataatacatccacgagcgtcatcaaatactcacgcgccgatccgttctgtaagagcaaaatcaaggaacaggtcgcagccatgagtacatacatgcgcgacgttgatatttaccgtatgattgatatcgaagtgtacccgtccgacacactactcgattggcacagtgtggagctgcggcggcgagacatatctaacggcacgttctgctgtaggcaatcattttagagctacatgattgtataaacagaattgcctctcgagccccgcgaggatccgccctgagttcatataagcgtgagttctcctcgtgggtggatctcgcggctttgtttataatatttcggcttcgacatgtctacgcgggcaggcgttcgatcgggtcgctagagatacc

SEQ ID NO: 4069 - DNA, 385 bp, Glycine max
  misc_feature (10)..(10): n is a, c, g, or t
  misc_feature (112)..(112): n is a, c, g, or t
  misc_feature (116)..(116): n is a, c, g, or t
  misc_feature (120)..(120): n is a, c, g, or t
  misc_feature (138)..(138): n is a, c, g, or t
  misc_feature (234)..(236): n is a, c, g, or t
  misc_feature (273)..(273): n is a, c, g, or t
  misc_feature (341)..(341): n is a, c, g, or t
  misc_feature (344)..(344): n is a, c, g, or t
  misc_feature (352)..(352): n is a, c, g, or t
  Peptide Sequence Number=SeqID_7871
  Probeset Number=SeqID_13848
agattctctngagcaaagttttaacatgaaaggcaacaatacacttttgttgcatttattctacactactctcttggtgtttcttggagtgtcaagttcatcttcaacaggnaatnaaanttacaataacactaacantgaagaactttataatgcttccacatgtgctgctgaataaaagccagcttctattaatgatccacacgctgatatttttgaagatgcaccatttgnnnctacaatgccctagtacggaactacaagcatggtttntctgggttcgcagcttgtttattaaaagaggaggcaaactcaattgctcagaaacctggtgttgtgtntgntttccctnccccaatactgaaactccacactacacttttat

SEQ ID NO: 4070 - DNA, 1404 bp, Glycine max
  misc_feature (27)..(27): n is a, c, g, or t
  misc_feature (155)..(155): n is a, c, g, or t
  misc_feature (246)..(246): n is a, c, g, or t
  misc_feature (866)..(866): n is a, c, g, or t
  misc_feature (1023)..(1023): n is a, c, g, or t
  misc_feature (1363)..(1363): n is a, c, g, or t
  misc_feature (1374)..(1378): n is a, c, g, or t
  misc_feature (1381)..(1381): n is a, c, g, or t
  misc_feature (1393)..(1393): n is a, c, g, or t
  Peptide Sequence Number=SeqID_7872
  Probeset Number=SeqID_13849
ctgctgtagcaggagatcatatattgnggaaagcgagagtgtatgctgagtgcgaggcaaagatacctacacacagcgtagaggacatgacgtgcgtggcagaagcatatcctacacgcagactaccacgtatatgagatgttcgaggagaacanagcagtcatgcggtaaggagagaaggtggtgagaagagaggcgcgcggcgcgagatgtgctttctagcatctaggtatttagttcagtgtntataagtataggtgattaattaattaatattgatgtgagtagtattgaaagtggggagggtggttggtgggattatctgtgttgttgttataatcaaatgactaatcacaatactatattatattaaagtataataatcatatataaatataaagtaacaagaactaggagataatattaaaaactaaatgatcatagagagcgctagatgataggacagcacaattgaagagatatgaagagtcaaggaaggtgtgtagggcgggaggagggtggggagatagagaatggtaggttatgcagatcttagggtgaggagaggtggtgggatgttggagaggaatgaggtatatattatgatctgttatcatatatataacgacttgtatccagcaaactgctttatcctttgaggggtgtagaataatgtataagtagttatcgtacagagggtacaagtggtaccagatgcgcaacttcataccatcaacctgcagtagattagtaatcgtgacagtcagtgcatgagtctctatgaatgacctacctaataactacgtatgttactcagcccagaaggtaacgagagggaaccacagctaacagatagggcgcaatgngccaccacagacaactatagggaaagagagagggagaggatatatgttataatatgtagtgtgaatgatgtttatcatttattcattatattattcacaaactttaacaaatatatacaacaacgcagatatatgatacaaacaagaaggatggggnttagaaggagggattccctttctttcggctgtgggaggtggggggtggctgctatagatgtggcgcggaatccatgtaggtgacgacctgattctacacctttcgcttaatagcgagaaggtatatgtatcaagtttgagatgtatagaaggaaggtcgaagatgaaggaggagttgtagggtgtaaagaagaggagagaggaaatgagaggataagagagatatggcgagagacactgtgagcaccatatatgatatattcacatctaggggttggggtgagtggggggagagaggtgggcggctgagaagagtaaaccacaaacaaaagcaaccaggncccgccctcgnnnnntanaattataatacnaagagaagaaa

SEQ ID NO: 4071 - DNA, 555 bp, Glycine max
  misc_feature (505)..(505): n is a, c, g, or t
  misc_feature (508)..(509): n is a, c, g, or t
  misc_feature (512)..(513): n is a, c, g, or t
  misc_feature (515)..(515): n is a, c, g, or t
  misc_feature (518)..(518): n is a, c, g, or t
  misc_feature (521)..(521): n is a, c, g, or t
  misc_feature (524)..(525): n is a, c, g, or t
  misc_feature (528)..(528): n is a, c, g, or t
  misc_feature (536)..(536): n is a, c, g, or t
  misc_feature (549)..(549): n is a, c, g, or t
  Probeset Number=SeqID_13850
agcattaacatgtacattgagtattccccttcccaatctcaaacggcaaaggtgccacatacatttcctgcttctcacctgatatttttccaatttgtttaatcttcctttcttttctctacccattttcttcttcttcttctcccctccttttttccttcttctaccagcttctagaacaaggatgtgcccatttcctgcttacttgaatctcaaacacaaaactgaatctttgacaacaatttcaagattttcccaccaacccaccacagcaaagcacctggtcgcttcaaagatctgatttttagttctttggggtggggtttctaccgtttttccttccaccattggcacctgcagcagaaccaaattttgaacaaccagaatggtcaacactttatggtcactttgtgtgggtttaaacttgttggattcttggtgggtttagtttaatttttgactgaacgaatgagatcttgctcttggttggggacagggaataganagnnatnntnganagnaanngcnctcggggnataccccaagttnattctc

SEQ ID NO: 4072 - DNA, 975 bp, Glycine max
  misc_feature (1)..(91): n is a, c, g, or t
  misc_feature (99)..(99): n is a, c, g, or t
  misc_feature (104)..(104): n is a, c, g, or t
  misc_feature (110)..(110): n is a, c, g, or t
  misc_feature (114)..(114): n is a, c, g, or t
  misc_feature (123)..(124): n is a, c, g, or t
  misc_feature (128)..(128): n is a, c, g, or t
  misc_feature (130)..(131): n is a, c, g, or t
  misc_feature (135)..(136): n is a, c, g, or t
  misc_feature (140)..(140): n is a, c, g, or t
  misc_feature (147)..(148): n is a, c, g, or t
  misc_feature (163)..(163): n is a, c, g, or t
  misc_feature (168)..(169): n is a, c, g, or t
  misc_feature (172)..(172): n is a, c, g, or t
  misc_feature (176)..(176): n is a, c, g, or t
  misc_feature (182)..(182): n is a, c, g, or t
  misc_feature (186)..(186): n is a, c, g, or t
  misc_feature (195)..(196): n is a, c, g, or t
  misc_feature (202)..(202): n is a, c, g, or t
  misc_feature (205)..(206): n is a, c, g, or t
  misc_feature (213)..(213): n is a, c, g, or t
  misc_feature (216)..(217): n is a, c, g, or t
  misc_feature (226)..(226): n is a, c, g, or t
  misc_feature (228)..(229): n is a, c, g, or t
  misc_feature (238)..(239): n is a, c, g, or t
  misc_feature (242)..(242): n is a, c, g, or t
  misc_feature (244)..(245): n is a, c, g, or t
  misc_feature (248)..(248): n is a, c, g, or t
  misc_feature (255)..(256): n is a, c, g, or t
  misc_feature (270)..(270): n is a, c, g, or t
  misc_feature (286)..(286): n is a, c, g, or t
  misc_feature (303)..(303): n is a, c, g, or t
  misc_feature (305)..(305): n is a, c, g, or t
  misc_feature (315)..(315): n is a, c, g, or t
  misc_feature (317)..(317): n is a, c, g, or t
  misc_feature (319)..(319): n is a, c, g, or t
  misc_feature (321)..(321): n is a, c, g, or t
  misc_feature (336)..(336): n is a, c, g, or t
  misc_feature (341)..(342): n is a, c, g, or t
  misc_feature (356)..(356): n is a, c, g, or t
  misc_feature (360)..(360): n is a, c, g, or t
  misc_feature (406)..(407): n is a, c, g, or t
  misc_feature (833)..(833): n is a, c, g, or t
  misc_feature (962)..(962): n is a, c, g, or t
  misc_feature (975)..(975): n is a, c, g, or t
  Peptide Sequence Number=SeqID_7873
  Probeset Number=SeqID_13851
nnnnnnnnnnnnnnnnnnnnnnnnnnnnnnnnnnnnnnnnnnnnnnnnnnnnnnnnnnnnnnnnnnnnnnnnnnnnnnnnnnnnnnnnnnnaaaatagnaaaanagacanaggntaagggaannggcntnnatcnnacanaaaaagnnataagagaaacaacnaacannttntcgnaccccnttgntttccctcnngaattntgnnggcttanggnntttcccctncnncgggatccnnaantnngtntagtcanncggtcctaagatgnggttgaaaggcaagtnaaccgagattttatgtngnagtctctcananantnacttggttcaaggtntgaannaaacttgatctgtntggncacagatattagccctgaatattagagccaggtcaccgcaaactgnnattggtggcattgggatttgattttgaatgttggctggtatccacctttttttgatgcaatccttttggaatttatgagaagattttgggaggtcgtatttcgtttccatctcatttggaccctaatgccaaggatttaattcgcaagctattagcagctgacagaacacgtcgccttggaaacttaaaagggggtgctattgatgaaaaacacacaagtggtttaagggagtggattttgaagcattaattcaaagacgtgtgaaccctcccatcatccctgaagtagaacacgagggtgataccaattacttcgaaaaatatgatgatcctgctgatattgatgatacaccgggagacccatatcgaggactattcaaggacttctaatgttgccactcatgctgcaaaaaaaagtaatttttntgaatatccacatttagcaagatcattatcatccacatgagaaaaccatttgtttgtacgtggaagatccatgctgtaaatatttcaaatatatgtactgttgaaaggtaaaaaaaaaaaaaagaatcntcagccgggaagn

SEQ ID NO: 4073 - DNA, 295 bp, Glycine max
  Peptide Sequence Number=SeqID_7874
  Probeset Number=SeqID_13852
gctatgagcatctctagtcatggcagaacacatcccttggctgcgctggatgttcccactggaagaaggagcttttgacaagcatggagtccgacgcgaccgattcaccagatccatcatgacggagtacactgaagcacgcatgaaatttggtggcgccaagcaactttttgttgatgcccttcttacattgcaagacatgtatgaccttattgatgacaccatcactgttcttctttcggatatgatcacagcagggattgacacacttgcaattttatctgagtggccattg

SEQ ID NO: 4074 - DNA, 993 bp, Glycine max
  misc_feature (993)..(993): n is a, c, g, or t
  Peptide Sequence Number=SeqID_7875
  Probeset Number=SeqID_13853
ggtaccgggccccccctcgagtcagctacgtaggcccccccccaatttgtcaaaataaaaaattggtcaattaaatagagaaattagagaagagaaatgggtttgattttgtgctttatcttctttttgatttttgatttgttcttggattttatcacagaaaggagcaaaaaatcgaacaatgattccagtgtcaagcaagaaacaaaagcctcaaagactgaagaagctattactgctgctgaaccctcaaaaccagctgagctcgttgaaaaggaaaagctcgtttctgatctccaaggtgaagttactcaattaggagaggaatctgcgaaatacaataatccttcagaatacgccaagtattcaaagatgcaaaggaagatgattactctccaaagaaagcttgatgaagagagaggattgctcaagactttggctgataattatgaggctacaaaaggcaatgacaagatcaatgaagaaagcactggattgattgaaaatgagcaacctgctcctgaagcctcaagtttatcagatgctacaggtggcttgatctcaaagaatacaatcatcataaaggctgttagaataattttacccgcgattttaatttattcactgccaaacagtgcttttacagttcaaatggatgcctcatatttgagtcccttgagcaattatcttggagaacagaaaggtgatgtttacctgttttcaagaaaaattacatggattgttttctctttccgcacgattggaagacttaagaaacttgtcaaaggtgtgtctttcggaaagagttctggttcaaatgttgaacctaaaatgcaaggaaagcaaaaagttgaatagaataaataatgttggattgcttgtcttgacatggtttttcgtgatattgggtattgtaaaagaattttatgtgaaatataatttttctcgtgaataaatcctaaacttaaaaaaaacaaaaaaaaaaaaaaaaan

SEQ ID NO: 4075 - DNA, 478 bp, Glycine max
  misc_feature (79)..(79): n is a, c, g, or t
  Peptide Sequence Number=SeqID_7876
  Probeset Number=SeqID_13854
tatgaaaattggtccgatcattgatctgatcaggcaagtgggtcagcggattagtagccgaactagtgagtaactaatngaaccagtttgacccgatatatattaaaatattaaaaaaaagattaaatttgtttttgatccttgatatatacctgaattttacgtttgatccatgataaatttttccttcttatttgttcgctgatgtttgaaaagttttattttagatccctaccgtcagttaagtgatgatgtgtatgttaaatatttgataatgcgatttgtgtctgctcaaaaattgtcaatgttggtttcaaaatcaaatttaaattttctgtcagttaaaaccccccaaaattaattaaagtaaaaaaaaaaacattgagaaggtcctctctttctccctcctcttccgcaaccacctcttcctctgtgctacctccttcaccaccccttctgtcgtcttctcgcagccgta

SEQ ID NO: 4076 - DNA, 979 bp, Glycine max
  Probeset Number=SeqID_13855
ggctcgagattgccgatatcaagtattgggggaaaagagactaaaccctcatcttaccggttaacgacagtgttggttggtgtctgtgcagtgaccatgaacacccaccaacattgccgatgtcaagtattgggggaaaagagacgaaaccctcatcttaccggattacgacagtatcagtgtcactcttgatcctaggcacctctgcaccaccaccactggtgccgtctgtatggctttacaccaatatcgcatgtggcttagtggaaaggagatttatctttctgggggcaggttccacagctgtttaagggagatccgtgctcaaccacatttatttctgagattcagatgatggcgagtgagtcgcaaaactgggtattcatggtcaacattcagacaccaaccaacattgccgttatcaagtattgggggtaaagagacgaaaccctcatcttaccgctgaacgacagtatcagtgtcactctcgatcccagccacctctgcaccatcacccctgctgccggaagtcccgctttcccccccaatcccatgtggctcaacggaaaggaaatttctctttttttttccccccccccccagggggagaaggggagatcccctctcctcctctttatactcaaccaatccaccaacgataataaaattctgaccgcacgagggggcccaacccaaaggacccaatttctttcgaacccacacctcctaaccccctcccaaagactcccttcccacccgcgcaacacccaccacctctctcacccccccttgcgcttctacgccatcgctcgatccccccgaacccaacctttccgtaccctcaccacccaagcaccatgctacccccctccccccactccacccccccacaactcccacctcgacaccccatcctcacacaaacccaaagaccccaccgccccccgtctcccatccgtccacaactcacccacacccc

SEQ ID NO: 4077 - DNA, 1423 bp, Glycine max
  misc_feature (10)..(11): n is a, c, g, or t
  misc_feature (20)..(20): n is a, c, g, or t
  misc_feature (25)..(26): n is a, c, g, or t
  misc_feature (28)..(31): n is a, c, g, or t
  misc_feature (33)..(39): n is a, c, g, or t
  misc_feature (114)..(120): n is a, c, g, or t
  misc_feature (240)..(241): n is a, c, g, or t
  misc_feature (282)..(282): n is a, c, g, or t
  misc_feature (307)..(307): n is a, c, g, or t
  misc_feature (353)..(354): n is a, c, g, or t
  misc_feature (400)..(400): n is a, c, g, or t
  misc_feature (427)..(427): n is a, c, g, or t
  misc_feature (432)..(432): n is a, c, g, or t
  misc_feature (489)..(489): n is a, c, g, or t
  misc_feature (1336)..(1336): n is a, c, g, or t
  Peptide Sequence Number=SeqID_7877
  Probeset Number=SeqID_13856
ttttttcaanntttttttgntcggnngnnnntnnnnnnnatcttaatgtagggtagaacaaataatgcttgtcgcacttatgcgacgagagtattgagtgatattcgatgtaannnnnnnaatccctctcctccttgtccccacacggcgggttaatcaaccaaacgacaacagtgatatggaaaatatttgttcacgagatctgtaaccctatatatacgatgcgtaccacagccgtgnngctgcctctgtagtgtccctatactgtcaggcacgaaatangaagtatgtgtgtgtgttatgatanttcttctaaccctctatcgcttactccgtccaccacctatagttanntatcttgtgtgtcgaacgagatgatacgatgccgctggcatctcancagtagataatacaatccacgagctgnctggnggcatttgtcgatgctcaacgtgcgacctctgcctctctttctctcttcatattgtntacttggtattactctgtttctacgttatagtgtgtgtcgtgtctctgtttttgatgtttttgagtgtggttgtgtggtcggtgtgttgtgtgcgtccccgagagagtatagtatggtgtgatttgtattcctctctctctcttctctaactccaactttaaatattataatttatgacaaataataaatatatatgatactaaattaatcaaacagcgaacgacagagatataaggagatgaatttggttaaattgacaatatataagagttatattattatcatatgtataactaatatattcttgctcataatgcgagacgacggatgagtgtagtacagacgaatgagatcaagatactgatatgagacgagcgagtatgtatgggaattaattgaagtataataacggctctgcctagtacgctaatatgctctacgtctggttctggtatgttatgtgtgtagttgagatagcctctaattatcgtatgcttgtcattcgtctatcctatcgtatgttggctaaatacgtctatatatatcatcgagtatatactgaatcttatagaggagtattcgtgttttctttatatcactactcacatcctcgccgctaccttgcatctagcgcgtctgcgtgctagagcgtgtgcgtgtgtatggtcgatcgacaagactagatactgttcgacatgaccgcaagtgtgagagaatatacctcacttactcttcttatccacgcgaatcaactgacatagattagagaggtgatagtcgagacgcgatagtgaatatattagcgactcaccggtgatcagtactgagaaactatatactaattantattactcccgacatgatacgataaattacgtgtctgtatatattgttcagcgactccgctgtgttgtctatttcttgccgtgctgg

SEQ ID NO: 4078 - DNA, 481 bp, Glycine max
  misc_feature (460)..(460): n is a, c, g, or t
  misc_feature (464)..(464): n is a, c, g, or t
  Probeset Number=SeqID_13857
aattttcgcttcctttctactcgccctcgtcgtaccctcttcagagattcaaaaggacttccggctttactcataaattcagagagtcaccatgtctggggaagaagctgctcctgctgttgttgttcctcctgctgctgagccagctgcaattccagaggacatggatctgttgactgcattggagctgactctaaggaaagcccgtgctcacggtggtgtgactcgtggtctccatgaaagcgccaagcttatcgagaagcgtgttgctcagctctgtgtcttggctgaagactgcaaccagcccgattacgtcaagcttgtcaaagctctatgcgctgatcacaacatcaacttgcttactgttccaagtgccaaaaccctcggtgaatgggctggtctttgcaagatcgattcagagggtaatgcaaggaaggttgttggatgctcgtgccttgtngtcnaggattacggtgaggag

SEQ ID NO: 4079 - DNA, 1743 bp, Glycine max
  misc_feature (28)..(28): n is a, c, g, or t
  misc_feature (40)..(40): n is a, c, g, or t
  misc_feature (58)..(58): n is a, c, g, or t
  misc_feature (125)..(125): n is a, c, g, or t
  misc_feature (132)..(132): n is a, c, g, or t
  misc_feature (145)..(145): n is a, c, g, or t
  misc_feature (147)..(147): n is a, c, g, or t
  misc_feature (206)..(206): n is a, c, g, or t
  misc_feature (240)..(240): n is a, c, g, or t
  misc_feature (316)..(316): n is a, c, g, or t
  misc_feature (360)..(360): n is a, c, g, or t
  misc_feature (366)..(366): n is a, c, g, or t
  misc_feature (373)..(373): n is a, c, g, or t
  misc_feature (521)..(521): n is a, c, g, or t
  misc_feature (545)..(545): n is a, c, g, or t
  misc_feature (591)..(591): n is a, c, g, or t
  misc_feature (614)..(614): n is a, c, g, or t
  misc_feature (616)..(616): n is a, c, g, or t
  misc_feature (634)..(634): n is a, c, g, or t
  misc_feature (674)..(674): n is a, c, g, or t
  misc_feature (767)..(767): n is a, c, g, or t
  misc_feature (886)..(886): n is a, c, g, or t
  misc_feature (895)..(895): n is a, c, g, or t
  misc_feature (897)..(897): n is a, c, g, or t
  misc_feature (937)..(937): n is a, c, g, or t
  misc_feature (983)..(983): n is a, c, g, or t
  misc_feature (1040)..(1040): n is a, c, g, or t
  misc_feature (1130)..(1130): n is a, c, g, or t
  misc_feature (1132)..(1132): n is a, c, g, or t
  misc_feature (1164)..(1164): n is a, c, g, or t
  misc_feature (1190)..(1190): n is a, c, g, or t
  misc_feature (1414)..(1414): n is a, c, g, or t
  misc_feature (1432)..(1432): n is a, c, g, or t
  misc_feature (1434)..(1434): n is a, c, g, or t
  misc_feature (1454)..(1454): n is a, c, g, or t
  misc_feature (1552)..(1552): n is a, c, g, or t
  misc_feature (1644)..(1645): n is a, c, g, or t
  misc_feature (1656)..(1656): n is a, c, g, or t
  misc_feature (1687)..(1688): n is a, c, g, or t
  misc_feature (1690)..(1690): n is a, c, g, or t
  misc_feature (1693)..(1695): n is a, c, g, or t
  misc_feature (1697)..(1698): n is a, c, g, or t
  misc_feature (1714)..(1715): n is a, c, g, or t
  misc_feature (1719)..(1722): n is a, c, g, or t
  misc_feature (1729)..(1729): n is a, c, g, or t
  Peptide Sequence Number=SeqID_7878
  Probeset Number=SeqID_13858
agcattcgttctaccgcccgctcgtatntctatatgacgnagatatattatcatctgnctatcacctgtgtcatattagttatatatctattcgttctctgctagtgctagtatcgctgacgtcncgtctcngctcgtttgtctnanacctgtgctgacgcacagtcagagagcgctcatgcggtcatacgtatctggagcacgtnccatcgctcgcagtaacgtagtctgctgctgacngcgtgctacgatataagcgcacggagccgacgacgcgcggaggacagatagtcatcgacagagagatcatactacntcatatgtcgcgcgtcatctctctatttcactgacactccgtcnccgtgnagcgctngcagtgcgacgcgacgtggagtggcgcatgagtgccgcgctgtcgtccgtagttcgactagtcgacgcccagtgcgcgtagcgaacgaggagcagagtcggggacgacaactccgctatacgacagcaagacgcattgtcatcatatnatgattgacgtgtatccgcatacnccgcgtcgggccctggtccgataggcactctgtaatatcacaatantatctatgttaactacactatangntcttatattattcgtcgncgcacgccacgcgccgtcgacggcgacctcgcaggctcgnctcgcactggcgagcacgcgcgacgcaggctacgctcgcataacccgccgatactactatcgtgtgagtgcgacatcgtcgatcgcgcgtgtnacgacagaccgatacgacgcattcgcatagtacgcgcaaaggcacagactgacgcgacactaatcgataagtgcgtgcaggcgtcgagtgatcggagcgtgagtcatgtgaggtattcngcatcatcntntctaatagtattatcactacatattacacatgtgtctctnatgcatccttacgccgattagtgatgcattaatgcaattgtcggtntagagttgagaggaatacaagtgaagatcgtcatattcgcgtatatacatcatcaanagtcgacatatagatattactgtcatgatatataatcttattctcgcatgcgcttactctactacgagacacacatagacgagtatgagnantcagtacatcgtcagcatacttcgcactagtnacgattgataacttagtagtctactnttatatcaacaatctccacacctccattagtctgactatcccatcacctcatagtactaagatacaacattatcatatacagtcacgtcaatcactatctacgccaccagcatcacacccgtcactcaacagaactcctgcacaggtcagcgcacgcctctcctccgctacgacaggaaggagggtatggctacaacagaccgactgaacgaagagcaaggtgngtgctgagggagtagtgnanacagctagagacacgacacngtggtccccctcctaatcgcaatcgcactaccgcgcggactgcggccgcacgcaacaggcagcacactagctctgctcaccgcacagcttgagttgtngtactaggtcgttatgcgctcgcgtcgaacaacgacacactcgcaggactgtgtcacataccactatctagaaagaatgtgaggagtgtgannggagaggtaantatagagaaaagatgaagaggaagagaaaanntncgnnngnntagagaggagagagannaaannnnaaaaaanaaaaaaaaaaaaaa

SEQ ID NO: 4080 - DNA, 1333 bp, Glycine max
  misc_feature (62)..(62): n is a, c, g, or t
  misc_feature (97)..(97): n is a, c, g, or t
  misc_feature (453)..(453): n is a, c, g, or t
  misc_feature (801)..(802): n is a, c, g, or t
  misc_feature (806)..(808): n is a, c, g, or t
  misc_feature (810)..(811): n is a, c, g, or t
  misc_feature (815)..(815): n is a, c, g, or t
  misc_feature (998)..(998): n is a, c, g, or t
  misc_feature (1041)..(1041): n is a, c, g, or t
  misc_feature (1122)..(1122): n is a, c, g, or t
  misc_feature (1128)..(1128): n is a, c, g, or t
  misc_feature (1130)..(1130): n is a, c, g, or t
  misc_feature (1172)..(1172): n is a, c, g, or t
  misc_feature (1249)..(1249): n is a, c, g, or t
  misc_feature (1292)..(1292): n is a, c, g, or t
  misc_feature (1333)..(1333): n is a, c, g, or t
  Probeset Number=SeqID_13859
gttgtcttcttcctttttcggttttgtttcctttggccccggcgtcgggcgcaccgccccancttctccacctccccacgcccgcgcacactccacnaacataaagagaacaacacacacctcctcagactaatatcttctcctcagaatttacgctaactaccatatcactttctaaataatgggtctttatcacttccaccccaattgtcacttctagaccattctttacattatgctaggtatttgcacagcaggcgcggctacatccgctcctctcaacacctatcctccctctctcaccttctcccactatcttacactcagcatacatgaccttctctgacccaaccccaatcatcccacccgcaccgacacgctgtaagcgctctcgtcctactctctccgcctacacatctcctcaacaacagagctctcgttactccagattcngcacaaaacactacttaccaataaatcttcaaccaaccccactacagctgaaatgatatcatgagcctagaggccaagaggctacgtggacacagataggctagaattacaacattactctctgatcattccaccatttcaaccgccctccgtccctcggcttaacagccaactccccgggtcatcctcaagaacccacgggtcttcgtttattgtattaagtttagatttttatgaaaaataatagttacattatacacccccaaacccacccgctgcacattacggtttgcttacgatgtagttcgcgatgtgattgttatcgtgagactatttatctccaattannccgnnnannaccnccactaacctatctatagtcggcgtcgaagagttgacgtttgtagatttagtaagatatcgatatgatgaaaaacatatgcgacctctgaccctgatacaattacttccgaacttcgctcaacgggcgtggatattgtatcgaaaccatctccacacagcctctgcgatactctccctcgacncgcacacaaactctcatcgccacggtccacgcccacgtatacntgacatacagagaattgtacattccttctctagctcgatcacatgtcaatgtgagccgcattcgtgcacggaactcttacncaccananacacgcgcagtacgaacactctgcagtactacggatatagcntacgtgtcatagccgcgcgatctcctgtggactcgtggtcatcgtaactgtcactccacacatcatgggcacactcncccgagacatacactcagacagcaggcgctgacccgctcacgncgagacgcaccagctactgtgcgcacgcacaacagggtacn

SEQ ID NO: 4081 - DNA, 603 bp, Glycine max
  misc_feature (581)..(581): n is a, c, g, or t
  misc_feature (603)..(603): n is a, c, g, or t
  Peptide Sequence Number=SeqID_7879
  Probeset Number=SeqID_13860
tcagctacgtaggccccccccccagtctttaaaaaaaataagatctcactcaatcaaaatggtaaaattggatctccgttctccttatgacgccaagcaatatcctttcttgaatcaatgggatactgactacagagcaaacttcgatatgtaccaaaacgaaattgacaaaatcacttaccaattacaacgttctcaaagaggttttacaattatgggctcttggctctatcctgccttccaccaacgtgatttcttgatgttggacatctacaagagaaagcaagttataggtaaaattaaccaagaagaagtcgaaactttcaaggcaatcaactctaatattgctgaagatttgaataaaactttcaataccagtttctatgttcccaaggctggtcttttcagtggtttgggcttgaacgtctttgctcacttcttcaacttgcaatactctttcagaatcggattgttggtcgtccccgtccttactgactacgccattagatacttggatacttttgcttaccacaactccctggaatttttgagctggctcactgaatacagaaccgctaganctagacttgaatttgactctcn

SEQ ID NO: 4082 - DNA, 1760 bp, Glycine max
  misc_feature (1)..(1): n is a, c, g, or t
  misc_feature (4)..(4): n is a, c, g, or t
  misc_feature (54)..(54): n is a, c, g, or t
  misc_feature (85)..(85): n is a, c, g, or t
  misc_feature (98)..(98): n is a, c, g, or t
  misc_feature (140)..(140): n is a, c, g, or t
  misc_feature (169)..(169): n is a, c, g, or t
  misc_feature (183)..(183): n is a, c, g, or t
  misc_feature (215)..(215): n is a, c, g, or t
  misc_feature (238)..(238): n is a, c, g, or t
  misc_feature (313)..(313): n is a, c, g, or t
  misc_feature (352)..(352): n is a, c, g, or t
  misc_feature (387)..(387): n is a, c, g, or t
  misc_feature (390)..(390): n is a, c, g, or t
  misc_feature (401)..(401): n is a, c, g, or t
  misc_feature (411)..(411): n is a, c, g, or t
  misc_feature (414)..(414): n is a, c, g, or t
  misc_feature (434)..(434): n is a, c, g, or t
  misc_feature (439)..(439): n is a, c, g, or t
  misc_feature (552)..(552): n is a, c, g, or t
  misc_feature (580)..(580): n is a, c, g, or t
  misc_feature (582)..(582): n is a, c, g, or t
  misc_feature (588)..(588): n is a, c, g, or t
  misc_feature (665)..(665): n is a, c, g, or t
  misc_feature (917)..(917): n is a, c, g, or t
  misc_feature (1244)..(1244): n is a, c, g, or t
  Peptide Sequence Number=SeqID_7880
  Probeset Number=SeqID_13861
ncantgatcgggttcagtgagatgaaaataattgatcgagagtagcatgatgcnttcagtgatgacaatcgatagcgactgtacntcttacgagtctnaaagtagtgtaagatgtatgatcagtagtcgttcgacctcangtatacgtcgtgattccatacacacgtanacgtcacactcgantctgcttagtatcgtgtcactgcatatcgcgnagcttgtgatgagtcgcatttcntcgcatgacgcgctatgtacagtatgtaatctgatcctcgtgactgattcaaacatctgtgttgcatgtgtacgncacactactatgctctctatgtgtatagtcacatcgagnatcgatatcactcatcatctcacattagcgtaganttngagattctcgntctataatantcntaggcagagcatctcatgtnccgtngttcatagtcttgtatatcagatacattctctgtcacactccactctaaagtcgttatgttagcgtcatgtataatagagagcacgagcagagagatactcgctctctagctntgaagacagatagtgatcgtcgatgtcngnattatnacatctgatctctctcgttatgtgatacattatgaaagacaaattcacgaaggtgagaagagagtcgacagctactnaacaactcttctctctctatggtattaatggtaggcaggtggctactacgtgcagcgtcgcatgatgagctcgagagtggactagaatctgtagcattatgtaggtcgcagcgagagctcaatgacgatcatgtgattgagagtcgtagacacattccacgcggatccagcgcgaatgatagtgatacgtgaccataatcgtgatttcgagctatcgcccagagcctctctatggttcttcaatgtcacatnacattacctagatggacgtggggcaaggttagtgtgattaggctagacttctagttcgttcgtgctcacatagttacaaatgtatcgttgtatttattccgatgacccgtatgcaccacatcagcatatctaatacataaagatgaattacgtatcacgattgaacgtatgtaaagtaccaataaacgcagaagatagtgccatttggtgcgcgatagtctttatgtgttgggatgcaggtacactgacatatacgatatcgttggcaagtgatactcacgtggtcgggtagcttgactctgtagcacacgtcagtatcctcgattnttctcactctatactcttcctggaatttcaagcgtcgttctcgcggctacgggagtcgctatacccataatccatgttgatggagacgaagcgtgcaccatgacgtcttgctatggagatcctgccacagcgcattgtggttatcggctgtaccatgccgatcttaggttcaatgattgtgcgagtgtaaaacgcaagccaaaggataagcgatcacgttagttacgatactcatcttactagctcgccatatatcaccgtattctacctttccttctcggggggtgtacatagagaaggtagactttcgccttttttctttacgtagtacgagatgtatactcaagatagattgctactccgtggagatattccactgcgaggccgcggggtattctcatattgtatatgagacgcgtcctcctcatcccggtggtgatctccccacatttttactgtgtgtgttagagtagggctgagagtcaagaggggttggataaggaggggagaaggaag

SEQ ID NO: 4083 - DNA, 1629 bp, Glycine max
  misc_feature (1)..(1): n is a, c, g, or t
  misc_feature (34)..(34): n is a, c, g, or t
  misc_feature (156)..(156): n is a, c, g, or t
  misc_feature (236)..(236): n is a, c, g, or t
  misc_feature (321)..(321): n is a, c, g, or t
  misc_feature (493)..(493): n is a, c, g, or t
  misc_feature (609)..(609): n is a, c, g, or t
  misc_feature (667)..(667): n is a, c, g, or t
  misc_feature (765)..(765): n is a, c, g, or t
  misc_feature (825)..(825): n is a, c, g, or t
  misc_feature (1156)..(1156): n is a, c, g, or t
  misc_feature (1335)..(1335): n is a, c, g, or t
  misc_feature (1337)..(1337): n is a, c, g, or t
  misc_feature (1341)..(1341): n is a, c, g, or t
  misc_feature (1393)..(1393): n is a, c, g, or t
  misc_feature (1423)..(1423): n is a, c, g, or t
  misc_feature (1485)..(1485): n is a, c, g, or t
  misc_feature (1492)..(1495): n is a, c, g, or t
  misc_feature (1523)..(1524): n is a, c, g, or t
  misc_feature (1565)..(1566): n is a, c, g, or t
  misc_feature (1579)..(1579): n is a, c, g, or t
  misc_feature (1589)..(1590): n is a, c, g, or t
  misc_feature (1593)..(1596): n is a, c, g, or t
  misc_feature (1598)..(1600): n is a, c, g, or t
  misc_feature (1603)..(1605): n is a, c, g, or t
  misc_feature (1608)..(1608): n is a, c, g, or t
  misc_feature (1610)..(1610): n is a, c, g, or t
  Probeset Number=SeqID_13862
ncgtggtagacgaggagtcgtgcgagactgtatnatgcaacgacgcgtcgctgtcatcatcttctcgtgaatgtcagttcgcgctgcgtgtatcttgtgtgtgcgatagctcgatgagttgtgttttatgatccatcctgctcgctgtttatatgnacgtcattactacactcgtcatgtatatttttcctcgtatcttcgtacgcatatcctcgtatctatagtacattaaatanatgtcaatatatccttgagttatgtggtgtttgcacaggagtatccgtctgtttgcagaaggatgacagatatacacgatacgangaatagcgcgtcacagtagtgatggttgttcgctactcattcattttggcgtatattctatcttgatcgtgtctatatagctgatgtgagcgtaccttgtcatgttataatatgttggtgatcatggaccacatctacgtacagactatgttctactagacgatacagactnataacagtagatattatcactcgagatatatcattacagcatcggatcattataagggacgtggattatgtggaaagtatatagcggcgtatgtcatatatcatcatcgcatcacncgagcatccgctcaccctacttattcgacactcacatatacgctcgtgagtatgcaanagatctcgtgtactcgcatggtatgttagtacagcgtgatatatagctaacaggcgtggctgcggagtccttctcgtcgtatcatgacacttgcgcgntattctctatatcgttattccctctcaatcgatcataagtagaatgtgactgtctatgtnacatttcattctgttgtacgtcgacatcaatcgtatgtatatagatgcgttatcttgtcaatcgtaggtagggcgcgactctctattctctacttttgtatatctcgttctctggtgtgcagcgtatatacctctgtctcccgtcgacctgagaaaggagaggcacacgcacaacagacagtgagagaccatcgtacacgctctgactgagagcgctacatgtgagcctctattttcttctacatctccattatatcacatatgcgtgaccttttcttgtggtgcaccactgctgaagagcatcgataagtatgtattgtctcacacatanacgcgactcgtcgtgcattagtgtctagattatgcgtgttgcttttcgctcgatcttgacgtgtgcgctcgatgtctctctcctctgtgtatactacgatagtcgttgttgcgctcgctgcgtcttctcgcccgaccttcacacctatatcactccgtgagaagatgagtcagaccctntntctntctcctgcgcggcgctcaatgacaattatacaaatgaaagaaaagaaggatngctattgttgtagattcacatctttagttnctatcttgaggggggggggggtctctctagtttatctactatatgtagcgaggggcgggcgnggggggnnnngggccactacatgatctcatgccataannaactaccacgctcactctttctccgcgcgccgcaataatanngactggcagttcnagatgaccgnnaannnncnnngcnnnttngngcaaccaaaaatacaccag

SEQ ID NO: 4084 - DNA, 727 bp, Glycine max
  Peptide Sequence Number=SeqID_7881
  Probeset Number=SeqID_13863
gaccgatacaaaaaagctctccgaccgcaaaacgaaatcgaaaagcggagaaatcaaataaaaaatgtctcgtctcccgattctcatcgctgcttgtctcttcctctaccatctaccttctccactcgccgctgaaacagattcgccgatggcgtattctctcctccagagctacaacttccctgtcggaatccttccaaaaggagtcgtcgcttatgatttagatacatcgacaggcaaattccacgcctatttcaaagactcctgcagcttctcgctcgtgggttcttaccagctgaactacaaatcgacgatcagcggttacatctccgagaacaagctcacgaagctgactggtatcaaggtgaaagttctgttcttgtggctcaacatcgtcgaggtcatcaggaacggagacgagatggagttttccgttgggatcacgtcggcgaatttcgggatcaatgagttcttggcgtcgcctcagtgtggctgtggctttgagtgcaaggaatcgaagaaagagacgtatgacacaagcttaccttttgtttcttcttcttgaaaaggtacttttgatgagtgcccttttgaaaagatcgtgtctttaaatatatatgtttcactctcttgtccaataagatcatagtttctgaatgtatatctcttattgccattggtcgaggaatcaaaacttatatatatgttcctggatggagtttgctct

SEQ ID NO: 4085 - DNA, 2024 bp, Glycine max
  misc_feature (1)..(1): n is a, c, g, or t
  misc_feature (36)..(36): n is a, c, g, or t
  misc_feature (85)..(85): n is a, c, g, or t
  misc_feature (118)..(118): n is a, c, g, or t
  misc_feature (184)..(184): n is a, c, g, or t
  misc_feature (233)..(233): n is a, c, g, or t
  misc_feature (243)..(243): n is a, c, g, or t
  misc_feature (292)..(292): n is a, c, g, or t
  misc_feature (298)..(298): n is a, c, g, or t
  misc_feature (301)..(301): n is a, c, g, or t
  misc_feature (311)..(311): n is a, c, g, or t
  misc_feature (415)..(415): n is a, c, g, or t
  misc_feature (444)..(444): n is a, c, g, or t
  misc_feature (446)..(446): n is a, c, g, or t
  misc_feature (463)..(463): n is a, c, g, or t
  misc_feature (500)..(500): n is a, c, g, or t
  misc_feature (519)..(519): n is a, c, g, or t
  misc_feature (547)..(547): n is a, c, g, or t
  misc_feature (602)..(602): n is a, c, g, or t
  misc_feature (635)..(635): n is a, c, g, or t
  misc_feature (651)..(651): n is a, c, g, or t
  misc_feature (656)..(656): n is a, c, g, or t
  misc_feature (682)..(682): n is a, c, g, or t
  misc_feature (709)..(709): n is a, c, g, or t
  misc_feature (713)..(713): n is a, c, g, or t
  misc_feature (715)..(715): n is a, c, g, or t
  misc_feature (729)..(729): n is a, c, g, or t
  misc_feature (745)..(745): n is a, c, g, or t
  misc_feature (750)..(750): n is a, c, g, or t
  misc_feature (817)..(817): n is a, c, g, or t
  misc_feature (851)..(851): n is a, c, g, or t
  misc_feature (855)..(855): n is a, c, g, or t
  misc_feature (926)..(926): n is a, c, g, or t
  misc_feature (944)..(944): n is a, c, g, or t
  misc_feature (1054)..(1054): n is a, c, g, or t
  misc_feature (1165)..(1165): n is a, c, g, or t
  misc_feature (1268)..(1268): n is a, c, g, or t
  misc_feature (1523)..(1523): n is a, c, g, or t
  misc_feature (1561)..(1561): n is a, c, g, or t
  misc_feature (1731)..(1731): n is a, c, g, or t
  misc_feature (1772)..(1772): n is a, c, g, or t
  misc_feature (1793)..(1793): n is a, c, g, or t
  misc_feature (1841)..(1841): n is a, c, g, or t
  misc_feature (1887)..(1887): n is a, c, g, or t
  misc_feature (1950)..(1951): n is a, c, g, or t
  misc_feature (1976)..(1976): n is a, c, g, or t
  Peptide Sequence Number=SeqID_7882
  Probeset Number=SeqID_13864
ncttcgcgacgactagtagattgctagcagtcagcnagatgtctgtcctatcttcagtaccgatcttagtttcagtcttacagcnatgcagtcttgcgcatgtgcggcggatcatctngtagatcagctttacttacttctcagccgatctcatcacgatggtcctgctcacatcactcacggnagcatggtgcgtatccgcctcatctgcactatgactatgtatcaccatncctacgttcntcgacgtatatcatctcatcatcttactcatctgcgtactgttcactanacaagntgncttctgcgantgttagtatagtcgacagtcacgatcactatcacgtcgactctcactagcagcatatatggtgtcgcattgggtgatcgtcatgtcactaccatcatgcgtcantctacatcgctcgagctgatgcgtcgagnangacgcgtccgtaaccancaagcgtacgatcagactcgctgctctacactgtcgntcgacagccacgacacgcngcaccgacgagcgcagtgatctcctatntgtgcatctatagcgtgtacatcgtcttatttgcagtcgagatagagcgattcancatgctctcgtcgagcgttgtatctcagtcganatcaactcgtacacgncacantatcacatgagatgatcgatacgtantgtgtatgctcaatcagtcgcatgcantcgnanagaactcgactcanacgctgtctacggctncactnccgcatagcgatggcgctccgctcgtactctatcagcgtatgactatcatccgactcgatgtatacnccacatctgagagcttcgtctcatcgacatgatnatanatgcatgtgatacatctctatcatatcctattattacaccggtctaccatggcatagacaacgtgcgtcgnacgtattctacgacatgncgacgacatctaaatagtatctgctatgctgaccgcacaccctgtcgcccgtaatcattctgttcccgcatagctctcccactcactatagactcgcacacggtcacacnacgactatctatccatgtcatagagagagtccaatatatgagacatatcatgtatcatgagtgtcattctcatcatacccagagctatgatagattgtcccgtaatcgtantagagtgggtggctcgcagagaacatactctatgatacacccagatatcgatatactatccgtgatgtatcaactagtcatctccaatatagtgtttctttcntccattgacgctaattgtccaagaggatcaccgtcacgttcctactctgtcgcccgagcaatagtatagcatatattatcatctcccttctatgattctattacgtattactgtatcattcgattgtagagtatcacgatgcaagagcaagtacagcagcgttaagacgctcatattagcgcccctagtctatacagtcctctctatattgcacactctccgagagcgtgtgatgctcaataatgattgatgtcngacatctaagtctaactgtactctcacctcactgtatnctcactagctacgtcctctccgctcgggcgcgctctgacctgtcctcacacgtcacgctcaatcgcggcccgcgcatttatatacagtagctatcttctcgtctctccaatgctccctatgtaccaaaccgtgagcgtacacattactatttaataacgatattctccgnacagctctaatacatctcgtgcttactctgtaggttggtgnccacagtaccctttctcctanagagaatgtcttccacgtcactgcgtgtccttcagagaacagatatanaataccctagaatgaaggacagaggagggacacccgctctaactcncgcctcacggatacacgtcgagagccgcgtgagactccaccacctcccacataaattaggcannttaattggatattacttcacatganccgctgctcgcctgcgcgaagggagagaggggagggggatgtgtggag

SEQ ID NO: 4086 - DNA, 1885 bp, Glycine max
  misc_feature (51)..(51): n is a, c, g, or t
  misc_feature (180)..(180): n is a, c, g, or t
  misc_feature (208)..(208): n is a, c, g, or t
  misc_feature (247)..(247): n is a, c, g, or t
  misc_feature (370)..(370): n is a, c, g, or t
  misc_feature (375)..(375): n is a, c, g, or t
  misc_feature (399)..(399): n is a, c, g, or t
  misc_feature (713)..(713): n is a, c, g, or t
  misc_feature (877)..(877): n is a, c, g, or t
  misc_feature (893)..(893): n is a, c, g, or t
  misc_feature (934)..(934): n is a, c, g, or t
  misc_feature (1198)..(1198): n is a, c, g, or t
  misc_feature (1400)..(1400): n is a, c, g, or t
  misc_feature (1413)..(1413): n is a, c, g, or t
  misc_feature (1568)..(1571): n is a, c, g, or t
  misc_feature (1583)..(1583): n is a, c, g, or t
  misc_feature (1594)..(1594): n is a, c, g, or t
  misc_feature (1618)..(1618): n is a, c, g, or t
  misc_feature (1691)..(1691): n is a, c, g, or t
  misc_feature (1778)..(1778): n is a, c, g, or t
  misc_feature (1810)..(1810): n is a, c, g, or t
  misc_feature (1820)..(1820): n is a, c, g, or t
  misc_feature (1836)..(1836): n is a, c, g, or t
  misc_feature (1846)..(1846): n is a, c, g, or t
  misc_feature (1852)..(1852): n is a, c, g, or t
  misc_feature (1869)..(1869): n is a, c, g, or t
  misc_feature (1875)..(1875): n is a, c, g, or t
  Probeset Number=SeqID_13865
tgctgtaaattcgtgaattgaacatcgatctgagtagcgcttgtagtgttntacgttatactatgtatctgctgtagctttatagtcgttgtcgtatgtcatcgtcttttgtttattctgcatcgctctcttactctatcatcatcatcttgacggtcgtggcgtggtgatgtgatattntatttatgtgtgtgctgttactatgttntatcagctgtcgtatcgctgcattgattagtgtgtcacnttgtatttaataaattgcgcattatatcatgtttacttcatgagtaagtgcgtgcgatgttgtcggtacatatcttcacttcatatgtgtatatacatgttgacatttacatatcatcgtgtnccctntagtctgtatacctcgctgcgtanagtatcctcttcacatgtgtctatcatcgatcgtatcttcatatccagcgctccatgtctgtctgtgtgtattatagtcacggcgtagtgatgtgtgtatagtagatagatagtgcggagtgtattatctgatatacagtgtgtatgcatgtgagctatcggtaatattgagttagtagcgtatacagagcttgcatagagatcaactaatctcgccatctactctcgaacatctacatgtatcatagtacttcgtgggcgagtggatgtgtatgtgagcaaggcagcgcacacacggtctagtaggccggatntatgtgacgctagtactcgtgcgtagtgtcatttcgctagtctatagtcactggcgtgtgtcgtgtagctcgctgcgcttgctgaccgcgtatcctcagttagacgatcgatctttacagcaccgccatgagatatcgctacgcctgatgcatatgattaatanatggtacatatcgtcncgagcagacagcactgagaccagttacgacacatccgtagnatatacatatgtggtatgagcaacatacatcttcatatacgtctcttacaagctcgtaatcatcaatctaccgacattcgcagtaagaagtgaattgatctatgagtacggaattatcgttgtattatttacaatccccatcgttaattctttctccttctcaatactaatgatatattattttcttacaatataattatgtacatcatttaatctataccattttaacagtcatatttttgattgtatgaccaattagtgttnagtgaagagtgtgaattagcattatatgagtgtatagattttattaatatataagtacaggacacaacccgatatatattatgatatatacttgattatacatccaccacccgtttgtggtaacagcgcccacggagtagcgtaggatgagagagaaggggaaacaaacattccgcagtcgcgtcgcgctgaatcgtccganctttgtgtgttgnttgtgtgttgttgtatatattatatatctctctcttgattttatatctatagtactacttatttattcacctgtctctccatacctagcatatacatctctcgcacacacgcagagtcggcgtcaacaccggccgtgggctcgtgtgtggtatannnnttcctatcgtcngggcttgaccnctattcgctgtgtatctgtgtttntagatgagagaggagccgcaaccacacgaaccaccagcgcgacggccagctgaaacaatatcaaccgccgtanaaacacacaagcaagcacccaacaatcagcgagatacaagcgacagatcacgaactagccgcatacccccaagacgggcgaacgaanagcggaacgaaagaaggaagaagcagtaaganaaaagataanagaggaggaagagaangagatctttntcgctncgcttcacggtgcttcnttgtgnctgttctctc

SEQ ID NO: 4087 - DNA, 750 bp, Glycine max
  misc_feature (1)..(110): n is a, c, g, or t
  misc_feature (214)..(214): n is a, c, g, or t
  misc_feature (711)..(750): n is a, c, g, or t
  Peptide Sequence Number=SeqID_7883
  Probeset Number=SeqID_13866
nnnnnnnnnnnnnnnnnnnnnnnnnnnnnnnnnnnnnnnnnnnnnnnnnnnnnnnnnnnnnnnnnnnnnnnnnnnnnnnnnnnnnnnnnnnnnnnnnnnnnnnnnnnnnnttcccagtcaaggcggggcaagtgttgggaggggcagtgagtgcggggctttgcgtaatccgccagtggcagaagggggaacatcctaatggaaaaatcgaggncgtgggaatactgtacagtgccattaagaggcgggaagatattactaatacagcaacgtgggtggatctggctcgtattcttcagtttgctattttgggcttgaggttggcggtatcgataaacgacattttttcccccctcctgaaaaataagaatgaatattcatagactactaacttttcattccaacactacgcaactatgccaactgttttaccattcaactgttgtatagtcagtccttattatctacaagttgaaccggtgaagatactgaaatgcgatgtaatcataaatttataataatctcctcaattaatccactcataagcaggatctctattttattgacaactagttcagcctcatctgcagaaaatcctctcctccaacccttctcccacataccatttatctctccattgcacttcatgtatttctccatcattgcaaagacatcattgcctgcaaaaacttcctccccggagtgttcttnnnnnnnnnnnnnnnnnnnnnnnnnnnnnnnnnnnnnnnn

SEQ ID NO: 4088 - DNA, 1740 bp, Glycine max
  misc_feature (29)..(29): n is a, c, g, or t
  misc_feature (39)..(40): n is a, c, g, or t
  misc_feature (67)..(67): n is a, c, g, or t
  misc_feature (80)..(80): n is a, c, g, or t
  misc_feature (94)..(94): n is a, c, g, or t
  misc_feature (106)..(106): n is a, c, g, or t
  misc_feature (136)..(136): n is a, c, g, or t
  misc_feature (158)..(158): n is a, c, g, or t
  misc_feature (188)..(188): n is a, c, g, or t
  misc_feature (195)..(195): n is a, c, g, or t
  misc_feature (225)..(225): n is a, c, g, or t
  misc_feature (253)..(253): n is a, c, g, or t
  misc_feature (290)..(290): n is a, c, g, or t
  misc_feature (364)..(364): n is a, c, g, or t
  misc_feature (366)..(366): n is a, c, g, or t
  misc_feature (433)..(433): n is a, c, g, or t
  misc_feature (435)..(435): n is a, c, g, or t
  misc_feature (504)..(504): n is a, c, g, or t
  misc_feature (526)..(526): n is a, c, g, or t
  misc_feature (599)..(599): n is a, c, g, or t
  misc_feature (734)..(734): n is a, c, g, or t
  misc_feature (767)..(767): n is a, c, g, or t
  misc_feature (835)..(835): n is a, c, g, or t
  misc_feature (889)..(889): n is a, c, g, or t
  misc_feature (917)..(917): n is a, c, g, or t
  misc_feature (965)..(965): n is a, c, g, or t
  misc_feature (984)..(984): n is a, c, g, or t
  misc_feature (1005)..(1005): n is a, c, g, or t
  misc_feature (1015)..(1015): n is a, c, g, or t
  misc_feature (1344)..(1344): n is a, c, g, or t
  misc_feature (1362)..(1362): n is a, c, g, or t
  misc_feature (1461)..(1461): n is a, c, g, or t
  misc_feature (1553)..(1553): n is a, c, g, or t
  misc_feature (1567)..(1567): n is a, c, g, or t
  misc_feature (1677)..(1677): n is a, c, g, or t
  misc_feature (1682)..(1682): n is a, c, g, or t
  misc_feature (1703)..(1703): n is a, c, g, or t
  misc_feature (1706)..(1707): n is a, c, g, or t
  misc_feature (1714)..(1714): n is a, c, g, or t
  misc_feature (1716)..(1716): n is a, c, g, or t
  misc_feature (1718)..(1721): n is a, c, g, or t
  Probeset Number=SeqID_13867
acacgcatcatgattcctacgtgatctgncgtatacganntagtcgtcgtgacggagatcacgactntaaatgtgatganagcgatgatgcgtntgatcagaacgncgaaatgtgctatgtgagtatgagtatctnctactatcatgatcatatttgnacgcttggtacggtagtcgtatactgatgncgtgatnaaaatcgccgtagacacagatatagcgtgnctcgattgcggtcatagcacgcgtgtantagtcatctgagcgaagtcgattcacttacgaactgncgtgagacgtacgctgcgaatcactcattctactcatgtacataatctagtatcgcgatgatcctatacgcgantncgtatatatgtactatacgtcgtcgtacgatgttgtacgtacgtgtcgatatacactacagctgtcntnacgtatacgtctgcgatacgtcgctcgtgtagtgtgtgatatgagtggtcgattatatatccgcggtcngacgcttctcggctctccgacnactatgtagcgtcgtcgatcgacagcgtactaacgtcgtacgatgatgtatgtcaatctaccgtccgatcctngcgtactcactgatactagagatatgcggtgtgtatgtatacgtgatagccgtaatactgagatgtgtctatctacagcggctacttagcatcgatatcgagagtgcgtcctatgtctccttcagttctctctantctatacattcagttcgttccatatatactgantgtgatgatctaactaagatctgtcactgctctaacattatcttgtcgacgtgtgtagacgagtcgtnactgttattagatgtctgcgcatgtcatttcgtgtacatctataatgttctctntgtgtaaatatcgtctggtagtgaggtnttatcgatctatctgttgtcttctatatgagtgtcgatctgcgagcantcagatcaccttgctgcgnatatcacgccgtcaactatgntacatacctnagcacttgtgatgacatgctcaaagcgcgtatcgtactactagtgtggataggtgaagtgctctgtgatactagtatgagtagagaaatatagctttgtgagagatactatgctatccatttatatgtcggtacacattcttttcttatgattatcgtagctcctcgtctccgttacgctgtctcgcgatacgtatataatatacacatctggaatataattagattagagaagaggaggaaggaataagaagatagaactacttattatgagagacgatctgtcgaatagaagtagagacgcagagagaccagacaggagtcgtaatnttatatgtctgaaagagntcgatgcaggtgagagatggatgtagtcacagtctcgtgcgtctcgatctcgccgacaagtctaagatagaccgacaaagagtgcgtgtatcgaagagnagtggtgtacatccccatagaatatcggttggagagagatgtgattatgtagtagatataaatacgaatcgcaacaatataatgtgactatngcgtatattaggtnggaggagggcgtgggagaatgaggagagagagagaggggtgtgttcttttcttcctgtggtgtgacattcgataactatgaatctcatatcgacagagaatcttttcaanataanaagtttgtttttctacaagtnganncccgccncncnnnncaacacaaacacccaacca

SEQ ID NO: 4089 - DNA, 1620 bp, Glycine max
  misc_feature (21)..(21): n is a, c, g, or t
  misc_feature (86)..(86): n is a, c, g, or t
  misc_feature (145)..(145): n is a, c, g, or t
  misc_feature (190)..(190): n is a, c, g, or t
  misc_feature (314)..(314): n is a, c, g, or t
  misc_feature (377)..(377): n is a, c, g, or t
  misc_feature (416)..(416): n is a, c, g, or t
  misc_feature (486)..(486): n is a, c, g, or t
  misc_feature (526)..(526): n is a, c, g, or t
  misc_feature (600)..(600): n is a, c, g, or t
  misc_feature (619)..(619): n is a, c, g, or t
  misc_feature (622)..(622): n is a, c, g, or t
  misc_feature (654)..(654): n is a, c, g, or t
  misc_feature (662)..(662): n is a, c, g, or t
  misc_feature (732)..(732): n is a, c, g, or t
  misc_feature (858)..(859): n is a, c, g, or t
  misc_feature (861)..(861): n is a, c, g, or t
  misc_feature (868)..(868): n is a, c, g, or t
  misc_feature (888)..(889): n is a, c, g, or t
  misc_feature (912)..(912): n is a, c, g, or t
  misc_feature (993)..(993): n is a, c, g, or t
  misc_feature (1031)..(1031): n is a, c, g, or t
  misc_feature (1078)..(1078): n is a, c, g, or t
  misc_feature (1098)..(1098): n is a, c, g, or t
  misc_feature (1155)..(1155): n is a, c, g, or t
  misc_feature (1190)..(1190): n is a, c, g, or t
  misc_feature (1261)..(1261): n is a, c, g, or t
  misc_feature (1463)..(1463): n is a, c, g, or t
  misc_feature (1547)..(1547): n is a, c, g, or t
  misc_feature (1571)..(1571): n is a, c, g, or t
  misc_feature (1588)..(1589): n is a, c, g, or t
  misc_feature (1592)..(1594): n is a, c, g, or t
  misc_feature (1598)..(1598): n is a, c, g, or t
  misc_feature (1602)..(1604): n is a, c, g, or t
  misc_feature (1619)..(1620): n is a, c, g, or t
  Peptide Sequence Number=SeqID_7884
  Probeset Number=SeqID_13868
cattgtgctgcgtggtcggcntcggatcagcgtagcgtgtcgtcgttacatcacactcactcgaccgttatttgtgctctgagcgnctgcactatagctcataaataacacaataatacgtatcgagacagagatgatgatatanaaatagaaggaccgcgtgatatgagaccgctggtggacggctacncgaatcgacgacctctgctcgcgccatagttgtatagtgtctctgcacagtcggtgagtatgtattgagcacgacagctagaagcagacacacacagacaacagcagacggtagatggtcgtcngtagtagatatcgcgcccgtacgatgccacgacagctgtatctttatagcgcgtgagatatantgagagtgacacagacagagagctatgacgagatttgangcaggtggcgctcagatgctgcgtttggtgagatgagacagcgagtcgtgtgaacgcacgcagagcgatntatgtacacatgcgccattgttgtgtatgagcgatggcangatggtgcagtagtggtatagagtgaatcatatgtaatgacaagtgatcatataatggtaaggttaatgatagngtcgtatcgcgtctccccntcntataatatagagtgtggtgtgtgtggggtggngaatgtgnatcgatccacacatatacagcaagcggcgaggagcaagaggacaccactacgcccacagaaaacccatantcgttgttgtcgcgaggacacagaacaagcagagtcggtgtatatttatttcgaacagaagagatatggagatgaaggaggcaggcagacggcgcggtgccgcggtgtttattattatacagtctnntnttgtgtnggtctttttgacacgcaccnnatatatatattaatttattatanataattagttatatatcatctatatatactacaatgtgtcattactatactatcacacgcacccacagcgaggcacagcgnagcacgcaccgcgcctcggtcgtgaggatagcgataancagactccaatattcaccgaattcatcagtcagatttccacacattncgaccgtatcgagacgatgnaagccgtgttgggatgattacacacgagtcttcctacatcacgaacgagaacatcgnatgacactgaaatgaatatcataacatagatactnatctctcatatattcgctctccgtctttgcgcccgttgatttataaacaatatattgtgtatatatctatntcgttgcaattatatcaatattattgttagttagagccgaagtggttgtgtgtagggagagggaggaggaacaatgttaggctcacataaaagagatacccggcgcgagcttttgagtgctcgctggtgatagggcgagagaattcgtgcacgatagatgacccaacatctctgtatggcatttcgtatgtcgatgttttancgagggcaattggggatgcgtgtaaacactgtcgtcgaccccgcacatcgtgactatatatcgagaggatggatgttgttgcgntaacaatacaagaatattacaaantcgccctgttccccggnnccnnngaanaaannngaacccacacccccnn

SEQ ID NO: 4090 - DNA, 581 bp, Glycine max
  misc_feature (192)..(192): n is a, c, g, or t
  misc_feature (201)..(201): n is a, c, g, or t
  misc_feature (230)..(230): n is a, c, g, or t
  misc_feature (245)..(246): n is a, c, g, or t
  misc_feature (280)..(280): n is a, c, g, or t
  misc_feature (554)..(581): n is a, c, g, or t
  Probeset Number=SeqID_13869
gatccaaagtcgcatcttttgcttcactctacgcagatcgcagcaaaccagagattgaactccgacgatgcctcccgtcgctcctcgatccggcgatgccatattcgccaacgtcgaacgcgtcaatgcggagctgtttactttgacgtatggcgcaattgtgcgtcaattgctcacggatctggaagaggntgaggaggntaacgagcagcttgatcaaatggggtacnatattgaaatccganntgatgatgagtttttagctaagtctaatgtctcnagatggcacgatttcagagagactactgatggtattggcaagggtggttttaaaatggtccttgggggtactgcatctgggaccattggggatgctgatgggaactggtgtaaaattggtttgggaggaaaaccatgggaaaatttggttgacttcctgaaacgtgccaggtttggactattggaactccttaggggagcccccaaggggcctttaaaaggggggcaagaaaagggggaaactgggtctcgggggaacctcggggggagcgggnnnnnnnnnnnnnnnnnnnnnnnnnnnn

SEQ ID NO: 4091 - DNA, 655 bp, Glycine max
  Peptide Sequence Number=SeqID_7885
  Probeset Number=SeqID_13870
aaagactctgtgaagtgtgcgtgagaaaggaacagagagaagaaaaagaaaaaagatgggaaggagagaaagagaatcccgattgtaccgccactttgggggaactccttcgggcgaaatcacttcctcttctaaagaaagaagccctttttcctatttgggagaagcataagtttccacctagacgaccgccgtagtcccctttcctccagagcgtatgagatgcctctcgtcccctgaaacgaatatgcccgagtctgcaagaaacctaaaaccaatgtccattatccctccggcggtaagcctcgccccgtatatcaacgagctgtgaaatgctaccacaggaaccttatgcagctcttgattcctatgttgcttgggcattagagctccctttaattacgcgaaacagcctctcaggaccctataatccgacaagaatggaagcgcccacacaggtaacaaagtggatgctaaccacaggtcaagggcacgacatgcgaagctatgtcacataacttagtgcttttagagaggatgaccgccttgatgaagctgaagagttttggacgagttatttatggcagacatggaaagcttgcctcggaaatcttttgaaaaaatgatatctatctaccataagaggggcatgcat

SEQ ID NO: 4092 - DNA, 1512 bp, Glycine max
  misc_feature (54)..(54): n is a, c, g, or t
  misc_feature (230)..(230): n is a, c, g, or t
  misc_feature (353)..(353): n is a, c, g, or t
  misc_feature (427)..(427): n is a, c, g, or t
  misc_feature (478)..(478): n is a, c, g, or t
  misc_feature (480)..(480): n is a, c, g, or t
  misc_feature (553)..(553): n is a, c, g, or t
  misc_feature (655)..(655): n is a, c, g, or t
  misc_feature (720)..(720): n is a, c, g, or t
  misc_feature (743)..(743): n is a, c, g, or t
  misc_feature (1163)..(1164): n is a, c, g, or t
  misc_feature (1238)..(1238): n is a, c, g, or t
  misc_feature (1414)..(1414): n is a, c, g, or t
  misc_feature (1442)..(1442): n is a, c, g, or t
  misc_feature (1470)..(1470): n is a, c, g, or t
  misc_feature (1472)..(1472): n is a, c, g, or t
  misc_feature (1475)..(1475): n is a, c, g, or t
  Peptide Sequence Number=SeqID_7886
  Probeset Number=SeqID_13871
cgcgtggcgagagagaacgaagaatcaggacgaagagaatagcgacttgtgttngtaatgtatgaggcctcatagatgaataagtatttggtaagagtagaatgagatatagcacgttgtgagatgcagagaggcgatagtcctctattgttgacgtgtgtccgcgtgaacggttgaagttaatataaagatagagcgcgggcggcgagtgccagagtagcgtaagagtntgtcggtgtgcgcgcgcggcgcgagagaataggtttatagaagcgctctatgatattgtgaatgaggagcctcgtctcgtctctgtggtcaaggggagagtgtatatcgagtccctgtgggtngcgcctcgttcatgcatcagtgtcgatcgcttgtctcgtgtgttagagagcgtgtagagagacgagcgcgagantcgacctagatacaacgcgggtgttgtatcatagatgaacacgcccgtagntncattggatagagaatcaatgagaagcgtagtggtaagaagaaggacggcgacaacgagaagagagaggtcgcnctcgcgaggaggctgcatagggtaggcgagagcgcgtcacttattagttatagcgtagtgtgcgtggtgtattatccacgcacacgccgcgtgtcgcgtagncggtgagccagcacggtgcggagtgggtgaccagagcacggggcggccatattggatgtggtgtntttttattttatttcatcacatnagtcaaaaagtgcacgactgccggttagtctcacgagagagaaagagttgagttatagtcgtggcgactccatcgtggtcgagctggtaacgagtaaggtcatccaaaggagaagatagccaacagaaaccgaaggtatgcgagaagataggtagtagaaaagactatgagtgaggaatacacgtaggctatcactgcggagattacctggcaccggctgcaagaataatgtgcacaacaagtagatgtcgtagagtgtataagggtcctgacaagccatggtgcgacgctagatgtcgactggccatgtttctgcaacgacacgtgatttttgacgtatacaatgtgttacactgttatttgagttgcgacgtgttgttgttgtacacatattccctccaacatatgatcgtcttcggnncatagagatagatagcttaggcgcgtgggtggtgcagcgacatcgatggtgttgtgtctcggacaccacacgtncggccactatgagcacacaaagagacgcggctgcatagacaggaaagagtatgtatagcggcaagatgatgtctgtgtgagtgagaggggggagaccctacaacgttaagacttggatcttacggacgggtgaggtagacgccccggctcagctccccatttcctggttgtgtgtnttgcattctacgagaacaacacaacacnacacaaggaacgggaagaacaaacaagngnggngggcgccgcgcgcggtgagagacaccccccccccccc

SEQ ID NO: 4093 - DNA, 447 bp, Glycine max
  Peptide Sequence Number=SeqID_7887
  Probeset Number=SeqID_13872
gcccaatcaagcccagtcagacagatttgcaggaagatgagagagataatggttaacccggcacctgcctctgtttttaaagaattggtgggcaagttcatccctgaaatgattggaaaggagatttagaaggccccctttagcatatatcctttccagaatgggtttttttgtaaagttaagatttttaaagctcccaagtttgatttaggaaaactgatgggggttcatggtgattaccccaaaaatgttggtgccaaggtggatagaccccctgatgaacccttggctgaggaagccacttaagtagttggggcttgatccgaaaaaaaatgcctttttgtttgtttaaaattcctgttgcttttccaaaaatttatttttccgttttgttttgccctttaaaaacccctttgtttttgcaaatttaaatctgtttttttggcc

SEQ ID NO: 4094 - DNA, 366 bp, Glycine max
  Peptide Sequence Number=SeqID_7888
  Probeset Number=SeqID_13873
cggatagaggccgcggaagtggacgagtatgctcgtggcatgatcagtggttcttgatcatcactttattaagagcttggactctactatataggtcctgggggtggtcataacataaatgatcttttcaccattctcaataaactttaaagcactaacacaaccatccctgtatttatccatgctatcacttaaaaaggccgcagatacccatatgcaaaaaaggcatttttcaaataccattgagttaccaaattttatccaccaactggtaagcaattcaaatacaatgttttccactcagtataatacaacatactttgcttaatcattttatttctcataccaaaactgacaaaatacttt

SEQ ID NO: 4095 - DNA, 1539 bp, Glycine max
  misc_feature (1)..(10): n is a, c, g, or t
  misc_feature (24)..(25): n is a, c, g, or t
  misc_feature (36)..(38): n is a, c, g, or t
  misc_feature (41)..(41): n is a, c, g, or t
  misc_feature (43)..(43): n is a, c, g, or t
  misc_feature (97)..(97): n is a, c, g, or t
  misc_feature (117)..(117): n is a, c, g, or t
  misc_feature (126)..(126): n is a, c, g, or t
  misc_feature (135)..(135): n is a, c, g, or t
  misc_feature (152)..(152): n is a, c, g, or t
  misc_feature (165)..(166): n is a, c, g, or t
  misc_feature (194)..(194): n is a, c, g, or t
  misc_feature (230)..(230): n is a, c, g, or t
  misc_feature (232)..(232): n is a, c, g, or t
  misc_feature (268)..(269): n is a, c, g, or t
  misc_feature (461)..(461): n is a, c, g, or t
  misc_feature (463)..(463): n is a, c, g, or t
  misc_feature (478)..(478): n is a, c, g, or t
  misc_feature (923)..(925): n is a, c, g, or t
  misc_feature (986)..(986): n is a, c, g, or t
  misc_feature (1103)..(1103): n is a, c, g, or t
  misc_feature (1461)..(1461): n is a, c, g, or t
  Peptide Sequence Number=SeqID_7889
  Probeset Number=SeqID_13874
nnnnnnnnnnttaattgggggggnnaaggggggggnnnggngngttagggtacgatagggggtaggagaacgcggacgagaggttacattcacactncaaaccgaccgccacacggnagggccggnccccctccncgggtcactaggggggngcggccagacggnncaacgcacgatgcatgtttcttttcggnacaacagacgcccctacacacctagggagcaaagtncncgaggcagttatatatgcgagcacgagcacggcggnncgggcagcccgcgccgcccacacgacaaccgagggactcagcgcaccgctcactcagacgcgcgccacccgcgccagagcggacagacgtctgttttgagcagggcgagagggagaggcagggggacgcaccactgcgacgcacgccaccctccctgcaattataccagacagcgcataggacaacgagagnangtgagagagagcganagtagaacataaacacggcatggcaacgtgcggcgggagctctaactcgctggtggatatgcaccacactgggagaagcccgcgcgcgcgcgactgccccgcaggccggcgcgcggcccagagcgcggcgggggcgggcggagggccggtgcgcgtgggggggagtggtccaacaaccgcgtgcggcccgcggagcgcgagtggcgtgtgacgaatattgggtgcagagagagacaaagaacgagaggcagggaggggcacggatgagacgtccgcggcccacggacaaatctaaaatagggggcacaagcgccgatggaagacaacacgtggcgacgtggaggcggccgaccccgcgccaaacgaagagctcaccgaagacggagcgagcgcgttgcgcggtgcacaactatataagagcacaccgcgccaaccgcgcaacagnnngagggggaagaacattcacactcaactagtagcgcggtagtgagggagtgggagcgcagcngcaacaccaacagaaccacgtacgaactgcgagcgtactggtccgagccatagggacctctgacagcacggacacacctgaggaacgacccgcagaaggaccagagacgcaggagcncggagccaccgccgcgagcaacactgtgcgacgtgcgagtgcgtggcgagtggacgtggtggtgacggagcgcctgcgccggccaccggcacgcggctagcctggcccgcgctccgccaacaccgcctcggtgccaacagcagtagaacggctgcggcgccggaagaggcatgggtgcggacaggggcacggcccgggaggtaggggaggagcacggcgtggtgggacggcggagcgcagcggtatgacatgaggggtgagagagacgcgagtactcgtgcgtgagtgcagcctgagcgccgccgaggcgcttgcttctgtgctgtgatgttgtgaccagcacaccgaagtagtcacngcgcattgaaaggcatcacagataaatacgcaggagagcaagcctatgggacaggaatgtacgagcagtgtgtgcgag

SEQ ID NO: 4096 - DNA, 1629 bp, Glycine max
  misc_feature (1)..(3): n is a, c, g, or t
  misc_feature (611)..(611): n is a, c, g, or t
  misc_feature (620)..(620): n is a, c, g, or t
  misc_feature (685)..(685): n is a, c, g, or t
  misc_feature (854)..(854): n is a, c, g, or t
  misc_feature (923)..(923): n is a, c, g, or t
  misc_feature (991)..(991): n is a, c, g, or t
  misc_feature (1007)..(1007): n is a, c, g, or t
  misc_feature (1029)..(1029): n is a, c, g, or t
  misc_feature (1061)..(1061): n is a, c, g, or t
  misc_feature (1080)..(1080): n is a, c, g, or t
  misc_feature (1194)..(1194): n is a, c, g, or t
  misc_feature (1242)..(1242): n is a, c, g, or t
  misc_feature (1274)..(1274): n is a, c, g, or t
  misc_feature (1425)..(1425): n is a, c, g, or t
  misc_feature (1429)..(1429): n is a, c, g, or t
  misc_feature (1533)..(1533): n is a, c, g, or t
  misc_feature (1629)..(1629): n is a, c, g, or t
  Probeset Number=SeqID_13875
nnnccccccctttttctcttccccttctttacattatccaactcgtcccctcctatcttctcacagcaacatgggaagctccaccgacgcgtgaccagcgccgcactctaacaaacataccagagaacccacccggagacatgcaggcaatttcgccactgagcacccatatacactagtaaacatcccataatacagaacaaatacggctctgtgtattctctactcctcgcatccttcgcactaccgcgctctcgtatccagcctcgcatattctcgtacatgatcgcgcgctgttggctgcgtcactcgatcagacacacgagccccccgcgtcctccaatactcatgctctctcgctgtaactcagtctgttctcgatttcagtagatttagcacccctccgatcaaaccgccttacctacatactgcgcagatttcaaccgattgatgagctcgttgtctgacaaacgacttctttgtttattccttatctctttcactccctgcgagtacgttcctcgtccggcgactgctatactttctcctgattatattctttctgcgctcggcactccccttctcactctcccccgctctttatccctacnaccgaccgnacgccaggcacctactaattagatattattcattaatataattctcaagaaccctcatattagcnaccactttatagtagtgcatctctgtcgccctcacataattatcgcccgccccatacaacctcacataatcacgcgatttttccgtcactcttccttcacctatcttctcttcgtctttctacccacacgctccccatgagtgcagaatctttccgtactctccgtcanccgagtgagagctcctcgctattcactcctttaagtccatgccattataaatcgatatgctttatgatntgtggtcaattgatgacacactagaccaccgcgcgggcatactctgtgtgtatgcgttgtcgccacanacatctacacatcttnctggatataagatatatcatancttttacttctatttagatcgtacaccatctnacttgtctcactatacatntatatataatgcgtactcgcatactcatcttctgattttctctctcctacacaacttatatatatatatattgttcctgcttctgactcttctgatcatgtatatgcgctgctncaccgcgcgcgctcctcaccgctcgccgaccggacactctgcgcgcgntcactcgatgcgctgtgcttttctcctcacancgcatcatgagcatgtagttgtatactacatgtatatctctctatatcctcgtcacgtctcgatgttattatacacactctcgagtcgcgctcggcacctcttatataccctctactactcctcataagctcgcgcgcctatgtgactatnatancgacattgacacgaccttgtatgtctactgctactcactgtcgcggccgtcatcatatatagctacaaagtagaggttgtcctgtcgttcactctcatatcttngtcactcttctatctctactactatgtcttttgggcgtacgacacatcataacatatgtgacgcatctactgagaaaatatcttgctttaacatcn

SEQ ID NO: 4097 - DNA, 527 bp, Glycine max
  misc_feature (193)..(193): n is a, c, g, or t
  misc_feature (199)..(199): n is a, c, g, or t
  misc_feature (210)..(210): n is a, c, g, or t
  misc_feature (215)..(215): n is a, c, g, or t
  misc_feature (218)..(218): n is a, c, g, or t
  misc_feature (237)..(237): n is a, c, g, or t
  misc_feature (244)..(244): n is a, c, g, or t
  misc_feature (254)..(254): n is a, c, g, or t
  misc_feature (256)..(257): n is a, c, g, or t
  misc_feature (260)..(260): n is a, c, g, or t
  misc_feature (266)..(266): n is a, c, g, or t
  misc_feature (269)..(269): n is a, c, g, or t
  misc_feature (273)..(273): n is a, c, g, or t
  misc_feature (278)..(278): n is a, c, g, or t
  misc_feature (283)..(284): n is a, c, g, or t
  misc_feature (290)..(291): n is a, c, g, or t
  misc_feature (296)..(296): n is a, c, g, or t
  misc_feature (306)..(306): n is a, c, g, or t
  misc_feature (308)..(308): n is a, c, g, or t
  misc_feature (310)..(310): n is a, c, g, or t
  misc_feature (312)..(312): n is a, c, g, or t
  misc_feature (318)..(321): n is a, c, g, or t
  misc_feature (325)..(325): n is a, c, g, or t
  misc_feature (327)..(328): n is a, c, g, or t
  misc_feature (333)..(333): n is a, c, g, or t
  misc_feature (341)..(341): n is a, c, g, or t
  misc_feature (354)..(354): n is a, c, g, or t
  misc_feature (357)..(357): n is a, c, g, or t
  misc_feature (359)..(360): n is a, c, g, or t
  misc_feature (362)..(362): n is a, c, g, or t
  misc_feature (369)..(370): n is a, c, g, or t
  misc_feature (375)..(375): n is a, c, g, or t
  misc_feature (379)..(380): n is a, c, g, or t
  misc_feature (397)..(398): n is a, c, g, or t
  misc_feature (409)..(409): n is a, c, g, or t
  misc_feature (416)..(417): n is a, c, g, or t
  misc_feature (425)..(426): n is a, c, g, or t
  misc_feature (434)..(434): n is a, c, g, or t
  misc_feature (436)..(436): n is a, c, g, or t
  misc_feature (439)..(439): n is a, c, g, or t
  misc_feature (441)..(441): n is a, c, g, or t
  misc_feature (443)..(443): n is a, c, g, or t
  misc_feature (445)..(447): n is a, c, g, or t
  misc_feature (452)..(452): n is a, c, g, or t
  misc_feature (454)..(454): n is a, c, g, or t
  misc_feature (456)..(456): n is a, c, g, or t
  misc_feature (461)..(461): n is a, c, g, or t
  misc_feature (463)..(463): n is a, c, g, or t
  misc_feature (468)..(468): n is a, c, g, or t
  misc_feature (476)..(476): n is a, c, g, or t
  misc_feature (490)..(490): n is a, c, g, or t
  misc_feature (508)..(508): n is a, c, g, or t
  misc_feature (510)..(511): n is a, c, g, or t
  misc_feature (517)..(517): n is a, c, g, or t
  misc_feature (526)..(526): n is a, c, g, or t
  Peptide Sequence Number=SeqID_7890
  Probeset Number=SeqID_13876
gtttttgcagcggctggaggtcgatctgagaagaagagaaaacaatggcagcaccacaagtgaagactggtttgttcgttggtctgaacaaaggacacgttgtcaccagacgcgagttggctcctcgtcctaactctcgcaaagggaaaacgagcaagaggacgttgttcatcaggtcactgatcagagaagntgctgnctttgctcccnacganaanagaatcactgagcttctcnaggctgncaacagatcnannggncttttnaancccnctccncgganncccccnncaccnaacccctcancntncntcctcnnnncccncnncccgnccgtcccnctcctatctttcntgntnntntttcccnncctcncccnncccccccccccttccannccccccccccntaccccnntatttttnncccccctncntcntncntnnnccttntntntcccncnctccncctccttncccgcccttcttcntccccccccgtccctccncnnctcccntccaccctnc

SEQ ID NO: 4098 - DNA, 475 bp, Glycine max
  misc_feature (288)..(288): n is a, c, g, or t
  misc_feature (290)..(291): n is a, c, g, or t
  misc_feature (368)..(368): n is a, c, g, or t
  misc_feature (373)..(373): n is a, c, g, or t
  misc_feature (380)..(380): n is a, c, g, or t
  misc_feature (409)..(409): n is a, c, g, or t
  misc_feature (411)..(411): n is a, c, g, or t
  misc_feature (457)..(457): n is a, c, g, or t
  misc_feature (468)..(468): n is a, c, g, or t
  misc_feature (475)..(475): n is a, c, g, or t
  Peptide Sequence Number=SeqID_7891
  Probeset Number=SeqID_13877
aaaaattatcacacaaaatgatatctctaaactcagaccatttgatggaatgaaaacaccttgttctctaaacgtgccttagatgtgtgtgtgccaatatccctcggtcacactcacatctatttaatgacacattcaaactcaacactacacacaaacactcactcttggattttataggcacatgtttatctttttcagtgttttttttcctttatttcacttttgaaatttttccatggagttcaaatatcgtgatggccaaatccaaaggacaccctcaccatngnnaccccctcttccctccaacacctatgtcaccaatcgcccattacaagggggagtttgcatcaggtggtttttcctangcaangttttgncggcctaaaagtttttctaaggggccatngncggtcaatgttgacaaagagttccaatgagagttggaagaaagaanaaaataagggnagggctn

SEQ ID NO: 4099 - DNA, 1368 bp, Glycine max
  misc_feature (16)..(16): n is a, c, g, or t
  misc_feature (1284)..(1284): n is a, c, g, or t
  misc_feature (1317)..(1317): n is a, c, g, or t
  Probeset Number=SeqID_13878
tctttttccctctccncccttctcccgacccgctcgggccgctcggtgggccggctccgcccataccccccccccctcccgcctccccgcctcgcccgtcccccccctccgcgccccgccccgcccccacgccccccgcgccgccgggcgaaccacgaggcgccgcgggtgtcctctagccgaagcattccaccaccctaggagcggacgcgcatataagttgaggtgtcatcgatagtgaagagacgaacctcttgcattggataccaccctaattcatgtgcacgtcctatactgcgacatttgccggccggcggccgcgagcgagtatctacaacctcactcctcccctacaagtaataaatacccccctcaccagtaatataacacccgcgcttcatagtaaagagcataataataccagcggatagatatcacactccgagacgacaagcaaaaattcattgcatgaacactcacagaacccgatacaacgactatgacaatactataaccggagtgtgcccgtacgggacgacttgatctgcttatctccgcccgtcctgtgacacctgtgttacccgcccctccgtacctaaatcctactgcagtactcacctgacttacccacagacgccgcacacaggacgtgcgccaaattaccgagaactgagtaaatatagagtatctccgccacgtcaactacctctccgcgcgagcctacctctcagcggcgagacatgccaccccccacagacaaacgctcaccacacgtcggctctccagcgtggggacgaccacacgaggatccacaaccgcgctcgcggcatgtgatatggaggaacggctccatgcgcaatcctcatgctcgccggcgatctacagctcgctacccactgagccattttcacctacttcagctactcacatgacacactaatgctcactcaacatgcaggctgatccgagtcgcaacgagacatggcgacggcagaccatacttactgactgcccgacactaatcaacacgcatttaatcgatcgacgaagcaaatgatcgagaaggaacgacaaatagaaacatagcaacaagagataaacgaccatgagaatctacactctatacatcgtgaatagttactatcctagcgtgataccgtcctggtgcttcccgcctatttacgcgacgccgaccaccttatctatacaaacagatacgcacatcaccatcctctcgcgccccgtctgcgctctcgccactctatctcttccctcgctgtctgnctgtctactctgcctactactatgatgtcgtcntgcgtggtcgtacggacctccactcctcactccgctcgcaccctgtgctca

SEQ ID NO: 4100 - DNA, 295 bp, Glycine max
  Peptide Sequence Number=SeqID_7892
  Probeset Number=SeqID_13879
tctcgcttgagagcatcgaggcatactggtagttagttatgtattacaatctgtaggatggcagctatgtcctaggactgtatatctgattgtagattgtgtaattgcgcagcgtgaagttatttgtagtttgtggacagagaatacactctgtaggagacttttgtctctgggacagcaagtgtattgctgtatagcgtgtgattccagggctctatatgatattttattatgttatcaattggtgctctatcaccctgggagattgagcctgaagtgtgcgcaaagcacatac

SEQ ID NO: 4101 - DNA, 1873 bp, Glycine max
  misc_feature (5)..(7): n is a, c, g, or t
  misc_feature (22)..(22): n is a, c, g, or t
  misc_feature (33)..(33): n is a, c, g, or t
  misc_feature (66)..(66): n is a, c, g, or t
  misc_feature (82)..(82): n is a, c, g, or t
  misc_feature (87)..(87): n is a, c, g, or t
  misc_feature (92)..(93): n is a, c, g, or t
  misc_feature (106)..(106): n is a, c, g, or t
  misc_feature (111)..(111): n is a, c, g, or t
  misc_feature (116)..(116): n is a, c, g, or t
  misc_feature (120)..(122): n is a, c, g, or t
  misc_feature (131)..(131): n is a, c, g, or t
  misc_feature (133)..(133): n is a, c, g, or t
  misc_feature (138)..(138): n is a, c, g, or t
  misc_feature (162)..(162): n is a, c, g, or t
  misc_feature (208)..(208): n is a, c, g, or t
  misc_feature (280)..(280): n is a, c, g, or t
  misc_feature (282)..(282): n is a, c, g, or t
  misc_feature (338)..(338): n is a, c, g, or t
  misc_feature (372)..(372): n is a, c, g, or t
  misc_feature (410)..(410): n is a, c, g, or t
  misc_feature (428)..(428): n is a, c, g, or t
  misc_feature (493)..(493): n is a, c, g, or t
  misc_feature (591)..(591): n is a, c, g, or t
  misc_feature (597)..(598): n is a, c, g, or t
  misc_feature (695)..(695): n is a, c, g, or t
  misc_feature (702)..(702): n is a, c, g, or t
  misc_feature (768)..(768): n is a, c, g, or t
  misc_feature (817)..(817): n is a, c, g, or t
  misc_feature (819)..(819): n is a, c, g, or t
  misc_feature (822)..(822): n is a, c, g, or t
  misc_feature (854)..(854): n is a, c, g, or t
  misc_feature (863)..(863): n is a, c, g, or t
  misc_feature (902)..(902): n is a, c, g, or t
  misc_feature (905)..(905): n is a, c, g, or t
  misc_feature (926)..(927): n is a, c, g, or t
  misc_feature (948)..(948): n is a, c, g, or t
  misc_feature (970)..(970): n is a, c, g, or t
  misc_feature (1100)..(1100): n is a, c, g, or t
  misc_feature (1111)..(1111): n is a, c, g, or t
  misc_feature (1125)..(1125): n is a, c, g, or t
  misc_feature (1141)..(1141): n is a, c, g, or t
  misc_feature (1182)..(1182): n is a, c, g, or t
  misc_feature (1191)..(1191): n is a, c, g, or t
  misc_feature (1194)..(1194): n is a, c, g, or t
  misc_feature (1206)..(1207): n is a, c, g, or t
  misc_feature (1334)..(1334): n is a, c, g, or t
  misc_feature (1379)..(1379): n is a, c, g, or t
  misc_feature (1402)..(1402): n is a, c, g, or t
  misc_feature (1417)..(1417): n is a, c, g, or t
  misc_feature (1475)..(1475): n is a, c, g, or t
  misc_feature (1484)..(1484): n is a, c, g, or t
  misc_feature (1546)..(1547): n is a, c, g, or t
  misc_feature (1554)..(1554): n is a, c, g, or t
  misc_feature (1561)..(1561): n is a, c, g, or t
  misc_feature (1595)..(1595): n is a, c, g, or t
  misc_feature (1610)..(1610): n is a, c, g, or t
  misc_feature (1624)..(1624): n is a, c, g, or t
  misc_feature (1636)..(1636): n is a, c, g, or t
  misc_feature (1670)..(1670): n is a, c, g, or t
  misc_feature (1713)..(1713): n is a, c, g, or t
  misc_feature (1723)..(1723): n is a, c, g, or t
  misc_feature (1735)..(1736): n is a, c, g, or t
  misc_feature (1741)..(1741): n is a, c, g, or t
  misc_feature (1748)..(1748): n is a, c, g, or t
  misc_feature (1757)..(1757): n is a, c, g, or t
  misc_feature (1779)..(1779): n is a, c, g, or t
  misc_feature (1782)..(1782): n is a, c, g, or t
  misc_feature (1785)..(1785): n is a, c, g, or t
  misc_feature (1787)..(1787): n is a, c, g, or t
  misc_feature (1801)..(1801): n is a, c, g, or t
  misc_feature (1809)..(1809): n is a, c, g, or t
  misc_feature (1811)..(1811): n is a, c, g, or t
  Probeset Number=SeqID_13880
ccccnnncccgccccccccccncaacccccccncacggcacccccgacaacaacaggcgagagagnaggagaggtagaaggnagganaagannaccaaagaaaganacaanacccnccannncgctatgtngngaagnttgtgggtgtagtgatgtcatcanctgaggtacgcgcggtcgctaattatattagaatgagtagtagagntataatgtgtgacccaaccggtggagtgagagggggcgaaggagaataatgttataagctgagagtagtganancacgcgacactcctcgcccgtcctactgtctcgtcactcgacaccatcctacctcnctgcgtcgtgtcgctgctgcggcactgctcggantgtgtcttactgtgactactgtcttactatatattgtncgtcgacgtcctcctcgntgcatatgcgacacacagctcctggtgatctcttgcttctagtgcctgtgtgtgtttgtgatagnatgtatatctaatatactgctcgcctcgtcgaccgtcactgctacgaaagcgaattgttacgtaccgcagcctacggcgccagtgcagacgaaatatnaagagnngagataggaaggataagagggctatgtgaaataaatactgaggagttcgtgtacatggtctaatttcttgtatgactagtgttgtgtcctctctctnttctcanttctcacctactcgctctactagtatggaaattactgcaatctgtagatctcgtgcgcgctcaccnacagcagtcatgggcagcgtgacgacccagctgtcttactaccttcatntncgncggcgttacgcgactgtctcttactgtgtatnatcatcacnctgcacatatgacgtgcggccgggtgaggaggaagaggnagngagagaagatagtataggagnngaagtatgttatatcaatgantataagactttacatctcgtanaccatagaccacggggacgtgtgggtgctcgtggctacgtgcgactttgctcgtcgcgtgactgcgcgtacgtacgcattctgcaggtcgttccataatgctgtttgcactaccatatctctcataccancgtatccgttngccagcgacttcgncacagcacgagtatgngcgatagacgtagtgtaaggagaacggtgcgcagcacccancaccacacncancgacaacaacanncacaagaaccacccatcaacaatcacgctatgtagtggtcgtgcgaggctccgtctccaccactgcacgtctcactactatcgagagctacgactcgcgtacactcgcacgacatgtgcgctcactnagtatcgctgctgatcgtacgtcgtcattgctcccacgtcgcatnaccttagtcgtcatcagcactcntgaccagctcgtagntataaaagtaagtgatcagctacgatccaatccacgtgacgctgcacgcgatgcgatncaagagatnagatgcgagtgtgatcgagatgtgcacatgctgactcgacctcacacacaactctacgcatnnacacagncacatcnacgtcatatctcgactgtgattgtagctctaacncactctgaatagcgnacacatagcgtcgnctatactacccngtgttagccctgacctacatcgcaaagtgcgctnacgtagcaatcgatctctatactgtagagtatgtacagcgcgntatcgcgtanagcgatgtatcnntcaancacacancatgtcagntctagcgtatcgagacacatancanacnanatgctacatcaaangcaatacncnagtactagcgtacgtcaattcgctcactgcctcattaggtccgctacctagactagcccagc

SEQ ID NO: 4102 - DNA, 370 bp, Glycine max
  Peptide Sequence Number=SeqID_7893
  Probeset Number=SeqID_13881
ggttggtcctcctggaactgggaagacactacttgcacgtgcagtggcaggggaagctggtgtaccctttttcactggatcctccaacgagttagtggagtggtttgatggacgaggggcagctataatcatagaccttttcaatgtctcatggaaatttgcaccttctaccatattctttgacgaacttgatgccagtggaggcgtacgtggaagaagttggtatgatgaacgtgacccgacgttcaatcactcgctgactaaaatggatggatttgaatccaagatgagagtggctggcatggcagcacctaacctgacagaagccttgaatactgatgtatgtagccctgtgcgatgctctagacag

SEQ ID NO: 4103 - DNA, 606 bp, Glycine max
  misc_feature (606)..(606): n is a, c, g, or t
  Peptide Sequence Number=SeqID_7894
  Probeset Number=SeqID_13882
tcagctacgtaggccccctccccccaatcaaactaatccattggcgtgtagtggtaatggaacatgcgcagattataacatgtgtacatgtaagagcggttatggtggattaaaatgcgaacatgcaatatgtaatggattatatgcgaatgattctatggtatgtagtggtaaaggtaaatgtgtattaccaaacacatgtatttgcaatcaaggatacagtggtcaattctgtgatactcctatttgttataataaagatggttcataatgcatgtaattatccaaacggaacgtgtatagcaccaaatcaatgtcaatgtgcatcagttaacaatcaagtattatacacaggagcagaatgtcaacttcctgtatgctatggtaaaaacgcaagtgatccaaatgtatgcagtacgtatggttcatgcgaatctccaaataattgtgtatgtaaaccaggctactctggattagaatgtcaattcatcacttgcttcggaaagagctcatcttccgaatcagtatgtaatgcaagaggacaatgtacgtctcctaatcaatgtaaatgcagaagatggttatttaggtcaagaatgtgaaatn

SEQ ID NO: 4104 - DNA, 1976 bp, Glycine max
  misc_feature (11)..(11): n is a, c, g, or t
  misc_feature (25)..(25): n is a, c, g, or t
  misc_feature (31)..(32): n is a, c, g, or t
  misc_feature (39)..(39): n is a, c, g, or t
  misc_feature (52)..(52): n is a, c, g, or t
  misc_feature (66)..(66): n is a, c, g, or t
  misc_feature (68)..(68): n is a, c, g, or t
  misc_feature (92)..(92): n is a, c, g, or t
  misc_feature (102)..(102): n is a, c, g, or t
  misc_feature (118)..(118): n is a, c, g, or t
  misc_feature (120)..(121): n is a, c, g, or t
  misc_feature (181)..(181): n is a, c, g, or t
  misc_feature (215)..(215): n is a, c, g, or t
  misc_feature (226)..(226): n is a, c, g, or t
  misc_feature (250)..(250): n is a, c, g, or t
  misc_feature (273)..(273): n is a, c, g, or t
  misc_feature (282)..(282): n is a, c, g, or t
  misc_feature (302)..(302): n is a, c, g, or t
  misc_feature (312)..(312): n is a, c, g, or t
  misc_feature (348)..(348): n is a, c, g, or t
  misc_feature (362)..(362): n is a, c, g, or t
  misc_feature (372)..(372): n is a, c, g, or t
  misc_feature (407)..(407): n is a, c, g, or t
  misc_feature (454)..(454): n is a, c, g, or t
  misc_feature (468)..(468): n is a, c, g, or t
  misc_feature (478)..(478): n is a, c, g, or t
  misc_feature (511)..(511): n is a, c, g, or t
  misc_feature (516)..(516): n is a, c, g, or t
  misc_feature (530)..(530): n is a, c, g, or t
  misc_feature (598)..(598): n is a, c, g, or t
  misc_feature (612)..(612): n is a, c, g, or t
  misc_feature (663)..(663): n is a, c, g, or t
  misc_feature (669)..(669): n is a, c, g, or t
  misc_feature (706)..(706): n is a, c, g, or t
  misc_feature (767)..(767): n is a, c, g, or t
  misc_feature (795)..(795): n is a, c, g, or t
  misc_feature (840)..(840): n is a, c, g, or t
  misc_feature (886)..(886): n is a, c, g, or t
  misc_feature (893)..(893): n is a, c, g, or t
  misc_feature (1003)..(1003): n is a, c, g, or t
  misc_feature (1025)..(1025): n is a, c, g, or t
  misc_feature (1112)..(1112): n is a, c, g, or t
  misc_feature (1146)..(1146): n is a, c, g, or t
  misc_feature (1412)..(1412): n is a, c, g, or t
  Peptide Sequence Number=SeqID_7895
  Probeset Number=SeqID_13883
tcgacgtcatntctgcatctcgtgncctganncaccatnacggagcatgcgnctgcatcatcactnantgacgtccaataatcagtcatcanctgtcagtcncggtctgataaacgantnntgcacatcactcaccacaagcgacgacacgtagtcatgttgtagcactactaatcacatnacgacgcagcacacgtcgactactcactactaantctacatgctngatacgggtcgtacacactacctncacattgagacgctcaacactgnatagtctantaatcgacgatgatacggcngcgatccgtngcgatatcatacactagctgtgcgtctactgcagancatcaaatatctantttacgacgngtaactgatgcgcagttgcggggacgcggcgtcgngagtcgtaagtagcagatagtctatcgcgcgacatcgtcacctactngagcatctgcgctncgactgcgcngatgataccgcgtcgcgcgataggcatagcggnccacnttatatagtaagtnattgtgtaccggtatgtgggacgtgcggatcaagtgcaaagtatagtgtatggacgtagcatgatgantccgctgctgatancgacatacagcatcagagctcgcaactgacaccgacgtcacacactgtcancgacanacgatcacatcgtaccgatgcagttcatgctgtgatngtgagacatcaagagcagttaacatcagtgtcacataatacaataatatcaatgcagatgnattaacaaaacgcatcaggagatgtacnatctcaatagtacgtcacagagcagtgacagcagccatcaccctnatcatcagcatattacacatactccgtacgtctgcatccgcattcnagcagcnatcgcagccagcgttggatccgtccctctgagtgccatcataattatatcatcacaactcacatgcacacactatacaatgcagcagagcgaggatgccgctgagacgtnacatcaactatcacgtagtctnttgcactagcgctatagggagatgcgaatacaatgctgacgcgagacggtgatcacacacagagttcacctgactgtcagagtgacntcagtgcggtgtagagcggtgagtcgcgtcgctnctagtagacctaccctaccgtcagctctctgctgacgcaagatacacatcgctatacgtatatacacaacgtcgtgcgcgtacgaggtgtaacacacacgaagcaggttacatacatattaaactacaatcatccggtatcaaacacggtggagcattaagtatatacgaagcgagccgaggcgtagacgcgcgcggcatccacacgcatgagcgtacacgagatctcgtcgtgggtgcgagtatacgcgcgtctagaacatgcangcatccatgtcccgcatacacaataccataatctgctcacacctcagcgtcgacgcgcaactcatgacggagagaccgtgcggtcgtacgacgaccgaggcgagcacacaatccgcatatacaacacgcgggtagagatgcaacgacgccacaaccaaacctgagagcggcagcgggtagtgcatatatacatagtgggtcgcgtctcgtcaacatcgctatacattctacaagtacgcaacacgcatgcacaggtctcaaaaataaccactagagcgagactcgtgtagatatacattcatagtgtcgcactgagcggtcgcgaacgtcggtcaccacttatccacacgcctgcgtcgtgctcttgtctctaatcaccacgtcgctcatatcgcgtataatgaggatataagaatagctgtataattattgtccactattattgtggataagatgttattattataggagacacagattaaacacgcaactggcgactgtagtgtgagggcagtggaggttatagttatatattagtctcaatctatacagcggggccgcgcg

SEQ ID NO: 4105 - DNA, 1478 bp, Glycine max
  misc_feature (1)..(1): n is a, c, g, or t
  misc_feature (111)..(111): n is a, c, g, or t
  misc_feature (130)..(130): n is a, c, g, or t
  misc_feature (178)..(178): n is a, c, g, or t
  misc_feature (257)..(257): n is a, c, g, or t
  misc_feature (528)..(528): n is a, c, g, or t
  misc_feature (1464)..(1464): n is a, c, g, or t
  misc_feature (1466)..(1466): n is a, c, g, or t
  misc_feature (1478)..(1478): n is a, c, g, or t
  Peptide Sequence Number=SeqID_7896
  Probeset Number=SeqID_13884
ncgacggagagtgttccgcggaggagttatattcacatcacgtgagtgcggtgagtggttggtgtgtgttgtgtcgttcgatacagttgacacacctcgacatatatggtnatgtgtatgcacttacggngcgcgagagtgtgtagtacagtataatgcgtctgattatcagatatgntgatcgatggctatggaccgtagaaagagcgtatgtatagagtcagatgttgaggtggtaggtccacgcgaaggctgtngagcaggctgagcggaggatagtacgacaagcgggagacgcggagattgactacgagttgtgagaagatatcgatgtgcggtgatgggtggagcgggtctagaggacgtagatactcgaccgcgcgtgaggctaactaagatgtacatatactgactcattaatactctcatagacgtaggcctctgctggagtgagagccgaatacagacataatacatcgtcagtgatagaatataactacatactgggatgagtaggtgcacgtgtgnaagcatagcgttcgaatatgagatagataccaggcagggtcgacgcgtgaggatagtcacatgtcgagtgcatgagtaaaaactagacggtggatcatgccagagtagagacgcatcagcatcttcaacgtgtagcgactacgtcgtcataaggagaggagtctagtgggagggcctcgctacggagagtggactacactataacaacatatacacgggtgggcggcttagttgtagagcacagactatgggcatgcatctccagaagatatatactctttttagtaatatacgcgtgtatgcgtcacgtgagagcgaaggatgtgggacgcagagataaagacataaagatacgcgcatgggacgacatctgtaggggtgtatggtatggcaggcgtggtgacacgtcttcattgacagcgatacgaggaagacgcgagccagctatcactgataataagggtagcttgtgtgatacgatgggatgagggtctgtctctctgggcctacgaatgcatcaagctcatgatcaagcactagagaaatcatggcagtgaccctcttgtgtctagtcctgcgacgtggtgtatgtgccggcgcagccaaggaaaacatcgtcttctcgctccgatcatccagcgtgtgataatacagacacacggtgaagtcaatcgatcagagctctggcgtgttgtacgaagctgtggaaagtgttatacaagggcgcctataggttcgtccggttggccgcgaggtctcctagccgagaataagaaggagcgacttctctgcggctggtgcctaggaagggcagcgcactactatattaagggagggcgggcgctgaccaaaaaggagaggagaaagctcccatcatatataggaagaggttgctgtgttcgcgggacatgtaaatattgataaatgtgaaagatngncgggaagttttn

SEQ ID NO: 4106 - DNA, 1575 bp, Glycine max
  misc_feature (1)..(1): n is a, c, g, or t
  misc_feature (13)..(13): n is a, c, g, or t
  misc_feature (16)..(18): n is a, c, g, or t
  misc_feature (22)..(22): n is a, c, g, or t
  misc_feature (32)..(32): n is a, c, g, or t
  misc_feature (73)..(73): n is a, c, g, or t
  misc_feature (78)..(78): n is a, c, g, or t
  misc_feature (82)..(82): n is a, c, g, or t
  misc_feature (88)..(88): n is a, c, g, or t
  misc_feature (90)..(90): n is a, c, g, or t
  misc_feature (92)..(92): n is a, c, g, or t
  misc_feature (135)..(135): n is a, c, g, or t
  misc_feature (143)..(143): n is a, c, g, or t
  misc_feature (211)..(211): n is a, c, g, or t
  misc_feature (213)..(213): n is a, c, g, or t
  misc_feature (244)..(244): n is a, c, g, or t
  misc_feature (742)..(742): n is a, c, g, or t
  misc_feature (940)..(940): n is a, c, g, or t
  misc_feature (946)..(946): n is a, c, g, or t
  misc_feature (970)..(970): n is a, c, g, or t
  misc_feature (976)..(976): n is a, c, g, or t
  misc_feature (1012)..(1012): n is a, c, g, or t
  misc_feature (1057)..(1057): n is a, c, g, or t
  misc_feature (1171)..(1171): n is a, c, g, or t
  misc_feature (1195)..(1195): n is a, c, g, or t
  misc_feature (1198)..(1198): n is a, c, g, or t
  misc_feature (1232)..(1232): n is a, c, g, or t
  misc_feature (1245)..(1245): n is a, c, g, or t
  misc_feature (1356)..(1356): n is a, c, g, or t
  misc_feature (1358)..(1358): n is a, c, g, or t
  misc_feature (1422)..(1422): n is a, c, g, or t
  misc_feature (1432)..(1432): n is a, c, g, or t
  misc_feature (1462)..(1462): n is a, c, g, or t
  misc_feature (1484)..(1484): n is a, c, g, or t
  misc_feature (1526)..(1526): n is a, c, g, or t
  misc_feature (1557)..(1557): n is a, c, g, or t
  misc_feature (1575)..(1575): n is a, c, g, or t
  Probeset Number=SeqID_13885
ntttttttttttntcnnntccncaccctcccnctcctctcctcctccctcccacctcgtagacaccactccantcttntttntttttntntngccggtagtgtgtgggtgaggaggagcgtcccctcccatcccnaggaggcncgtgcgagaggaggcagaataaagaggtttcttcatatcctcttattctatgcgtggaggtgtgtagntnaacaatatctaatatacgtattataccgtgngtttgacgctcactcatctgtgatggccgtcggtctactgcgagatagcgcagcttgtctgtcttgtgcacacagcctcacaactaaccggaagacgcctatcatcacatccacaccttcaccacgctccgcgcggcctctcgacgacccgctcacaccgcgcgcgcgcctgcgacgtattagcacatcacgcacctctatcctatgaagcccggcatcgccacccgctcgctcggctagcgacctcaacggcagagtggcagactcgctctgcgcccgacgtccggactgaccactcatccgatctcagaccgctacgaccagccaccacgccactgcgccaccctgcgaaacgcagctggcgctcgctccctaacccggcttatcttctctacagcactgtctatatcattcatatcataattcactaacatacgtatgttcttacctataagtatattgtctgcgtgcatgagctactggcagagcgttttgcantcttctccgcccttctcttctctcacatcactttatcgctcgtctcttcactgatctacactcgagatgagtgcgagagacaactatgcggaggcgacgagcgaccaacgcctacaacatcgcgcactaggtgaatatggatatagaaatcatgcctccacagacgctctgcactccctaatttcccacacagtcgtnatcccnatggtatcaggtctctgcgctctnactctnctacgcacgtaggactcgctagtcgcgctgcgatanacgcactagctatgtcagagatgatagatatgttatcattcagantgatgagccatactcaccctcgtatgatatagacatatagaacttgagagtcatcttatatgagcgtcacatatgatatccatagtgacacgacataccatatagaccgacaanttatcttactaacacacatgatancgnaagactatcgtagcgataaacatgagcgatcagncgtgcgactcacngagtagcgatagtgtgcccatactatcgttagcggacatcgtgtcatcaatcaatgtgggtctcgagtgtgaggaagacgatgatgttataagcatactagatgatcgacncncgacgtacgtgtcaagtgatgcgcagtacgcgacaacagcgacgacgcttaccacatcctcgcnaaaccgtgcnctcgatgtgtcgaggcagctagactgtganctcataatctacgctggctccngatgcgtgtacgactcgtgcagagtgacttactcgtatatcncatagcgtcgtagacgcgctggagtgagcgntgacgcgcgtagtggcgn

SEQ ID NO: 4107 - DNA, 1502 bp, Glycine max
  misc_feature (27)..(27): n is a, c, g, or t
  misc_feature (90)..(90): n is a, c, g, or t
  misc_feature (95)..(95): n is a, c, g, or t
  misc_feature (254)..(254): n is a, c, g, or t
  misc_feature (510)..(510): n is a, c, g, or t
  misc_feature (516)..(516): n is a, c, g, or t
  misc_feature (872)..(872): n is a, c, g, or t
  misc_feature (1434)..(1434): n is a, c, g, or t
  misc_feature (1461)..(1461): n is a, c, g, or t
  Peptide Sequence Number=SeqID_7897
  Probeset Number=SeqID_13886
gccccactcccatccatcctaatactntatccttattacagacaaggaaagacacataaatgaggacgacacttgctccaacaaccaaanggaancaagactaacactacatacgccgatgggagagaacagagagtaagatataaaaaaataaagacctttcatacaaccatccgtctctggcgttggttttaccattagtccggtactgtatctacttattactgtcttctaatagtaggcatgagtacagntttaatgacgagttacaccgcccgccgcgaagtcatcaaagaacatgcgcgacacattacgtaacatgacttttaaatagcgaggaacacactgtacgagccacccgatgcacgatgctcaattgtcgtgtatgactctattggtgaatgaaattcaatattctcgtgtatgattgatcgctgattcaggtacacgtcttatatatgtcgcagacatgaggtcttactcatccctctttattctgtatgcctcctntcacanccgtcttctctccgctgcacctcatctctcacccccactcctgtatgtttctctagtagaataagagaatcgcccaggcatggtactcgctagcatgctcaggttaataaatgacacaaataacctagagagaccaacgaaacgataagtacaccgttgcacgccgtcacgaccgacgaaacggcgcggcacagaatgtacgagctccacggttctcgaggctcgtcgacacgctcaactcagacagatgactttttatcgttcgtcgccgtgttattaaggggaaagtatgtctgcgtcagactactaaacatcttgctagttgcagaatgcgcgcgcgctcgtacatgactagnatcattgtcttggtgtacttcgatgcaagcctctgcgcgcagccgcacctctgcatgactgaataccgtgcttaacccggtgttccgcaaggtcgcataggctacaccacttatataacactgatctgctaaagacattccacagacgacacactacgtatcgattaattcttctacgactagttacgctctctaagtacacaaggcagacccaaccacataacataaatatgttatcatataatggagtacatgaatgagagaggatgcactgtccacacaatacagcaccgcaccacgacgacaccacccacatccaccgttcacgtggaaaaccaactcacgcagaattcgataaagtataaagtagaataaaccactctgttaacgagacgcgctattctataaagtcactctcatctacatatgtactattctctatatatattcgacactctcatacataattataacatactatcttgtgttcactatatgagagttatacaacagatgatcaaagagtcacagacctagcgcatattcgtgtatgctatcactntaatatagaagaatgtgtagttcttcngtacgtgatacttatatatagacacagcggcatctatacaa

SEQ ID NO: 4108 - DNA, 834 bp, Glycine max
  Probeset Number=SeqID_13887
accgaactccccacgcgcaaagcagagagaggagaatcctaagccccagcgacgaccatgactccccaagccctcctcctcctcctcgccgccgccgccgccgtcgccgtcgccgccgcggcccccccgaacggcgccgcgcgcctccgcccgccccggtccccccccccccgcgccccccccccggcctcgccccgcccctcccccccccacgtccccaccggcgccttccagatccacctcgcccccgcccccctcgcccgccccccccacccccccccccccccccccccgccccgccccccccccctccccccccgcccgccctcccgcctcccccgcctccacgccttcacgccccccccctgcctctccctcccccgcgccctcgccctccccccccgccctcacccttcccaccgccaatttacattgtccaaacctcccccccacatattccccaccctcccctcataggccgtcacctacacatacacacccctccctccaccccccccactgctcccctctcgccacccgcaacactcaacacccactcccaccaccaccatataacaaccactacaaggcaacaccacactcccacgcacccccgaacccccccacacatccattatatagatccctaatctctctttcccctctttccacaccaccatttccaccctaccattactatcatcacccccagcccctatcttgctttcatacctacacacaaccaaataacacagacaccacccacaccagaaaaactcacaacaaccaacaggcaaaaaaacaccccgtacaaaccaacaaaacaccctcccg

SEQ ID NO: 4109 - DNA, 193 bp, Glycine max
  Peptide Sequence Number=SeqID_7898
  Probeset Number=SeqID_13888
ctgcaggtttatttagaaataccaaatggagaaagttttgcagaggctcttcatcttaagggaatcccatatgttatattttggaagaataccttctcttgttatgctgcctgccattttcgtcaagcatttctttcagtagtacaaagaaagtccagcatgacttggttctcattctctgtgtccatgcaat

SEQ ID NO: 4110 - DNA, 1642 bp, Glycine max
  misc_feature (27)..(27): n is a, c, g, or t
  misc_feature (73)..(74): n is a, c, g, or t
  misc_feature (112)..(112): n is a, c, g, or t
  misc_feature (157)..(157): n is a, c, g, or t
  misc_feature (159)..(159): n is a, c, g, or t
  misc_feature (166)..(166): n is a, c, g, or t
  misc_feature (194)..(194): n is a, c, g, or t
  misc_feature (234)..(234): n is a, c, g, or t
  misc_feature (237)..(237): n is a, c, g, or t
  misc_feature (287)..(287): n is a, c, g, or t
  misc_feature (290)..(290): n is a, c, g, or t
  misc_feature (372)..(372): n is a, c, g, or t
  misc_feature (430)..(430): n is a, c, g, or t
  misc_feature (439)..(439): n is a, c, g, or t
  misc_feature (471)..(471): n is a, c, g, or t
  misc_feature (477)..(477): n is a, c, g, or t
  misc_feature (481)..(482): n is a, c, g, or t
  misc_feature (534)..(534): n is a, c, g, or t
  misc_feature (591)..(591): n is a, c, g, or t
  misc_feature (611)..(611): n is a, c, g, or t
  misc_feature (757)..(757): n is a, c, g, or t
  misc_feature (791)..(791): n is a, c, g, or t
  misc_feature (841)..(841): n is a, c, g, or t
  misc_feature (843)..(843): n is a, c, g, or t
  misc_feature (851)..(852): n is a, c, g, or t
  misc_feature (858)..(858): n is a, c, g, or t
  misc_feature (967)..(967): n is a, c, g, or t
  misc_feature (1049)..(1049): n is a, c, g, or t
  misc_feature (1096)..(1100): n is a, c, g, or t
  misc_feature (1177)..(1178): n is a, c, g, or t
  misc_feature (1239)..(1239): n is a, c, g, or t
  misc_feature (1241)..(1242): n is a, c, g, or t
  misc_feature (1245)..(1245): n is a, c, g, or t
  misc_feature (1248)..(1248): n is a, c, g, or t
  misc_feature (1306)..(1306): n is a, c, g, or t
  misc_feature (1375)..(1375): n is a, c, g, or t
  misc_feature (1377)..(1377): n is a, c, g, or t
  misc_feature (1380)..(1385): n is a, c, g, or t
  misc_feature (1407)..(1407): n is a, c, g, or t
  misc_feature (1475)..(1475): n is a, c, g, or t
  misc_feature (1484)..(1484): n is a, c, g, or t
  misc_feature (1487)..(1487): n is a, c, g, or t
  misc_feature (1536)..(1536): n is a, c, g, or t
  misc_feature (1539)..(1539): n is a, c, g, or t
  misc_feature (1543)..(1543): n is a, c, g, or t
  misc_feature (1576)..(1576): n is a, c, g, or t
  misc_feature (1642)..(1642): n is a, c, g, or t
  Peptide Sequence Number=SeqID_7899
  Probeset Number=SeqID_13889
attgtctatgtatcgcctcgtcccttnctctcacacgctctattcacattatgacagctcacatagcaacgcnncgtcgcgtccagtcaaccagccaacgtgccgcacattnccacccgctcgaagcgcgacgacgcaggcacacaggagaaaacantnatcaaanctacacaccctactacgacacctaagcncgcagcctacacccatatcttgatctgtctctctcatacnttntgtatgtgttctagtttgttatagtgcgttatctgtgcttcgatgatggntgngtgtacgtgttctctgcatggatcggatgtctgcgtggtgcgcgcacgtgccgccattgttactgtgttatacataaagtgnatgccgataatatatagctctattcttcatctctacttgctcccgacacctcgtcgtntgcatattnagaccagtgatatatatatcaacagcggtcgncggcgnccgnnatcggtagggtggcgtgtagtgcgacgccgaccgtgcggtgggagcgagtgnctgcgtgtgttatatatgctagagtcatatgtgagtgcgatctcagataagctgacntccagcgcagctagtatctnaatttcacatggagttgactcgtatcacggtacacggcgcgtatgtatcatgagaaattatgtgtcgagtagctcatacttaagtatagatcacgatgacataggtgcatggatagagtgtgacgaaagagaggagaatagattgncatagtgtgagacgagcggcggcacccctagtancttcgccgatcacgcgacgagaggaggagagcacgaaagaagatatgttngngattatgnntttttntactatacaatctatcctcttggatttgtatctgatgtgcacgtatatgaatcgctcagattatgaagtgacatgatatgagtatggttaactagacagtggcacggtntactacgcgtatatacgcattgagataatatatggagaggatgcgcggcggcaggtgtgcgagcgaagaggagatagtgtgngtttgacgtatcggcacgcgaacgctgctcgtgacaattctctgcgnnnnntcatatgtgttactccagcgcgcgactccatcgacctcatcgaactacgcggcgagcgtggacgcgcgcggcgcggnntctgtgattatgaatctcgatagatgtgtcgctagtccggtacgtgtgctgagcggcgtcncnngcntgntcgtgagtgtatagtgtagtagcgagtagatagtgtgtaagattagagagtggcatgnagagaacgtacaggtgcgttgtgttttaagtatccgagacatggtgcgcgcacgcgtcgatcgatgatntnttnnnnnntcaactatggtattttcatccnactacatcgtatcgctagaacgtcgtatttgcgtcatcttcaggcttcatatacactcagagagactnctcagtcgncgnaacggtgtaacgtcgatgtatagtacgatgatgagagtgatgctgtgantantgtntacattctcagcagaacgtgagactacgttganacgcagtaacagtgactagagatcgacgacgcgagtgagatgataagtagacgatgctgaagatan

SEQ ID NO: 4111 - DNA, 624 bp, Glycine max
  Probeset Number=SeqID_13890
gcacgagaccattacctagaacgtcctaatcgaaaaaccatcgttccgcgctgacccctgtcgttaactgctacactttgcttcccccactaggtagctaagctgcatctggatccatcgatccatcctcccatggcggccgtggagctcgccgccgggctcttgcagagcaccgcgctcatggcgacggtggcggggtacgcgacgtaccggacggggccatagtcctggaaaacgcaggccatgcacttcgcgaactgcctcctcctcgtgggcgagtgcgagaactgctcgccgagcgtggtgggggagcccgcgtgctactggaacatggaaagaaaagaggtgatcgactgcgcaccccgccacacactggaaccgggccaacaagaacatcaagatcggggagatgaacctctcctgcatgaagaacctcaagcgcaagcatgcgcgctgcccgctacgataccttagggtgcaccttcctactacgaagataatctcgcctctcgggtggggagagccatctcccaaaaaggtgggggcggaactttgtggaccgggggttagttcccccccatcaataacggctggcggtggtggccgcaaccacccgtaagaaaa

SEQ ID NO: 4112 - DNA, 729 bp, Glycine max
  misc_feature (574)..(574): n is a, c, g, or t
  misc_feature (611)..(611): n is a, c, g, or t
  misc_feature (635)..(729): n is a, c, g, or t
  Peptide Sequence Number=SeqID_7900
  Probeset Number=SeqID_13891
agaagttgactggtcatcttgtgagttagacttcaaacaattcttaactttccggcactttagattgaatatcttatattgatttgtgaaggtggactgcagggttgggtctttggtctgagtttgttggggataatgcctctggcagagcgattaggttatgctaccgagtaatagtacacgtactctttaagattttgctcaagatttcactttatatgctctgatgttatccttttcttggtcttgtataggcagctggcgttttacactggagatactggtaaagtaatagcattctactaagtctatcttcttttaaatcaatctagaacatcagttagataagttaaagcgtaaattttgagttgttaatatgatatgtatgtgtttttatgaccagtttaggagatgcttttatgtgtctctataactaactatttgtacaagtatctcttaaatttcaattatcttttttacatgttatatttcattggaaaaatggatcggttctcatttcaccttccatggttttgtgtgggatatggtttaatatctgcatgcagacccagantctagggtcctctctatttgtgtagctatctgggggnggtattctattctaaatggactannnnnnnnnnnnnnnnnnnnnnnnnnnnnnnnnnnnnnnnnnnnnnnnnnnnnnnnnnnnnnnnnnnnnnnnnnnnnnnnnnnnnnnnnnnnnnn

SEQ ID NO: 4113 - DNA, 1585 bp, Glycine max
  misc_feature (155)..(155): n is a, c, g, or t
  misc_feature (794)..(794): n is a, c, g, or t
  misc_feature (823)..(823): n is a, c, g, or t
  misc_feature (866)..(866): n is a, c, g, or t
  misc_feature (990)..(990): n is a, c, g, or t
  misc_feature (1051)..(1051): n is a, c, g, or t
  misc_feature (1153)..(1153): n is a, c, g, or t
  misc_feature (1223)..(1223): n is a, c, g, or t
  misc_feature (1355)..(1355): n is a, c, g, or t
  misc_feature (1388)..(1388): n is a, c, g, or t
  misc_feature (1422)..(1422): n is a, c, g, or t
  misc_feature (1450)..(1450): n is a, c, g, or t
  misc_feature (1453)..(1453): n is a, c, g, or t
  misc_feature (1490)..(1490): n is a, c, g, or t
  misc_feature (1553)..(1553): n is a, c, g, or t
  misc_feature (1555)..(1555): n is a, c, g, or t
  misc_feature (1574)..(1574): n is a, c, g, or t
  Probeset Number=SeqID_13892
catcccaccctgcgatgcgttgatctttctcttgtagaggaactatgcttattccgattcgtatacatctcatgcgtatcaaatatcacaacttagcatgattatgggcggtcgcgatgacaatgaatgtagcttggtatctcggtgagaaggtntatgcacactacaatgaattttctagtttcttatatagtgtactactctctgaatagaccctcataccttagtagcaccctagtcaatcccgactttttagcggcgcctgtgtcagagatatgcaggtggctgtaggatgtatgcactgtgccgcgatcctcgtgactcgggtaccgagttgacgatatgtgatgtgtatagactgagagtcactagaatacttacgacagcacttacacttgctgttattataattcgcacacgccgacaccagatccgaccacgcagcacgcgtatgcgttgtatgtcgatatgtatctagcacagctccgcagcttataatatagtaggtactacgtgtatatgcgcgctgacatctattacgccgaccggacttgtcactgcctcgctgtacgatgtctgtcactgctttattgcgtttttcgctcatcgtcccgactcttgcgctgacgtgtatgctcgaggatcgctatgctgcggtcgtcgcgacagccatactacagagagcaatacataagactatgatatgagtgtatgttgcactcggccgacagactgttcatgcacgtgagtgtatactagattagtagcgcgctcaattgtatggtactgtagtnttgatccgagctgcgtgtacgatagcggncacggcgctagtatggtttcaggctattcgtcacgtctggtcnctattgcgctgcatacagcgtgcgttgcgagcccgatatcacattgtctgcgtctcgcgtcgtccgttggtagtagactgtgctccagatctcgcgagagactgagtgtagcacgccaactcancggtgtcgtgtataatagcgactatgcacgtatggtgacttgtcgtgatctgagagtcgtngccgaatagattgtatgcgctctcgatctgtacattagctatgcgcctatcctcgacggcattactctgcgcacgcctagtcgcgactacgttagcatctcnttacggcccgacgctcgcacttctacaatctcttctgtttgcgccatgtgatgcgcccacgcttcatcgnatataggttgtgagtcatcaccatgcgcgaactaacatcggagactatgtatcgcagatgacgtactcgtgccggcgcaatacgcgagcacacatacccgcacgcgccgatcaagctgatgcgagaccttantcgctccggctacacctctcactctcaggaacncgatccgcgcgaatcatgtccctcgtactgtcgnagtcgtacgatgtccgtgtcgcgaccgngcnagtctcgtattctgctacaacgcgccagcgacgcgcntagtctaatacactgaatcagagatgcatacgtgtgctgccctgacacgcgctggtgaagcantnagtatagaagagcgagtgnagtcagatcgg

SEQ ID NO: 4114 - DNA, 1327 bp, Glycine max
  Peptide Sequence Number=SeqID_7901
  Probeset Number=SeqID_13893
atcagaaaaagatttaatttctaactagagactaaacccggctatgtcaaagcaagccttctcactcctatgcctactgctgactctcagtgccctagctgtcaaagtcaaggcagtttcctatacttgtgactatgttgtaagatacgaaaattgcccagatgtagaacaaaccgtttgttcggtgtacccaggagtctgtgtttctgatacgtgccaaccttccgagtactataacccttgctatgcctgttctgaccctacggtcatggcttacagccttggcgtttgcggctcagatacaggatctggaacacctacagaacccagcaatccttctaatcctagtaacaataccaatccttctaatcctaccgatcctaccaactctacaaaccctacagatcctacaaatcctacaaatcccacaaatcccaccaatggaacagatggctctaatggaactaatggaactggttctaacccaagtgacggtggaaatactaccgaacctgaacatgagttaatcaacagtggcggaagcgagattcttgctataggagatgatgcctcagcatatgtacctgaaggctccgatgtagatgatatcattggtatcgatttcgccgatcaatccaatcaagaaatcgagctagattccttctttgaataccaaagtaccagcacaagctctaatagcaacgcagcagtgacattaagacagtcattttatgttgtagtctattgtgacaacataagacctacctcttgtactaatgatgttaatcctgtctgtgccattagttgtcaaaacggtgtatgccagaaaactgtaaataacatttgtcttgcctgtgccgatactaatatcttgtcttatagtttaggaaggtgcgaggaggaaaatatctcttgtcctagcatcgattttgcaactgatacaacaacttgcaactcattctatgatccagtttgtgcttatcctagtggttgtaccagtaagtcttgtgccaccmctgttactaatagttgtggagcttgctatactactagagcaagctatttcacacttgggccttgctaaatgtctctttgaagagatgaaaaaggcttatgattaataatttataagcatgtgaattatataatattaatagctttctattactttttttagctgttgatatattatgaaatattctattatgtatgttactaacaaacatagtagcaattaggcttttattagtaaacttcattataaatataactgcctttatagaaacaaaaatgagtatgtggagattaaattctagaacttttttac

SEQ ID NO: 4115 - DNA, 502 bp, Glycine max
  misc_feature (326)..(326): n is a, c, g, or t
  misc_feature (406)..(406): n is a, c, g, or t
  misc_feature (420)..(421): n is a, c, g, or t
  Peptide Sequence Number=SeqID_7902
  Probeset Number=SeqID_13894
aaaaccccccccccacattgccccccttggcccaaaaaaaaccccccccccccaacaccgaagaggggtctcaggaaatccggaaccccccccctttttcgtttccaccaacccctttttcagttcttcatttcccattggttgcctcctcagttttttgggcaaaccccagttctcggggtcatcggatgactctggtttccgctaagttttgccaataaaactttgggtttaggcgatcatggcggcatataaccatctggtttatgcacccatggcagcaaataaacttctgctttatgtgaccacgccagcagctgctatancgcccgtccccattcgcggttagtcaatgccatcttcactcattttgatgtgcaaaatgaaagagtttggatcgttagtntgctatgtgtgatnntgatgaggaagaatttggggtggctttggtggaacttgtacacacaaagactcaggctataatttgtccttcgatgctaag

SEQ ID NO: 4116 - DNA, 2101 bp, Glycine max
  misc_feature (5)..(6): n is a, c, g, or t
  misc_feature (9)..(16): n is a, c, g, or t
  misc_feature (19)..(21): n is a, c, g, or t
  misc_feature (29)..(31): n is a, c, g, or t
  misc_feature (33)..(39): n is a, c, g, or t
  misc_feature (55)..(55): n is a, c, g, or t
  misc_feature (63)..(63): n is a, c, g, or t
  misc_feature (76)..(76): n is a, c, g, or t
  misc_feature (109)..(109): n is a, c, g, or t
  misc_feature (122)..(122): n is a, c, g, or t
  misc_feature (154)..(154): n is a, c, g, or t
  misc_feature (171)..(171): n is a, c, g, or t
  misc_feature (211)..(211): n is a, c, g, or t
  misc_feature (227)..(227): n is a, c, g, or t
  misc_feature (237)..(237): n is a, c, g, or t
  misc_feature (241)..(241): n is a, c, g, or t
  misc_feature (248)..(248): n is a, c, g, or t
  misc_feature (256)..(256): n is a, c, g, or t
  misc_feature (298)..(298): n is a, c, g, or t
  misc_feature (304)..(304): n is a, c, g, or t
  misc_feature (322)..(322): n is a, c, g, or t
  misc_feature (359)..(359): n is a, c, g, or t
  misc_feature (386)..(386): n is a, c, g, or t
  misc_feature (402)..(402): n is a, c, g, or t
  misc_feature (407)..(407): n is a, c, g, or t
  misc_feature (431)..(431): n is a, c, g, or t
  misc_feature (443)..(443): n is a, c, g, or t
  misc_feature (450)..(450): n is a, c, g, or t
  misc_feature (477)..(477): n is a, c, g, or t
  misc_feature (510)..(510): n is a, c, g, or t
  misc_feature (529)..(529): n is a, c, g, or t
  misc_feature (595)..(595): n is a, c, g, or t
  misc_feature (651)..(651): n is a, c, g, or t
  misc_feature (807)..(807): n is a, c, g, or t
  misc_feature (814)..(814): n is a, c, g, or t
  misc_feature (941)..(941): n is a, c, g, or t
  misc_feature (971)..(971): n is a, c, g, or t
  misc_feature (1073)..(1073): n is a, c, g, or t
  misc_feature (1097)..(1097): n is a, c, g, or t
  misc_feature (1115)..(1115): n is a, c, g, or t
  misc_feature (1257)..(1257): n is a, c, g, or t
  misc_feature (1280)..(1280): n is a, c, g, or t
  misc_feature (1337)..(1337): n is a, c, g, or t
  misc_feature (1374)..(1374): n is a, c, g, or t
  misc_feature (1461)..(1461): n is a, c, g, or t
  misc_feature (1577)..(1577): n is a, c, g, or t
  misc_feature (1655)..(1655): n is a, c, g, or t
  misc_feature (1680)..(1680): n is a, c, g, or t
  misc_feature (1740)..(1740): n is a, c, g, or t
  misc_feature (1742)..(1742): n is a, c, g, or t
  misc_feature (1744)..(1744): n is a, c, g, or t
  misc_feature (1765)..(1765): n is a, c, g, or t
  misc_feature (1843)..(1843): n is a, c, g, or t
  misc_feature (1988)..(1988): n is a, c, g, or t
  misc_feature (2029)..(2029): n is a, c, g, or t
  misc_feature (2043)..(2043): n is a, c, g, or t
  misc_feature (2045)..(2045): n is a, c, g, or t
  misc_feature (2101)..(2101): n is a, c, g, or t
  Probeset Number=SeqID_13895
ggggnnggnnnnnnnnaannnccgcggcnnncnnnnnnncgcggcgtcggcgtcncgtcaganacacacgcaccanccctacaacagcagataaagcgctgggtggcanactgacaccctanccgccggtcgggagcggccggcggcatccctncaccaatatacgctatnagcccgcctcgccgaccatcacactccggcacgtagcccngaacaaccacaccacncccacacaancatnatgacanaaaaatanaaaaaaatatacctatacaatctcacacaaatacgtgtgatntcaganacaattataatagacgcnacagtatatccctctgccggatgctgatggtcgtgtnctgtgtctttgcgtcctcttgttggtnctcatcctacgcgatntacgncagcctgctcgtgcgctgtcgctntgtgtcctcctncgatcgntctctcccgtctatccgttctgcgtgntgtgcccgcgcgatcaggacagagtctcacacnctggtcgtctagtagaggngtgatgcggtcggcgagcagcggtggttatgcgcagtgcgtgttagtatgatcagtagatctgttngtgagatggctgctgacgtaccctccttcggcttctctctctgctctgcggatcgnttctcttctatcattcttgtttaaattacactactctatttctcttcgcgtctttgccgccgcgttgtctgctgtgagctagcgtctgtaccgcaccgcgtgtggtggtgtcgttgttttgctgttcgtttgaacgcggtggtgctgtatgcgttntatattntttcggtacccgaattgagttagagtttatgactgagaattgtagtggttcgtagagtgtgagtgtgtgtatgtttgtttcttgtttctcctgtgattattacttccactcacgcgaaagaacacgncaccagcgcacgtagacaggtacgacgccntcgccatcagatggtagactacactgtatccactctgtgtcctaacacagctctagcctacagatcaagtgacatgcactcgcgactagtgacatgtagccntagttgtcctatcaccgacccagncgtgatcgtagggtacgnggtgagcacaatcaccctcagtcgctccatgattgtctcagcacgctgcgacatatacagacgatatcacgactatctaccttcgctcacttctggacacagcagagaaggatagaatgtcgtgcgacaagatgtcggcgcntgccaccagcgcggagcgctcanagactatacactacatgcgcactgttatctcatgggctatgtatatcgtagaggcgnacacagcacatacgtaccgcgctccacgagatacganagcacacagctggctcgctcttccttgcactctatctactatagttatcagagcgctcagaatagaatgctctctgatcgacgaganatgagactctcgctcctctccgagcagcgctctcggactatctctcgctccacgtgcattcactgctcgcgcacacctacacctatctgcgtcaaggtacggcgctgtgcatatgntgtgtgttgatctcactgccactcgacgacgtcggcgtgcgatcagataatacaactaattatactcactcacataanagcacgtaggtaaccgctgtgcatngagttatcatatcagagaatataaaccatctagcccgccatctctccgcacacagaacantnantattatacatatcatagcccnatcacacgcaccacgacagctggtatcgcgcggcgtgtctcagcgtggcgcgtgcctagcctgcacacggctgacacncacctacacacgacacatcctacagtaggatgacgtcgtgtgacatacgtgtgtcttgtgagagtgatgaggagcacatcgatctcgtcgatagacaccacacagtgagaacacggcatctctcatcaacaggcgaactagacgnacgacgtcagctatgaaataatactataattgcatctggcntcgaatctgtgatnanagagacgtagcatggagaatgaatcggtactactagcactccaacataaactacgn

SEQ ID NO: 4117 - DNA, 250 bp, Glycine max
  Peptide Sequence Number=SeqID_7903
  Probeset Number=SeqID_13896
tgattccgtggggaccaatttctccagtggtgcaagctttgcaacagggggttccacgatcatcccccaacaaacccttagattcagtcctttctcccttggaattcagtactggcatttcctctgttttacacccactccaaagttcattaaggcccaagggggagtatttgcagcactgatgccaaaagaagagtactttcaagaagctttatacacatttgatataggtcaaaatgtcttacagggg

SEQ ID NO: 4118 - DNA, 547 bp, Glycine max
  misc_feature (289)..(289): n is a, c, g, or t
  Peptide Sequence Number=SeqID_7904
  Probeset Number=SeqID_13897
tgtgctttggtgattcgagtatttttcctctcgggttacctccgtaggccccccccccaaaattccccagcaaattttgcacttgcaattgaaacaacttatcaaaagcatgcttaggaaaaacccagaacataggccaactgcagctgaattgttaaggcatccgcttttacagccttatgttcttcgctgtcataatgcatcatctaatgttcttccagtatatcccttagttaatccaaaggataaaacaagaagatctaataaatctagtggtggcaaggaccantaaggacaaagaagctagtttggtaaatcgtttggagcggattcatccaattgagggaaatggagatatacagataagcaatcttcctaatgatgcggtaacaatctcaaccagtgcagaagacaatctagagaccaggatggctgatcttaccagctacatagtggaatcttgtactagtattagtggctcaaaagatgggtcaacaacatctgaatcaactatttgcagtgtgtgcaaggaggactttaaaagtag

SEQ ID NO: 4119 - DNA, 1634 bp, Glycine max
  misc_feature (52)..(52): n is a, c, g, or t
  misc_feature (317)..(317): n is a, c, g, or t
  misc_feature (321)..(321): n is a, c, g, or t
  misc_feature (473)..(473): n is a, c, g, or t
  misc_feature (822)..(822): n is a, c, g, or t
  misc_feature (875)..(875): n is a, c, g, or t
  misc_feature (1149)..(1149): n is a, c, g, or t
  misc_feature (1314)..(1314): n is a, c, g, or t
  misc_feature (1367)..(1367): n is a, c, g, or t
  misc_feature (1418)..(1420): n is a, c, g, or t
  misc_feature (1455)..(1455): n is a, c, g, or t
  misc_feature (1501)..(1501): n is a, c, g, or t
  misc_feature (1542)..(1542): n is a, c, g, or t
  misc_feature (1581)..(1581): n is a, c, g, or t
  misc_feature (1625)..(1625): n is a, c, g, or t
  Peptide Sequence Number=SeqID_7905
  Probeset Number=SeqID_13898
cctagagcgagcccccctcctctaccccccaatcgccatctgcgcgcggcangagacaacatctacccattatcgctgtcgatgcgttattacgcgcacacaccaactgagagtactactactagaacacctctcaccccaccatggaaatatggaatgtctcattagagtcatagtcgaagtaattaatcatttatatatgttatgatagtggtgtcatgtatgtaccttctctatcgtgatgtcgctgcactggctgtgttagtgcgagtgttgtgagggcagtgttgctcgctattaacccagcagatgcgttntttntctgctcgtcgacgcgtggtctgtacgtacgcatgctatgcgctgtgatgaccaaccgtaatattcatttctcttaagcgatacacaccaacgcgatctcacatcggaactcctctcattatctgtacggatggactacgatgatgaggctntaggagggcatctatctccgtctcgccgaggaacgccaggcggctgtcacgtgaaatatctacgacgagccacgcgattccagccgctctggcatacccttcccttatcactcacttccaactaacctagcctcaacgacgaccgatacagccacttaagatgatagcgactgcggcacagcgttaggctgtggacgattactatggtaccagaacgaaatgatgcatgagtcaaactctctcgaagtgtcaggaagcccgttgctgcagcatggatcgtgcatgcacccgagatacatagagtgatatacgcacactcaacacatctatcgaagcgatctggataganagatatcagtgtactacgactcgcgcgcacacgtccactatatgagacaggtnactctcatggtgaatctcagcgcctccgatctgttcgtgctataaggatgccgtgacgagtattgcacgagagaagcgtactggtagatgttaatgaaatcaactacctatgcacacgcgcagaaggccggagatgagcacaacgtgtgtgatattaccgtgtgtagctgatgaagggcgcagttgagtgcagactggcgtgatagacttatacaccgagcaaaactagcacacgatcacggatccagagtactcatgatatcaaccattacanagaagcggtcgctgtcgtatcgcacagtcatgttcggtctcatcatgtaccatccgaccacactactatacatctactcacatgatgagtgtatgggtaaatataagtgattctacagatacaatgcatgacgtgatatgtactgatgtgaagcgcacggatgantgatgcgcgtatcgcgtgtctctcagtatatcgactcgacacgtgtgaggcgntgcgtgaccatcgaagtcgcactctcacactgccactgcacctagcgctannntctcgtcgatgacacagtgagtgcgatcgtgcggncgtgactcaagagactgacagcgagcggaccagtaggtgcaagcantccatacgtatgcaatacactcacgcgcagcacgatatcgntcatatatgtacacgcgctatgtgtcgagtacatcgtcntttatagtgatcgtagacctgcaaccaacaactagacatgatgnagtgcgtac

SEQ ID NO: 4120 - DNA, 570 bp, Glycine max
  misc_feature (570)..(570): n is a, c, g, or t
  Probeset Number=SeqID_13899
ttttttttttttttttttggagagatagttaaattgtattgaatgattttagaattattcaatatagacaattctatgtagcttaaaagacatcataatgttatatatttcttatatattataccttattataacatacttatagttattgaaccattttatggttacttattatgattagaaacaacaaacttaaacaaaccagaagctattccagtaccagtattggagagtaccatcatcacagttatcggtactgcacaaataaacagcaacaagagttccgagagtagtatcactagtcacatcaccagtaagtctgaccaaagtgttggcatcttcacgattgagagtgtccaaggtggtaacgttagtgagggcgaggttgggaaggtcgccaacactactaacttcagtaatagcgttgttgacagcattgttgaggaactcatcttgggtatagactccagtatcttgaggttcatatccgacatagtcgcgaagataatcagcccaactattgaaaacttgaacatttggttcagaggcgttgttagtggtattagtgtn

SEQ ID NO: 4121 - DNA, 574 bp, Glycine max
  misc_feature (246)..(247): n is a, c, g, or t
  misc_feature (256)..(257): n is a, c, g, or t
  misc_feature (277)..(277): n is a, c, g, or t
  misc_feature (315)..(316): n is a, c, g, or t
  misc_feature (359)..(359): n is a, c, g, or t
  misc_feature (373)..(373): n is a, c, g, or t
  misc_feature (419)..(419): n is a, c, g, or t
  Peptide Sequence Number=SeqID_7906
  Probeset Number=SeqID_13900
gtgccaaggcgcccacccaatgaacaacccggtttggacttaaaccttggctagggaggccccttcggcttttttctaaaactttggcggggaaaaaggttcccttggtccaaaataaactgccttattctcgatggaacttgaacctggtcttccggatggtgcttcaccattgaggcttactgtagataagtggaagtgggaagcaagatataaaccggagtggagtggaattgtaatgtactnnggagcagannctgggaaggaggaggtgtgnatgtgtatgtatggtgggggaggagatgagaaagtgtnngagggctcacgtagtgtaaggaggtggaggatatgacgtggtnggtggaggggattngtagtaatagggaggatgagaagtgggagatggtggaggaggactntgatagtagtaaggaggtggtggagatggagatggaggtggaggggatttgtaataatatggagacggcggtgatggggatggtggtggtggagagtggtagtagtagggaggaggaggaggaaaaaaaaaaacaaggaataataatattttaag

SEQ ID NO: 4122 - DNA, 444 bp, Glycine max
  Probeset Number=SeqID_13901
cagatctttttctctctccccctctccacatctccctctccgtcgatctggaacggggccgaacgccaccgtcgccatgaccacggcatagaggaggccacctagctccccctgccttcttgtcgagtccctccgctccgccattgcctcccgcatcgcctgctaccgctgggtctagccgggaaccgctgtgccgagcgccacgagctcgtcttcttcctcgactccgacgagatcctccgacggatgcgccacctctgctgctcctaatctgtcgccggccatcttgtgccgctcgatcccgagaccgatgctgcccctgtgatcgactacgtcgacgacgacccctccttgccagagcaactagatgtcagagcctaggatctagacgccacctttgacgacgactgctactactacgagggtgcctactactacgtgaag

SEQ ID NO: 4123 - DNA, 1710 bp, Glycine max
  misc_feature (97)..(97): n is a, c, g, or t
  misc_feature (174)..(174): n is a, c, g, or t
  misc_feature (209)..(209): n is a, c, g, or t
  misc_feature (433)..(433): n is a, c, g, or t
  misc_feature (612)..(612): n is a, c, g, or t
  misc_feature (622)..(622): n is a, c, g, or t
  misc_feature (624)..(624): n is a, c, g, or t
  misc_feature (1041)..(1041): n is a, c, g, or t
  misc_feature (1508)..(1508): n is a, c, g, or t
  misc_feature (1642)..(1642): n is a, c, g, or t
  misc_feature (1656)..(1656): n is a, c, g, or t
  Peptide Sequence Number=SeqID_7907
  Probeset Number=SeqID_13902
taggaggtgtcatataagcactttggtattccttcttactcgctagcatatcttgcactcctctgtatacgtcgcgtatcaggcgaactgcactgcntcatcgcgatgctagtcgtagacaccaatgtgtttgttggcggcttcgcgtcttagtagtgagggtacactacgcgntctctgttatgattctgcacgtccctatccgacgnatagatgatgctgctaccgctgtgatactatgaggttatcgactgcggcgctcacatgtgcgttcctgcgtcgagctcgccagccagcgcggtggtggcgagtgtttactcattctcacagcctgtgtggtgcgcgcgcgcctcgtcctctcccttatggtcgtgctctcgtctgactagctgactttctgtcgttctatcgcccctcgttacatcgacttagncgagtagatgtgagagaccacatttattctagataactactctagcttctgtcgccgtctgcgatcgcgcgtggcgctgcgcagcgccttttgcactcgttacacagtagtgtgctcgctactcgtcgcacgccgcggaggtgatcgatagtccaacttcttcttgtgcgtaggaatgntatattctanancttatttcgtattgtctgttagacgctcgtagtggcacgcgtgagcgtgatattctccacaataacgacatggtcgctatccggggctgcagacgggtgactagagtatagctcgtctgttgctgatctctgttaatccttgcgttgtatgcgtagtggttttgtctcatttgtcctagttcgccagcggtatatatgtcaccgtggttcatctcgcgtcctcggtcgcggaggggtccgtccagtacgcctattagtcgcatgtgtcctagtagtcatcttgtggtatccagctgttccgcgcgcttcccagtcttcttttgtgtgttcggatgtggctggtgccggtcgtccgactgctctagtactccgggctcgtagtggtctcctggccgaattccctgggtgcgaccaggntcattttactcttgtcgcgcgctcgaatgtttctccattgtcttatcggtcggtgtcctccctggattcgatagtcatcccgacgagtgctcctatgcttcacacctgtttatcggctgcgtgtgtgtgttatctgttggggtgtgcggacagattattatttatgtgtactctgctctattgttaacggctctccgtatgtgtccgtaattgtataatgtgtcatgttatcccatctccactctcctttcatcatcatgcttcgattgcttgtttatgttgcttcgtctgcgtcacgccgagagtccgttctcttttgatatgtattatcctttctagagcggcaaattctgcggttgcgtggcctcttcgtgtcggtctcttgtgctcgcgggggaagatacaaacacgtctacatatatgcccgtctgtgcccgcgctgtgactttctctgccttatttttgtngtgcgctgttcttttgttttctgggggaacataatagtttacttctgtgagttggagcgcgcttctctcctggagaaaactcctttcctgctgatgcggggctgcgcctccgctcctccctactctcgtcgtantctgtgtttttttntgtgagtgtgtttcttgcgcttcgttccttggcgggcgggtggtggggttccgg

SEQ ID NO: 4124 - DNA, 1841 bp, Glycine max
  misc_feature (69)..(69): n is a, c, g, or t
  misc_feature (75)..(75): n is a, c, g, or t
  misc_feature (156)..(156): n is a, c, g, or t
  misc_feature (172)..(172): n is a, c, g, or t
  misc_feature (202)..(202): n is a, c, g, or t
  misc_feature (224)..(224): n is a, c, g, or t
  misc_feature (237)..(237): n is a, c, g, or t
  misc_feature (256)..(256): n is a, c, g, or t
  misc_feature (262)..(262): n is a, c, g, or t
  misc_feature (265)..(265): n is a, c, g, or t
  misc_feature (297)..(297): n is a, c, g, or t
  misc_feature (336)..(336): n is a, c, g, or t
  misc_feature (409)..(409): n is a, c, g, or t
  misc_feature (424)..(424): n is a, c, g, or t
  misc_feature (479)..(479): n is a, c, g, or t
  misc_feature (709)..(709): n is a, c, g, or t
  misc_feature (723)..(723): n is a, c, g, or t
  misc_feature (848)..(848): n is a, c, g, or t
  misc_feature (855)..(855): n is a, c, g, or t
  misc_feature (891)..(891): n is a, c, g, or t
  misc_feature (949)..(949): n is a, c, g, or t
  misc_feature (989)..(989): n is a, c, g, or t
  misc_feature (1010)..(1010): n is a, c, g, or t
  misc_feature (1046)..(1046): n is a, c, g, or t
  misc_feature (1087)..(1087): n is a, c, g, or t
  misc_feature (1140)..(1141): n is a, c, g, or t
  misc_feature (1166)..(1166): n is a, c, g, or t
  misc_feature (1222)..(1222): n is a, c, g, or t
  misc_feature (1277)..(1277): n is a, c, g, or t
  misc_feature (1364)..(1364): n is a, c, g, or t
  misc_feature (1470)..(1470): n is a, c, g, or t
  misc_feature (1476)..(1476): n is a, c, g, or t
  misc_feature (1524)..(1524): n is a, c, g, or t
  misc_feature (1571)..(1571): n is a, c, g, or t
  misc_feature (1576)..(1578): n is a, c, g, or t
  misc_feature (1612)..(1612): n is a, c, g, or t
  misc_feature (1620)..(1620): n is a, c, g, or t
  misc_feature (1650)..(1650): n is a, c, g, or t
  misc_feature (1652)..(1652): n is a, c, g, or t
  misc_feature (1656)..(1656): n is a, c, g, or t
  misc_feature (1667)..(1667): n is a, c, g, or t
  misc_feature (1684)..(1684): n is a, c, g, or t
  misc_feature (1716)..(1717): n is a, c, g, or t
  misc_feature (1727)..(1727): n is a, c, g, or t
  misc_feature (1740)..(1741): n is a, c, g, or t
  misc_feature (1746)..(1746): n is a, c, g, or t
  misc_feature (1750)..(1758): n is a, c, g, or t
  misc_feature (1761)..(1764): n is a, c, g, or t
  misc_feature (1766)..(1771): n is a, c, g, or t
  misc_feature (1773)..(1775): n is a, c, g, or t
  misc_feature (1777)..(1777): n is a, c, g, or t
  misc_feature (1781)..(1783): n is a, c, g, or t
  misc_feature (1785)..(1785): n is a, c, g, or t
  misc_feature (1787)..(1790): n is a, c, g, or t
  misc_feature (1792)..(1794): n is a, c, g, or t
  misc_feature (1800)..(1800): n is a, c, g, or t
  misc_feature (1803)..(1803): n is a, c, g, or t
  misc_feature (1806)..(1808): n is a, c, g, or t
  Probeset Number=SeqID_13903
ggtggtgtcgagcgtagatgaagcgggttagtgggatgttgttagtctgatagtcgcgtaacaacagcnggcatngagtgagcgagcacactcaatacaattacgcagatacaaatctcggcgagacgataggtgtcagatggagaggaccgcaangcgtcgtatatgtatnagatggttccttgtgcatatcgctgctacnagctctatgatatataatattnacagacactatcnttgttttagcatatctctncgcatntgnttgtcgcttgtttgtgttatatgacttgctgntggatagtgcgactggcggtgagtgcggcggtgctgatngagcatgggtcgatagagacgtgtgtattctatgtagttcttgagtctatattagtgcatcagtgtataagtnatagtatataatatnatgtcgagtgtatgcgcgagcgcgtcagtcgtgtacgtatgtacgtgtcgtgcgngtactatatggatgttagtcgattgagcgctgacgaatagcgtatcagatgttggatggcggtgatgtagtgagatgtgcatggacggtgatagtatttgcatgtgatagcagcagtactctgatctgcttgtgctgtcttatgtagatgatgtgttgctgagtacatgtacgagtgcgtggctatagtattgttgggtgtgtggtatgcatgatagatagctggcggtnaatcgcgagatgtngtggatgtcaggctgagcagaagtgtcgtgattattgttgctgttgagattaatagtgttaagtgagcgtggaatgttgatggtgtgagtcgggtcgtcggtgatgtggcgagcgtgtagtagtnttgtcgntagtgcggcgcgtcgctggcgtggatgtcgagccantcgtgtgtctgcgttcgcggcgcgatgtctacatagcgtagcgttgctggccttgtgnctgtgtctgcggcgcgggcgcttacacttctacatccgcnctctcatcactgatcactcgnagcctctcgcttccgatgacgcagagatggcagtangatcgcgccgcggatcgtacaccatcacatacgcgcgaccncacgccagaggcgaccacgcagacccgaccgcgaacagcaagtgagcggaaanntgagagtacgacatgacgctgacgnagagcaaccgcgacgcactcgtctcgggtgtgtgcgagacgataggttgtatgatngcggtggtgggagcaaggatgcacaatactcgaaaataatataataattagcatnatacaaatctcattgatagattgcatcgcttccgctcttgagccggacctaggcatggtgtgagatgcggtgcgtaagtgtacacancagagtgtgtagacagtgccttcggtagctagcgactcatgcctacgtcttgtatgtgtagagcgctgtgggctatttgtgtcgcgtgatacgaggggcgacgtcngcgcangatcaaccacatactcaccctaaagaaaaggccaccggacacgccacnttaagacacagatcaacgttaagacacaacacacgttcctattcctnccttnnntttatattcgcgtgctcgctgcgagtcgcactanagcgatcntctgcatttacctcgctcgtactggcttgntnctancagatgacatntcaaacacccacggtcnatctccggcgcacgacatctacggacaaacanncccagcctcnaaaacaagcgcanngtacnactnnnnnnnnncgnnnntnnnnnncnnncnctcnnncncnnnnannngggggnggnggnnnattatgaagattgttgttgttattaaagaatat

SEQ ID NO: 4125 - DNA, 2688 bp, Glycine max
  misc_feature (2596)..(2596): n is a, c, g, or t
  misc_feature (2598)..(2598): n is a, c, g, or t
  misc_feature (2601)..(2601): n is a, c, g, or t
  misc_feature (2603)..(2603): n is a, c, g, or t
  misc_feature (2609)..(2609): n is a, c, g, or t
  misc_feature (2613)..(2613): n is a, c, g, or t
  misc_feature (2681)..(2681): n is a, c, g, or t
  misc_feature (2688)..(2688): n is a, c, g, or t
  Peptide Sequence Number=SeqID_7908
  Probeset Number=SeqID_13904
tcagctacgtaggcccccccccccatggaccagctaatgataagaagagtgaaatccaacttgaatcctttacaaaagttccaccaacacccaacagcaagtcactgaagggaaagtcgaccctgttgttagcaatatccacatttggctatcaaattcttttatacccacattttgctgaactttgttgggtcacttcaaaactcgatgaaggtccttgtgctgatgtaagtggaccttggaggggctggcctttcaattcttgtatagttcgtcctaataattcacaagacaaggtggcagtatcttgtagttctggtggcaccaaaagtagggaagcatctggtctagtcagaggcttgattgctgttggtttatcagcttacagaggtgtttataaatcagttagggaagtttcccttgatgtaaggaaggttctcgagatcttaattgagaaaatcaataccaaaattcaagtggggaaagatagatatcaatattttcgtattttgtcacaagtggcttatttagaagacatggtcaacaactgggcttattcattgctaagtctggagcaggattcccctgagcataaaacaaaggttataccagaaagtggtgggccattaaacagtcatctcacgcgggaaaatcaccaaactgaagatgaggactgtcatttagttgttcctgtggatggtaatgatttggagacattggagggaagtcacaaggaaattccttctgaaacaactggatatcttgcctctgatgacaacaatgataatgtagagattattgattgtgatgatggaaatgctagttctgaaggatctctacagaaccattcctttccagataatagaatatcaacaacactactgctgcaagccaaccactttatccatccacaagtctggagaaggacattgtgttccggcgcccttggagtcttttttggttgtaccgggccccccctcgaggagagcctacgtggcccccccccccatttggacaatctgaatttgtaactgctggaaataatgaagagatggatggagaactggggatttcaaaaggcttgaacaaatccacgtgcactcaatctgtggtcccttctgaaaatggactccacactgcttgcgaaccaaagaaacacgatgttgagattgggaacattaggtctgatcagcctcttagcttgccctctgtagagaccggtgctaaatcaagtgatgttaaatctgataaacaagagaatgccccagacagtaatgtctcttcaagtaatggctgtggccctgctgaatccggggttatttgcttgtattaatgttgccctgcatgtctccacagtctgcatcatttgacaaagaaaatacttgttgaaaagtggggtttaaacagtgacaagtggacagcagaagatgtccatgatgctgttgcatcattatctgtggatcttatttcagcagttagaaaatgctttatgcctgaagatttcattgattcatcaaataaaacctcaagaaatgaaaagcgtggaacatctctcgactgtttgaaactgagcacgtgtaataatggaaaccaacgcaaggatgttgtgccagctgaatgtgtttctcactcagcaagccaacatgcaactgcaatggaaggtatggtgctgaatgaagaatcatccaagcatgatcttaaatttgttttcagagatggtgtactagttcatttggacccagacaaggatgtctcagttcactgtaaatttgagaacttgtgcctttgttctctaagagagttgatagtaatgaaaaagcgcccttttgattaggctatattgtttcatagcttggattgcatagcaattttttggtgctgatgcggcatttgtatataactttttctgagattgaaatatagttttgaccagaaaaaaaaaaaaaaaaaaaacaaaaaaaaaaaaaaaaaaccactagtgatgaataggtatactgagagggtggaggtccagattttgatcactttactgcttcgccatcttccaccttaggaaagacgagagggtggaggaggacagttggagaatgaaatacatgcaggagttggagatgcaacttggttgcaaggattgttagtagaggatgacattgcgcactgagatatgctcgtgtgatttgtcttttagcgagtgctgatcatgatctgcatcttcatctctgattggcacactagcctgatgcatcaaccacgttcacgagagccagctcgtcttccacaaacggttaagatatcagactcgagtggagtatggaaatataatgtttggaaggcaatactctcgctcactagatggatgctgtcatctgcgtactggtcggagtagtagctagtagaatggtcctctccgctaattagccgggtcgctggggtttttctcttacggtcccccccattcgatcgtgcttaaatcaacctcactcggctgtttctctccccctgttctgtggccccccgccggctgtttccctctgtgggtttctcttcggcctcctctgcccctgccattctgctcctcccttttttggaaaatccntnctngnttctcnctcnagaagttggaactggaggggtgaaatgattccccccttccccctctcccctcccggcgcgcccgccgnccccccn

SEQ ID NO: 4126 - DNA, 1531 bp, Glycine max
  misc_feature (3)..(3): n is a, c, g, or t
  misc_feature (11)..(11): n is a, c, g, or t
  misc_feature (61)..(61): n is a, c, g, or t
  misc_feature (71)..(71): n is a, c, g, or t
  misc_feature (99)..(99): n is a, c, g, or t
  misc_feature (279)..(279): n is a, c, g, or t
  misc_feature (398)..(398): n is a, c, g, or t
  misc_feature (660)..(660): n is a, c, g, or t
  misc_feature (698)..(698): n is a, c, g, or t
  misc_feature (800)..(800): n is a, c, g, or t
  misc_feature (895)..(895): n is a, c, g, or t
  misc_feature (1010)..(1010): n is a, c, g, or t
  misc_feature (1142)..(1142): n is a, c, g, or t
  misc_feature (1441)..(1441): n is a, c, g, or t
  misc_feature (1443)..(1443): n is a, c, g, or t
  misc_feature (1448)..(1448): n is a, c, g, or t
  misc_feature (1483)..(1483): n is a, c, g, or t
  misc_feature (1492)..(1492): n is a, c, g, or t
  misc_feature (1503)..(1503): n is a, c, g, or t
  misc_feature (1515)..(1515): n is a, c, g, or t
  misc_feature (1531)..(1531): n is a, c, g, or t
  Peptide Sequence Number=SeqID_7909
  Probeset Number=SeqID_13905
cgncgatacgnagtgcatagcgcatgtagcgtgatgtgtgttagaagtcgtatatctatanatcgcgatangacgaggcttgatgtatcgagttacatntgtgctatagatgtgtatataccagcatatagagatatatgtagatcatatgatatatatagatcagatatatagatgaatatgtagtatcgctaagatatgtatgaggtgtgtgtgtcgagtgattgatgtgtaatgtcggatggatgagagtattaatactatatagttcttcgttgntggttgatctcatacgtctcatgtattatttattctgtgtgatattatctattacgttcttcactatcgtcaatattatcgcgcggtctacgcgcttcggtgcggcgaggtaggcatgntaatccactagacgtagatgcgtgagtgtgtgtgaggagtggagggtgcacaacatagacagtacgcatgatagctacggctagatgacatcgaatgtttgtattgagtgtatatcgtgtgtcgtagacgtatacgcagtatgagggacgatcgaggtgacatcacttgtaggagtgagcgcgtgagatagttactagcgcagtcatgtgtagagtcgagaagtggtataggcataggtgcagacgcgataacgtcgtcgantttacgtcagtgagctgatataattgttgagctgtgtntccgtacgctaatcaactagcgtatagtatttctatacacgtattggcagcagagacgtaacagcgcggctccactgggataacgactctgttcgtcttatncactcttgcttagcgcaactaacatatacaccaacggtccgcagatctgacgaagactgagcgtacgttgtacgagacgacgagcgaagaatacngaggagacgcgtgtacagataagcagtaatatcataccacagaccgctaagatacaacatcttgactcggtcagaacatagcgtacgcatatactctcttccttcgagcgcctcntgggacgtcagcggatcacttctgtgctagtgtttaccttaatgatctaatcgtatgtatatgtgtgttttctatagctaattattgtatctctacattatactacttcgtatctaatcatatgcatccatnataatctttagatgtatgtgtatacttattatttgtgtattgttttgtaatctatcttaattagtctcttcaatgtgccctgtataatgatctactttcagtgttatcttctcgatgtatgcggttttgctcttatcctcctattcttctttaccctctctttttctgacattcaccaactccccaccacgcgacactctcgccgaagagagacagaagatggtgtggttgtgagttattattcttatttctggtagaaagatggtgtaggttgtgggtggtggcaattggtggtgggntnttttnttcattctaaacaatatcagcagagtatgtatagngttataaantccatcacttncgccccgccccncaaaaagacaaaaaan

SEQ ID NO: 4127 - DNA, 720 bp, Glycine max
  misc_feature (10)..(12): n is a, c, g, or t
  misc_feature (21)..(26): n is a, c, g, or t
  misc_feature (39)..(41): n is a, c, g, or t
  misc_feature (44)..(44): n is a, c, g, or t
  misc_feature (47)..(48): n is a, c, g, or t
  misc_feature (50)..(51): n is a, c, g, or t
  misc_feature (66)..(68): n is a, c, g, or t
  misc_feature (122)..(122): n is a, c, g, or t
  misc_feature (271)..(271): n is a, c, g, or t
  misc_feature (390)..(392): n is a, c, g, or t
  misc_feature (433)..(434): n is a, c, g, or t
  misc_feature (601)..(720): n is a, c, g, or t
  Probeset Number=SeqID_13906
gctatgaagnnngatgtggcnnnnnnacgaattttgctnnngcntanngnnatgcattgggctatnnnactgcagccctccttcaaagtgggaagactggattaatgtcatcggttggtaanttgtgtgctcctgtagaagaatggactgttggtggaactgccctcacttcattgatgggcgtggacaggacacatggtaaattcaaacctgtgatcaagaaggcaatggtggagctagaaggggcacccttcaaaaagtaggcctcctngagggatgagtgggccctaaaaaatcgcttcattagtccaggtccaattcaattcgctggccgaggatctgatgcaattaatcacgctttactagtggagtttggtgcacaagcttaannnataatgagagcctttttgaatggtggcaaattcaaaaaatnngaaaaaaactacaaaaataatagaacggagattagacaaaagaaagagtctctcgcttagttctccctgatgttattgtgttcgagtgacggacgaatccaaccaggaaagagagatcgtaatgtaaatgccaagtaaatgtgaaaagtacagtccatttgtagtgnnnnnnnnnnnnnnnnnnnnnnnnnnnnnnnnnnnnnnnnnnnnnnnnnnnnnnnnnnnnnnnnnnnnnnnnnnnnnnnnnnnnnnnnnnnnnnnnnnnnnnnnnnnnnnnnnnnnnnnn

SEQ ID NO: 4128 - DNA, 582 bp, Glycine max
  Peptide Sequence Number=SeqID_7910
  Probeset Number=SeqID_13907
gccaacagaggaagcaaagatgagtcggtagttgaaaattctaaagccagtaattcaaattcactcctttaaagataaaatttgaaattttattttttcaactaactaaattttattttaaaattttaaaattcttttactaaaatattcaaacagttatttttaataaaaaaagaatttaatttcctacaaaaaatatattacttaattaaattatcctatccaaacacactcttatggtaattaaatgttaatgaattaatattcacacaacaaccaaggactcaaacataaaataattataaacttttttttttctgactataattttgtaaactctaaatacatactacaaccctcaaaagaatatagtataccttttattctttatttccttaattagtaaatgtcctttattattacagcactccttagtaagaccttctattattatcaaagccagctattgaagtcactttaatgtttcagaatcaagaacacattgttacggtatcatcagagaaattaagagtttttatatagttgtcttttgagttaataattggatgtgttaggacacat

SEQ ID NO: 4129 - DNA, 644 bp, Glycine max
  misc_feature (639)..(639): n is a, c, g, or t
  Peptide Sequence Number=SeqID_7576
  Probeset Number=SeqID_13908
aggtctataaacgaaaagttgggtggaatcatcaaattaagtggagtgcttcgtcagttgttatttgcttgaaagatgtccaaagcatatctcagaaataagcccttctttacttcttcatgttatacagagtaaaaaatcctgcgaggacaaagcagtcgagtgtactcttcttggtaaaaaacaaaaaaaacctaaactttgtgacgaatgtgacgatttatataactacgacaagcttatctgcgatgaagaacaagatttagaaaaattgaaaaaatgcgtcagttctaaactcatggaagtttttgacgcagattctgatatttgtgacgacttatttcttgatttaacttcatctcaattagtggacattataacaaaatctatatcaaaaatgtcagttcttaagaaaaggaaaaaaaggaatggttgtaaatgtaccaaaaaggcaagaaccaaagtacccaagttaaaatctgatattccttgttatagtgkggaagatatagaaaatattcagtgggagtgctatcttgaaaatttcaaccgttcggatatgaaatttttgttaaaagcaatccgtttgaaactaaaaggtatcatagatatgacgaaaagtgataaagaatgcgtctngttcg

SEQ ID NO: 4130 - DNA, 1387 bp, Glycine max
  misc_feature (27)..(27): n is a, c, g, or t
  misc_feature (723)..(723): n is a, c, g, or t
  misc_feature (852)..(852): n is a, c, g, or t
  misc_feature (1005)..(1005): n is a, c, g, or t
  misc_feature (1048)..(1048): n is a, c, g, or t
  misc_feature (1117)..(1117): n is a, c, g, or t
  misc_feature (1378)..(1378): n is a, c, g, or t
  misc_feature (1380)..(1380): n is a, c, g, or t
  Probeset Number=SeqID_13909
gttacgcacgcaccaatatatacttantgctatataatagttcgctgttggcgaccgtcccgactctaatcctctgaaggggtgaagggtccagaggtgatatacgtatatatcgaatacttaacagatccaatatcttaccgacccgtgagaccggggtatgtggttatatccctccctaccccatcaccgctccggcgctatgtatttgtatattctgaggaagtaagtgaaacaacggccacatcttagactaaatgtctactgtttgtatgtgagaatgcgcttatatcgttgttagcgatctggaccttctattatttagacctccgcgatgtatgtccatgtgcgcgatgtgaatttctatccgatgtgtgacctcacgcttaagaacacactgctataagttagggatagtgtactcgcatctactcgccttcggcgccaacgtaatctatagctcggtcgtgtgtgtggatacgtctttggtatatgagcagcgtctcatcattcttattcccatcccactcccgcagcgcgtcgatgtatacgataccatttagcgcataagtatcgccgcgtctaatccgatacctgtgagtagcgttcgtgccatacgtattattcggcgtttcttatgtagctgcgtgatagtgcgttacggcataccatgagccgcgagaacgcggtaattcgtcgtacggtcgatagataggcgaatantgcgtagtcgatcactatacactctgctgcgccactaataatacttcgatacactgtatgcgacagaagtatatcttattgcgtcagtcatgctcgtatcgtcgcgcagtcgatggtagatatatcacncgcggcgacgtattcgaccggctattagtacatactgtgcgggcgcggacatggcaattagacagacatgtatgatatacgacgcggcagccctcgtgaatgtccgatctcgcgatataatgatctcatctgtgatccacgtaccgacgagangtacacagaatacacaacggatgaagttgcgtcatcgatgtanatatatctaccgcgcgacatcattgagtaggctatgaatttgtgtgtcgcgagaggcgagtgttataancattcgcgcctgctaatatgactgtcatcgttatgcgtaattttgattgtgcgctgcgtcacacgtgctcggcaaatcattagtatacaaattctgatatcattgctgtactatgactgctagcgcagacgcgaatcggtgagataacatagacgttaacctctcgatactcttctctcgcgcgaccgtgtatgtgcgtctacaatttaattctatggttatacagcgcgtttgactctgacgctgcaaccgccgcgcgtnangtaatat

SEQ ID NO: 4131 - DNA, 501 bp, Glycine max
  Peptide Sequence Number=SeqID_7577
  Probeset Number=SeqID_13910
ttatagtgaaattgggtttcagtttttagtgtaaaaagaacatggatatatgtaaggatagagtatatatgaaagaaaactgatttagatgaaacatgtgataagaaagaaaaaaaaagataaaaataaatgtgtagaaaaaatatttatggaaaataaataatcaaaagagacagagggaggagaaatataaaataagttttaatcatttcattatttaaatatataaaaaattgacaccttattaaatattatatatgatcatcttttattgttcacttatttttttttcatatatatacacatctaaaatatgtgcatcaatggtccaaattagtgttatcaatcactaccttcatggtgttgaatataaggaggtgccatctaaatttcttacttaccaagctgctgatgaccaaatttacaatggccacagatcagttgttgaatctacaagtaaagaagattcattggtactgtctactatagctatagttttat

SEQ ID NO: 4132 - DNA, 1515 bp, Glycine max
  misc_feature (1)..(27): n is a, c, g, or t
  misc_feature (35)..(38): n is a, c, g, or t
  misc_feature (41)..(41): n is a, c, g, or t
  misc_feature (46)..(46): n is a, c, g, or t
  misc_feature (48)..(48): n is a, c, g, or t
  misc_feature (51)..(52): n is a, c, g, or t
  misc_feature (54)..(55): n is a, c, g, or t
  misc_feature (61)..(62): n is a, c, g, or t
  misc_feature (64)..(65): n is a, c, g, or t
  misc_feature (67)..(67): n is a, c, g, or t
  misc_feature (237)..(237): n is a, c, g, or t
  misc_feature (406)..(406): n is a, c, g, or t
  misc_feature (492)..(492): n is a, c, g, or t
  misc_feature (1115)..(1115): n is a, c, g, or t
  misc_feature (1142)..(1142): n is a, c, g, or t
  misc_feature (1421)..(1421): n is a, c, g, or t
  misc_feature (1430)..(1430): n is a, c, g, or t
  misc_feature (1432)..(1432): n is a, c, g, or t
  misc_feature (1459)..(1459): n is a, c, g, or t
  Peptide Sequence Number=SeqID_7578
  Probeset Number=SeqID_13911
nnnnnnnnnnnnnnnnnnnnnnnnnnnaaaataannnnttnaaaananttnntnnatatcnnannanattattatatacattattatacttatattttcctaatacacaatttttacattctcccactttttccctttctagacatatcactcactaacacccgccctcgcatacatcagccccgcccatgggggagttttttccggcggggttgtgatgtttgcgctctgatcggncgttgttataattttattttttaggtgttcgtaattagtagtgtggtatgtacgtgtagagtattgtggtatggtttggggtagggtgttctcattggctcggccgcccgtcgtcttgattctctcttctctcttcttctttcattacctcaccctctacttctacctngatcgccgtctgaaatctagtgtatctactttgttttctactcccacttccctcgcgtcctccctcacacctatatgacgcatatngttactgctagcggccgagtttacgatgctatattcccgcctctctttctccatctgtatcttgcgcgcctcactgactactttcttctcctgtgtgtcgcccattctgacaacattcagcaatctcagtcacgactcgccacgtcttgtacgtgccaattaactccgagacgttggatcctagctcgcgcgctttcttctctgcgcgtttgatctcgagggcacaggtgtctgtatgtacagagaacgatacgccggagtattataataaaatagatagaatgtccggctgatgaggcgtcttaggcgcgtggcgacagtgacatacctgctctgatgcgccggctcgtgcacgatactatcttctacctcatcacacactccatgccaccatacctcataagattataaatgtgaatcagtaaagtacagcggcgagtaaaggtatatcagacgctcggcgtgataaatataggtgcgcggggtcgggtgtgtctactagtagctcgtcaccacattattaattaccacgctaccctgagatatgcaggcgcggattttacaatatcacacacaccccggctatgaaggataaatatataaatagcacgagggcgcggagnagttgacgtcgtggtcggggttccgcnctcacgctctgtctgcctcgcttattcactcacatgtacctctgtcgccgcgcagctgcgtgctctatgtacttgttgctcgcggccgccggtgttggcggcttagttagggatatgcgccctacacatatcactggtactggtttgtgtatgagtgtataacttcacgcgcacaggcgctagtgcgtctgcgtcctccgcccgtcttactactctccactacccgcgcgtcacgatcgccgattatccttatgtacccgtatcatcgcgcgcgacgcnagtatggtnanacacacggctcccccggtgccatcggnttggtgtgtcggcgggcgtgccgcagccgcgaccctcaaccttcttctctctgacg

SEQ ID NO: 4133 - DNA, 1459 bp, Glycine max
  Probeset Number=SeqID_13912
aaagccttagtaacagcacctaccttattcatgggcttaggatgctttttgtgggtgccggtatccattggtctaggccgccggcctacaatgttgatcgcgacacttgtcgtactgctcgctatgctatgggctggcgaggcaggatcattccgttcgctcgtaggcgcagtctgcttccttggtctcggcgaggggcttgcgttgtccctggctttcctgatggtcattgaccttacctacatcaaccagagatcggcggcagtagcactcatgtggtgcatggcaggatgctttggcacttctggcgttgcactggtgcctgtgttagcagaccacggaaacaactggcgaaatttctatcattactggaccatccccgttgtcgtctcgctcgctgtcaccttcgctctctatcccgaaacatacttcaaaaggccaactgtagcttttaatggacttatcctattgcaaagtgctaccgagaagttgacggtctacgaagatcgcgagaaggactccgagatatatcgcgatctgcccgagtaccccttgcgcactggctttgcaggctttcgtgacaaggccggtctatcgcgctcaccctttgcatcatgggcttcggcgggtcgttgcatcattcaaatggcttactgtgctgccaatccacttatcttttgggtcttcgttgcctctgccttcaactcggcaagcatgatcttcatcggcgcaacgtacgcgcgcattcttatcgcaccgccttataacatgtcgccgagtgttgttggcactgtcaatgtcgcatcgggattcggagccctatgtggtctgcccatatttgctttgctcttctgcaaggtgttgaaacgcctctcaagccgcaatcgaggggtattagaggcggagcactatcttgtcggctacatcctacccgtcatcactggcgcgctcagctcagtgctctatggtcttgctgttcactttcgttggcaacctgcctgccatgtacttcgcgtacggtatcaacggcttctccttcataacactcatgatcgcaaacacactctgggtcaccgaagccttcccgcgatgggctgcacccgctatcgctgttgttggtggaggatgctacatcctctcctttgccatgagctttgcgcttgtgccttggatcgacgctcacggatacatgtgggttggtattgaactcatgatcttccaggtcttgggtgggctggttgctatgccagtagccttttggggtaagagtacgcgacaggccatcgctggcaggtggtctgaagaccggagtggtgcgcttcgtccgctctaggatttgtacatggcatccttgatgctggtagtaattagttgcagggttatgcttctagagcagtggtcatcggcttcactctatctagagcattatactctggatgtaaatggacgcggataattt

SEQ ID NO: 4134 - DNA, 1654 bp, Glycine max
  misc_feature (1)..(1): n is a, c, g, or t
  misc_feature (5)..(6): n is a, c, g, or t
  misc_feature (12)..(12): n is a, c, g, or t
  misc_feature (17)..(21): n is a, c, g, or t
  misc_feature (23)..(23): n is a, c, g, or t
  misc_feature (26)..(26): n is a, c, g, or t
  misc_feature (88)..(88): n is a, c, g, or t
  misc_feature (90)..(91): n is a, c, g, or t
  misc_feature (123)..(123): n is a, c, g, or t
  misc_feature (128)..(129): n is a, c, g, or t
  misc_feature (156)..(156): n is a, c, g, or t
  misc_feature (185)..(185): n is a, c, g, or t
  misc_feature (220)..(220): n is a, c, g, or t
  misc_feature (222)..(223): n is a, c, g, or t
  misc_feature (225)..(225): n is a, c, g, or t
  misc_feature (291)..(291): n is a, c, g, or t
  misc_feature (324)..(324): n is a, c, g, or t
  misc_feature (371)..(372): n is a, c, g, or t
  misc_feature (378)..(378): n is a, c, g, or t
  misc_feature (407)..(407): n is a, c, g, or t
  misc_feature (428)..(428): n is a, c, g, or t
  misc_feature (463)..(463): n is a, c, g, or t
  misc_feature (581)..(581): n is a, c, g, or t
  misc_feature (591)..(591): n is a, c, g, or t
  misc_feature (861)..(861): n is a, c, g, or t
  misc_feature (863)..(863): n is a, c, g, or t
  misc_feature (1126)..(1126): n is a, c, g, or t
  misc_feature (1486)..(1486): n is a, c, g, or t
  misc_feature (1499)..(1499): n is a, c, g, or t
  misc_feature (1543)..(1543): n is a, c, g, or t
  misc_feature (1547)..(1547): n is a, c, g, or t
  misc_feature (1550)..(1551): n is a, c, g, or t
  misc_feature (1568)..(1568): n is a, c, g, or t
  misc_feature (1581)..(1583): n is a, c, g, or t
  misc_feature (1586)..(1586): n is a, c, g, or t
  Peptide Sequence Number=SeqID_7579
  Probeset Number=SeqID_13913
nacanncaattnaccannnnngnagntatgacgtggtactcacgtgtatagtattcgtatattgtgtgtgtgatgacgcgtctatctngnnatgtgtgcgtgaggagtgaggaatcgggagtngagtnnacccgtagtaagtagatgcggtgcagngagtgcgtgagtgtggacggacatagcantaacagctgatagtatatatgtatactagtgtganannanatatatgttgaagtgtgtctgatgtgtgcctgaagattagttgtatgtgttgtgtattatgtgatnggtatagtgtattgtatgaatgtgtgatcgatntttgttgtgagtatagatatatcacgatgagagatagagtgtgtaanntcccanaagcagtagaacatgtacatcgtatacantgtgtcattcaatagtgtgtnatatgtgcggccgtgtggtgtgtgtgtttggtganatatacaagtagtcgtgtttagtcaatagtaatagatgactagctgagatgatcgaggttatacgaagatatagttgagtaaagtagagtatatagtatatggtcgcgatgatcagangtgaggtagnagttgtatagtctcatctagataatatgagtgtaatagatatgacacatcatgaggcatattattgtatagatatatattctacatcgatgatatcgtgagagttgtggtcatatgatagagtgtagtgatgatcccctattatgtatgatatgtgagaagagatattaatagatgtgttagcgagaataatagtccctaaagatatagtaggagattatgtagtgtgatgtgggtgggtgtggctagtggggtatgagtagtgagacananctagaacagcatgagtaagagtagtgaagttaacgacatgagtggtgtggaggtcgtatctgtagttagtctgatgatgagtattataatgtctgattgtacattatatagtttgtgtcttgtagaatgtgtgaatgtaatgtgtgtgctgtctgcggagagtgagagggaagcatagtagagcagaggagagtagtgtggtatatatgtttatgtatatgtgttgggatgatgatcgcagagggagaggaagataagatatntgtggacaagcagaagtatagaaggagtggggagcagtgaggagaggtaagagagggtgtgagcgggaggaagtgggagatagaggagagagggggtagtaggaaggactaccgcatataggtagagtataatgtaatattgatgaggagagaggtatgaggagagagataggaaagagaaaagtgagatgtgattgtagcagtaggtgaagatgagtaagagataatatagaatgaatgatgacgagggaggaaaggatgcgagtgcgcgtgttgtagtggtgagagatggacagaatgtggtgggtagttggaggtctctggcctgatgtagatcagaggaggggatagggatatggnagtgtgtgttgantatagtatacgtttagagtagaaacagagaggagtggtgagggngggngcnnatagtgtgtggtgttanttggtctctctannncanggaagttaatataggttaagaagatagtttatgtatagaaatatgtgttgtgtgatggtgtagtattt

SEQ ID NO: 4135 - DNA, 613 bp, Glycine max
  misc_feature (544)..(544): n is a, c, g, or t
  misc_feature (609)..(609): n is a, c, g, or t
  misc_feature (613)..(613): n is a, c, g, or t
  Probeset Number=SeqID_13914
cgtaggccccccccccgaatccttcatatcactgccggcgcgcaagagaggaccatccttgttctgccctctacctcgttcatacaaacatttcgcacacgcagctctatctctccacaacacatccaccatgggtctcatcaagggcggcttcttgcgcctgttccaaacactgctatacgcgctctgcttctgctgcgccggcattgccctcggcatctactcatacttcctcgcggtccaagccgatcgcgaccagggcatccccagatggcaaaaggctgttgagggtatctccggcgtggctgttctgtacaccatcgctgccgtggtcctcacttgctgccttggtggtatcagcttcttcgccttcaccgcgattgtccttgacatcctcttcgtcggcggcttcattgccatcgctgttctgacccgccacggtgcttcctcttgcactggcatcgtcaacacccctctcggtatcggcaatgccaacgccaactctgagggcttcggcaacaacggtctcggcactggaaacggngagaacctcacctacgctgtttctcctcgcaacgcttgccgcatgaacacagccgtcttcgccgngtcn

SEQ ID NO: 4136 - DNA, 518 bp, Glycine max
  Peptide Sequence Number=SeqID_7580
  Probeset Number=SeqID_13915
gcgcgagcttggaatttggctcgttcttgagcccccttgtacaagggagccatagctaatgtctgcgggggggcttttcagattgttgcctgaggttcccgaacacaagtcacaataaaacattttgaggcagccattgataggaccattggtggcttggaaaagaggaacaaggtcattactacgctggaaaggcggactgttgcctaccaagacccatgccatgctgcttcaagttggaccaaggagcatgttgagcccttgttgaaagtaactattaatgctggttctgccgttgctcatgggtttgcccaatatgctcccaatgagaaccttcttatgacaaaagatcaggtttttaatacgacttgtatgacacttggcggtcgggctgctgagcaggctcttattgggagaatctcaacacggagcacccaatgacttggaaaaagtgaccaatctgacttatgcccaagtatgcattttatggttttagcaacaaattaagctctgttttc

SEQ ID NO: 4137 - DNA, 667 bp, Glycine max
  Peptide Sequence Number=SeqID_7581
  Probeset Number=SeqID_13916
atcgcataaacgatctcacttctcacttttttttttccctcttctccgatttcatgaatatggagcgctacacgctaccggtaccacccaatattattcccgaggaagaaacaaacattgccattgccatgagtgcccctcttattcccttcctttaaaccatgcttcaacaacaccctcaacaacttgactcttactttaactcttccataagtcctactactatccccttttggtcctaacatggactcgtgtctctctcatgacccatttctcgcgtgctttacttcagcacagcagcagtagtagcaacatggccctcgaccggggttttgattcggcactgaacactgggattcactcttttgatcctgctacccatttttttttcaaggccccaaaggtggggtttcaagttctcggagctccaaaccctgggttgaacttgggaaatgtaaatggccccctttgggaaaggggaaaaaaggaggttgttttgttgggggcctcccctttttaagcccccccaaaaaaaaccccactttttccccgaaaggggagggcgaaccccccgaaaaatctccggtttggaaattggaaaaaaaaagggggaaaaatccccaaaaaagacagcgggggggggccaaaaaacaaaaaacctcttcca

SEQ ID NO: 4138 - DNA, 2293 bp, Glycine max
  misc_feature (4)..(4): n is a, c, g, or t
  misc_feature (50)..(50): n is a, c, g, or t
  misc_feature (56)..(57): n is a, c, g, or t
  misc_feature (67)..(67): n is a, c, g, or t
  misc_feature (79)..(79): n is a, c, g, or t
  misc_feature (86)..(86): n is a, c, g, or t
  misc_feature (90)..(91): n is a, c, g, or t
  misc_feature (138)..(138): n is a, c, g, or t
  misc_feature (150)..(150): n is a, c, g, or t
  misc_feature (162)..(162): n is a, c, g, or t
  misc_feature (178)..(178): n is a, c, g, or t
  misc_feature (189)..(189): n is a, c, g, or t
  misc_feature (195)..(195): n is a, c, g, or t
  misc_feature (203)..(204): n is a, c, g, or t
  misc_feature (206)..(206): n is a, c, g, or t
  misc_feature (229)..(229): n is a, c, g, or t
  misc_feature (241)..(241): n is a, c, g, or t
  misc_feature (257)..(258): n is a, c, g, or t
  misc_feature (266)..(266): n is a, c, g, or t
  misc_feature (269)..(269): n is a, c, g, or t
  misc_feature (275)..(275): n is a, c, g, or t
  misc_feature (278)..(278): n is a, c, g, or t
  misc_feature (280)..(280): n is a, c, g, or t
  misc_feature (295)..(295): n is a, c, g, or t
  misc_feature (336)..(336): n is a, c, g, or t
  misc_feature (356)..(356): n is a, c, g, or t
  misc_feature (369)..(369): n is a, c, g, or t
  misc_feature (374)..(374): n is a, c, g, or t
  misc_feature (381)..(381): n is a, c, g, or t
  misc_feature (395)..(395): n is a, c, g, or t
  misc_feature (410)..(410): n is a, c, g, or t
  misc_feature (413)..(413): n is a, c, g, or t
  misc_feature (418)..(419): n is a, c, g, or t
  misc_feature (422)..(422): n is a, c, g, or t
  misc_feature (496)..(496): n is a, c, g, or t
  misc_feature (501)..(501): n is a, c, g, or t
  misc_feature (507)..(507): n is a, c, g, or t
  misc_feature (531)..(531): n is a, c, g, or t
  misc_feature (536)..(536): n is a, c, g, or t
  misc_feature (541)..(541): n is a, c, g, or t
  misc_feature (549)..(549): n is a, c, g, or t
  misc_feature (552)..(552): n is a, c, g, or t
  misc_feature (559)..(559): n is a, c, g, or t
  misc_feature (561)..(561): n is a, c, g, or t
  misc_feature (584)..(584): n is a, c, g, or t
  misc_feature (589)..(589): n is a, c, g, or t
  misc_feature (623)..(623): n is a, c, g, or t
  misc_feature (637)..(637): n is a, c, g, or t
  misc_feature (667)..(667): n is a, c, g, or t
  misc_feature (681)..(681): n is a, c, g, or t
  misc_feature (740)..(740): n is a, c, g, or t
  misc_feature (786)..(786): n is a, c, g, or t
  misc_feature (791)..(791): n is a, c, g, or t
  misc_feature (802)..(802): n is a, c, g, or t
  misc_feature (812)..(812): n is a, c, g, or t
  misc_feature (833)..(833): n is a, c, g, or t
  misc_feature (842)..(842): n is a, c, g, or t
  misc_feature (848)..(848): n is a, c, g, or t
  misc_feature (851)..(851): n is a, c, g, or t
  misc_feature (869)..(869): n is a, c, g, or t
  misc_feature (903)..(903): n is a, c, g, or t
  misc_feature (952)..(952): n is a, c, g, or t
  misc_feature (967)..(967): n is a, c, g, or t
  misc_feature (1122)..(1122): n is a, c, g, or t
  misc_feature (1160)..(1160): n is a, c, g, or t
  misc_feature (1245)..(1248): n is a, c, g, or t
  misc_feature (1265)..(1265): n is a, c, g, or t
  misc_feature (1504)..(1504): n is a, c, g, or t
  misc_feature (1507)..(1507): n is a, c, g, or t
  misc_feature (1621)..(1621): n is a, c, g, or t
  misc_feature (1719)..(1719): n is a, c, g, or t
  misc_feature (1750)..(1750): n is a, c, g, or t
  misc_feature (1928)..(1928): n is a, c, g, or t
  misc_feature (1930)..(1930): n is a, c, g, or t
  misc_feature (2024)..(2024): n is a, c, g, or t
  misc_feature (2026)..(2026): n is a, c, g, or t
  misc_feature (2032)..(2032): n is a, c, g, or t
  misc_feature (2078)..(2078): n is a, c, g, or t
  misc_feature (2152)..(2152): n is a, c, g, or t
  misc_feature (2158)..(2158): n is a, c, g, or t
  misc_feature (2184)..(2185): n is a, c, g, or t
  misc_feature (2194)..(2194): n is a, c, g, or t
  misc_feature (2241)..(2241): n is a, c, g, or t
  misc_feature (2255)..(2256): n is a, c, g, or t
  misc_feature (2260)..(2263): n is a, c, g, or t
  misc_feature (2266)..(2267): n is a, c, g, or t
  misc_feature (2269)..(2270): n is a, c, g, or t
  misc_feature (2274)..(2274): n is a, c, g, or t
  misc_feature (2288)..(2293): n is a, c, g, or t
  Probeset Number=SeqID_13917
ccgnatttcccgtcgcgacgcggcgctctagctgcgcaccgtactcgtcngcgcgnncggtctcgcntacgccagtctncccccgngcgnngcgtcggggctgtgctgcgcgtccggcgcgcgcgccgcgtcagctgntctggtgcagtngttccctcccgntgccgtctcctgatcntcgctaccatntgctanccgtgatnnantcgtagtgcatcgtccgtcgcancagctcgatccntcgacgtcggacgcannggacgtcncgntagcgncgncnacgcacatgcgcacnaggtcgggcaccagcacgtaaaaaccgttgctgctgcacgnaccatcatctaaccacgtcnatccatctagcancgcantcgtcgnacgctgcctgctcnacgggtcgtcgtcgncancgatnngtngacgactgaccacccgtccgcgccgccccgcgccggacgcaacagatgcggctgcgactcgtcgcgccagcgcnacgcntctggntacgcgtactgcgctagtgtcgcntctcntccgnactgcganatngtcgtcncngctcgtcgtcctgccggcttcgncgctnccgcacgactgcccccccgtcgccgcaccgtcgncgcaccggccgctncgtcgcgttgctgcgcacgtcatgagcgtncgaaacgagcgcgnacccgcgcgtcccgctcagcagcgcgtgctgcgcggcggcagcgccatccgggtagcgngcgtcgtgtgcgcgtcgggtcgcgggccatgcgactgctctgatanccgtntgtcgtttacntgctacatgngtatgcggtgtgctcaccagngcacgactnagcgcngtngctccaccggcgtcgcancgcagcacggcggcacgctcgcatcgtcgcgcgncgcacgcatcgtcgcacgcctgtgcgtcggtatcagccccgagacacancgtacggctctgcgnctgtctcgcgcatgacgacgacgagcatcgtgtgtcgccctgacacagtagcgaccgcacgtcgtcgctgtatcctacgcgtctcgagacgttgcgcactcgtcccacacctcgtcaccgcgcgacgctccgtcgtctcgtctcgtcacctcgcngagagagacgcgcgtccagtcggcgcgcagcgcgtgcncgcggcggcgtcgcggggcggtcgggagcgcggcagtcgcgcgcgcgtcgaccgcggcgcgcgccgccgcgcgtccacccggcgnnnncgacgccgcgcggacgngcgcgccgcgctcgcgcgcgcagacgcggcgccgccacggcgcgcgctgctcgtcgtcacgcgcgccgcggcgcgtgcccgcgtagcgcttgctcgcgcgtggcgcgcccgagcgcgccggacgcgcgcgcgcgacgcgcccgtcgccgcgcggcgcgcgcgggcagcggcgagcgcgcaggcgcgtgctgagcgcccgcgccgcgcgcgcctcgcgcagccgccgcgctgcggcgtgngtngcggccgtccgtccgccgcggtgcggcgacgcgcacggccgcgcgcggaccgccgcgggccgcgccccgccggtccgcgccgctccgctcggcgacgcgcgcgcgcgcgcgtcncccgacagcacagccggcccggcgcgccgcgcgcggcggggagcgcgagccgagtcgcgcgacggcgcgtgcccagaccgacgcgcatgcgccgcgcnccccgcgcgctgcgtccgcacgcgcgcgcgnagcacgacacgcgccgccgcggtcacgcacacgcacgcggtgcgaccggcgcaccgacatcacacacatacaccacaccacactacactcagcagagacatagagcacatcagcagcgagacagaccgtcagacacggacagagacagagatagacatatgtagatctatatatagangnggacatatagggagagagagagagatacatacagagagacgtcagcgacgagacagacagacagagatagagagagacgagcacagagagacananagaaanacatatatacatccatgtaggaggagacacagacacatagagaganacatacatacatcgacacacacaccgcgtcacagagagagagacacacacaccccccgcgctcgacagcaacgnagcgcngcgccgcgcgcgcgccgcacacaacnngccacacgnaacggggctgtggggtcgtgccgcctgggccggacggggccgccagncccaaacgcaacannaaannnnccnnannatanaattaatttaattnnnnnn

SEQ ID NO: 4139 - DNA, 1499 bp, Glycine max
  misc_feature (45)..(45): n is a, c, g, or t
  misc_feature (105)..(105): n is a, c, g, or t
  misc_feature (185)..(185): n is a, c, g, or t
  misc_feature (250)..(250): n is a, c, g, or t
  misc_feature (378)..(378): n is a, c, g, or t
  misc_feature (592)..(592): n is a, c, g, or t
  misc_feature (775)..(775): n is a, c, g, or t
  misc_feature (811)..(811): n is a, c, g, or t
  misc_feature (1032)..(1032): n is a, c, g, or t
  misc_feature (1257)..(1257): n is a, c, g, or t
  misc_feature (1364)..(1364): n is a, c, g, or t
  misc_feature (1414)..(1415): n is a, c, g, or t
  misc_feature (1422)..(1427): n is a, c, g, or t
  misc_feature (1429)..(1429): n is a, c, g, or t
  misc_feature (1442)..(1442): n is a, c, g, or t
  misc_feature (1446)..(1446): n is a, c, g, or t
  misc_feature (1467)..(1467): n is a, c, g, or t
  misc_feature (1471)..(1471): n is a, c, g, or t
  misc_feature (1475)..(1475): n is a, c, g, or t
  misc_feature (1477)..(1478): n is a, c, g, or t
  misc_feature (1490)..(1491): n is a, c, g, or t
  Peptide Sequence Number=SeqID_7582
  Probeset Number=SeqID_13918
cggtgtgtgtgtgtgatatcctgacttgtgtgcgtacgttgtgtngatgagataatgtagtgacagaggtgtatgtatgtggtgtgtatttacgaatttgatcgngaggagagtgtaggacgtgtagagtaagagagttgagaactcgagtggaagagtgacagagggagagtcagagtgcggangaagaggggtgagagagatgtatattgagtttttggttatcttattgtcatgatgctgtatgtgngtgtaggtcgataagtagggtctgcgactacagcgacactcataagaaatgtctattcagtatgtgttgagtatatagtgtatcttggtgtgtgtgtgtgttgtgaggattcgatagatggtaagagntgtgtgtgatgatgaccgcgagaggatatgatgtaggatgttgagatgaggatgatggtagtggtgggagtgagcgttagtcggagtagcgtgtgttgtggtgtagttgatgagtcgttgtgatcggtatggtgtgtgttgtcgggcgtagtggagcagatatatggaggtgcaggacgagagagagtgtaggtgagtgtgacgagaggtgtgntgtctgggagagtagttgagaccacgattgtgtatgtcgtgggtgcggtgcaagtgtggcgttgtacgtatgagcaggattgtgcgtcatccttacacattgtaattagtgtgagatgtggtgggagggtagggtgggttggagggacatacatcgtagtagttggatgtacgtagtcatctnctgtgctgagatatgtgagagttgttgtgtttctanatgtaattataagcaaatacttccgagatagatatcgatcgcggggttctggtggtgcggtgccggtgtagcgtgtgtgggcgtgtcggggtattttctcattcatcgtcttgtatttttaattgatcataagcttttaatctgccttataattgttatgagtttagataagttagtatatgttatggtgatgtatgttgttatttgtggttatttgcgtntgactttttatttttctttaattttttgtcacgttaggtgttgggacggagagaagtagagaacagagaaagataagaaaacaaaaaacataacagaagaaagacagagaaagagggagcgaggagaggcgcgcgcggggcggaggagaggagtggagagcgcgggagaggggacggcgggggggtggacccgggggaggggtcgggtggtggtttggtgtgtanggcggtggtggtgttttggagggggggtggtttggtgtggcgcgttcgtgctcgtcgtttgttggtgtcgcgcgtcgctactcatgtggtgactcctttaacatccnctgcaagtcataacattcataactatatatataaaaacaaaaaaaataannaaaaaannnnnncnaccccccaccccncttnctccccccctccacacccccncccncccncnncccccacaaccnnccaaacaa

SEQ ID NO: 4140 - DNA, 1515 bp, Glycine max
  misc_feature (1)..(1): n is a, c, g, or t
  misc_feature (41)..(41): n is a, c, g, or t
  misc_feature (224)..(224): n is a, c, g, or t
  misc_feature (281)..(281): n is a, c, g, or t
  misc_feature (736)..(736): n is a, c, g, or t
  misc_feature (1308)..(1309): n is a, c, g, or t
  misc_feature (1326)..(1326): n is a, c, g, or t
  misc_feature (1352)..(1352): n is a, c, g, or t
  misc_feature (1398)..(1398): n is a, c, g, or t
  misc_feature (1406)..(1406): n is a, c, g, or t
  misc_feature (1417)..(1417): n is a, c, g, or t
  misc_feature (1434)..(1434): n is a, c, g, or t
  misc_feature (1436)..(1436): n is a, c, g, or t
  misc_feature (1442)..(1444): n is a, c, g, or t
  misc_feature (1450)..(1451): n is a, c, g, or t
  misc_feature (1453)..(1453): n is a, c, g, or t
  misc_feature (1456)..(1459): n is a, c, g, or t
  misc_feature (1462)..(1462): n is a, c, g, or t
  misc_feature (1465)..(1465): n is a, c, g, or t
  misc_feature (1469)..(1469): n is a, c, g, or t
  misc_feature (1473)..(1474): n is a, c, g, or t
  misc_feature (1480)..(1493): n is a, c, g, or t
  misc_feature (1495)..(1497): n is a, c, g, or t
  misc_feature (1500)..(1503): n is a, c, g, or t
  misc_feature (1509)..(1511): n is a, c, g, or t
  Probeset Number=SeqID_13919
ncagaaagataagtgccgtaggacaggcgataactagcaanggtgaaaaattgttagagacgcccatcatacgcatacatgtatagtaagactagctctgcataaatgttgatgtatctttcattaattcatttgatatctagtatgatagtttcgatatatatcagaacacagagaagaacggacaacgcccaatttctgttctgactcctttgcctcctccnttttttcctacgctccatatctttatatctccaactctcgcctataccaccgtgttnggcagacgacagacacgccacgacgaagcgactcccaagtcaagtagtcccatcgcacatatctacgataatatatcaacgcaaggagctccacacacccgcagacgcgcggcgatataacgtgcgccggcactctcagattagctgggagatgttgtgtgatctctaacacctgatttcggcgagcgtggcagagcaacctcgctcaatgaactatataactcacacgatataataacaatataggaagctgcgcattgagacgtagcaattataaacaaaatccaatgcaaaatacaaaccagcatcaacgattacattatacaaaacagaatgtgaagaatgaaggggagctgaataagaggagggagcgggggaacagttcggtggagtggcgggttacagcgagagtggaggacgagcggtgacagtgatagataagctagaagagaganaaagaaaagacataaattacgaagggaaatgtgggaagtgatacttgacgacgctcaatcggtaatataatatttgttatgatctgtatacaagttgtattagccgagaagagtgcaacgtagaatcttaattcgaatgagattgaagtagactagtgcaacaaatatatcgtagtgaaaagcggcaacgaaccaacagacagccaacagtaaaatctaaatgcataatgacaagtgtggcggtagcttctctgattcccatcacatttcataggaagagagggataagcgtatgagtaaatagtctaagctccacatccacccacgtcaagttctaaaacctacgcagtacgcacacgcacattacgcctacaaccctaaagacccgaacgcacagcctcttacaccctcacgcacacgccacaatcggatcccaaatcaattaaagtcatcagccatccaaccgacacaaccacaaacgcaatcccaaagcgttcaagtgcgctacgctcacacgcacaacattcacaatctacccccaccacgaccgccaagtgctgacggcgaagatnnggggggcccggaggggnaagggcgagaggacaagcagcacggnagtacaggacgcggttagaagatagaaaaacggtcacgcggcaggnacgcgcgntgaggatggtnaacgagagttaagtgtntntaaggnnnaggggnngntgnnnngtngtngganatannatgggnnnnnnnnnnnnnnannnttnnnnaaattnnntttt

SEQ ID NO: 4141 - DNA, 1419 bp, Glycine max
  misc_feature (73)..(74): n is a, c, g, or t
  misc_feature (84)..(88): n is a, c, g, or t
  misc_feature (146)..(146): n is a, c, g, or t
  misc_feature (159)..(160): n is a, c, g, or t
  misc_feature (262)..(262): n is a, c, g, or t
  misc_feature (283)..(283): n is a, c, g, or t
  misc_feature (347)..(347): n is a, c, g, or t
  misc_feature (394)..(394): n is a, c, g, or t
  misc_feature (686)..(686): n is a, c, g, or t
  misc_feature (868)..(868): n is a, c, g, or t
  misc_feature (1114)..(1114): n is a, c, g, or t
  misc_feature (1170)..(1170): n is a, c, g, or t
  misc_feature (1297)..(1297): n is a, c, g, or t
  misc_feature (1329)..(1329): n is a, c, g, or t
  Peptide Sequence Number=SeqID_7583
  Probeset Number=SeqID_13920
gttttggggtggggctgtgtttgggcgtccccttcctttttttctcactatatttctcctccttctcaccccnncccccgccgnnnnnggcacaccgccgcatcctgtgatatatatcgaactcgccattctctcccctgtaattnttctatttaattnngtttgtcgtctcttattttacacggtcctgacgtgaagatcaccaccaccacgcgatcctcaccaccacctgagaccgccctagaagaggccatcaccgcanaggacgaccgaatgattcagngtcaccagtacgtggacattcccttattcatctctagcatacggttttgggtggtcgacgctangcagcgaggacgtagctgctccacatgccgaccaagacacgcaacgnatacgccgatcacgacgcgagccgccagaacaagtgcgaaacgtgaacacggagactgcaaggagaaaataagaaagcaacaaataaatacaataaacataaaataaaactttataaatagagaaagaggtagcgagcggtggttgtagtgtatagaggacgcgtgtaaaggtctggacgggcatgtgtgcagttaaacatgacaatgtgagcgagtatgatggccaagcggcgaccataaggagggaggaagcgaggatgaggagaggtgagtaggtacatgtcttagtcnaatatacttaatgaccgacggcgggggaagacgtataaatcgatctgggcgacacgctagcgccctcacccactgctcttctctttcatacgtagatcagccgagcctcctcgccgctcacccgctcgcgtgttatgcatcgtccctttcgcttcatttacatatctctctacccatcgtangtagtgtagacgagtatatcatgtcgcacacaacaccaccgctcctgtgcgtctcatgaatacaatagatagtagtgtatcccgcacccgcgatacgtagcatacataagtctacgcaaatcctatcacttatctgcatttgatatacacatgcacactccacacgtcaacatacactcaatcatgccccaccgcagctagcgacgccacattggacaatctcaccaacactctactgacatgcgngaacagataaagatcgtgagatttacacaagaatatatatacgtcgcctgtcgtgngcaccgacgcaccaacgcaaccaaccgcaccgatgcggcctctgctagtcacatacagtgcgctgcctgtcacctgctcgcgactgtgtttctgcacttctcgctctattgtgcaactagagacagngcgctccacaacatacacacgcaacgctcaancgctactctatgctataactcaccattctgttcctcgcctgtactcgtgcatatcacaccccaccgctccagctcacatactcctaaact

SEQ ID NO: 4142 - DNA, 872 bp, Glycine max
  Probeset Number=SeqID_13921
atgttattatctcgattccctctcgattttgtgcatatcgatctctgtttggtgtttaattgctagatttcgattgcgtttcctctttgttcgctgatctagtgatttttcacctgcagaatcggccatgaaaggaggtaattcgaagactgactccagaaactccaagctctctgtgaacaagaagcctacgaaggcgagcaaagctgctgctaaagatcctaacaaacctaagaggccggccagtgctttcttcgtcttcatggaggacttccgtcagacttacaagaaggaacaccccagcaacaaatctgtcgctgctgttggaaaagctggtggagagaagtggaaatcactgtctgactctgagaaagctccctacgtagccaaggctgataagcgcaaggttgagtatgagaagaccatgaaggcctacaacaaaaagctggaggaaggtccaaaggaggacgaggaatctgacgacaagtcagtgtctgaggttagtgaagaggaggatgcggatgataggagtgatgaggaggaagacgattgactaagaagttgaagttggcagcattatataaggacctctgcaaggatctctctgatgccttttttttttttttttttttaatcttcttttcccttgcaatgttaacgaggctggttaaaattaaaatggggggttttctgcttttatatttactgctgtttctatttagtaagctaccactatctcccactgactctgattttacgggtaatggaaaaaaatgttttagatggtgatcttgatatttgcagctctatattttatggctgctctatgtttgttatgatcgtagattcttaaaaaaaaaaaaaaaaaaaag

SEQ ID NO: 4143 - DNA, 2137 bp, Glycine max
  misc_feature (2137)..(2137): n is a, c, g, or t
  Peptide Sequence Number=SeqID_7584
  Probeset Number=SeqID_13922
tcagctacgtaggcccccccccccgttacaaaatacattaaatcacaactttaccatccaccaccctctctcctatggacaacctcgaatctagaatctctattggactcactttcaatgatgtcctccttgtcccccaatactccactgtcaattctcgctctgaaattgacctccgcactagattctccaagaacgtccctcttaatgtccccattgtctcttctcctatggacactgtcactgaaactgacatggccattgaaatggcaagatggggaggtttgggtattgttcacagatataatactatcgaagatcaagccaacatgatctctcaagtcaagagagctgaaagcttcgtcatcactactccttatactatcagtcaatctactaccgttagagctgtccaagctctttccaaggcttacagagtccaaactttccttgttactgatgatactcataagcctaatgaacttgctgatcctgtccaaaagcataaactcgtcggtatccttactggcagagatcttagaatcgctttgaacggtgatcaacttgtcgaagagattatgacccctagagaaagactcactactacttatgatcccgaaatctccctcaaggaagccaagagccttatgattaacaatagagttgaaaaacttcccattattactgagaagaatgacgtcttgggtcttattactcttcgtgatattatccttagagaacaaagacctttggctaatcttgatacttttggtagattgagagttggtgctgctgttggtgccaaggatgattatcttgaaagagccaagaagcttattgatgtcggaactgatgttcttgtcgttgatattgctaatggacatgctcaattatgtattgatgctgtcgaaagattgaaggaacaattcactgtcgatgttgttgctggatctattgcttccagagaaggtgctgaaaatctcatcaaggctggtgctgacggtatccgttgcggtattggaagtggtgctatttgcacaactagacttgttgctggctctggtgtccctcaattatctgctatctttgatgctgcctccgtttgtaatgaagctggtgttcctttaatctctgatggtggtaatggtaacagtggtaacatgtgcaaagctcttgctgctggtgctgattgcgtcatggttggaagacttattgctggttgtgatgaaagccctggtcaagttcttctcaaggatggtaagagagtcaagatctacagaggtatggctggctatggtgctaacttgtccaaggctcaaagaactaacgctgctgaacctcactctttgaacttcactcctgaaggtgttgaaggatatatcccatactgtggacctttgaaggatgtcttgaaccaattcgctcaaggaatcaagagtggtatgagctactgtggatctcatgagattatggagatgaagaagaaggctaaattcatcagattaagtcaaagcgctatagttgaaagtggcgttcatgacattaacaagttgtaaatttggaacatgagctttttggtaagagtgtctttggttattggttagaagaggttggattaactacttaaaaatcgttgtttttataaaaatacaaaaagaataaaaaaagcgatttgtgttttttttttcttgcttataaatatgttatcatggctgtaaatctgctttgatgatcattgcttattgatcgattcaaaagaatagatgagattcccttccctctgtcggtctcttaaggacgcttgaatgcaagaattaatgaaattgaacacatcacatcaaatgaaatgaagtcttctccctctcctctgcaattcataaaaacaacctgaaaacagccatagacatcatagaagcaatagactctctccctctaattaataattcgtgaaacacataatgaagcaatcaatacatttcttccaaaagctcttccaaaaaaacatcaaatcattataataaaacacacaaattcaataaattcatatattactaagtttctttttattttcaatatataaaaacacttcatcgtatttctcgacttttttcaatttatgaaaaaaaaaaaaaaaaan

SEQ ID NO: 4144 - DNA, 2045 bp, Glycine max
  misc_feature (1)..(1): n is a, c, g, or t
  misc_feature (11)..(13): n is a, c, g, or t
  misc_feature (31)..(31): n is a, c, g, or t
  misc_feature (39)..(39): n is a, c, g, or t
  misc_feature (41)..(42): n is a, c, g, or t
  misc_feature (51)..(51): n is a, c, g, or t
  misc_feature (53)..(54): n is a, c, g, or t
  misc_feature (60)..(61): n is a, c, g, or t
  misc_feature (83)..(83): n is a, c, g, or t
  misc_feature (85)..(85): n is a, c, g, or t
  misc_feature (87)..(87): n is a, c, g, or t
  misc_feature (105)..(105): n is a, c, g, or t
  misc_feature (108)..(109): n is a, c, g, or t
  misc_feature (113)..(113): n is a, c, g, or t
  misc_feature (128)..(128): n is a, c, g, or t
  misc_feature (130)..(130): n is a, c, g, or t
  misc_feature (132)..(132): n is a, c, g, or t
  misc_feature (134)..(134): n is a, c, g, or t
  misc_feature (161)..(161): n is a, c, g, or t
  misc_feature (165)..(165): n is a, c, g, or t
  misc_feature (175)..(175): n is a, c, g, or t
  misc_feature (195)..(195): n is a, c, g, or t
  misc_feature (201)..(201): n is a, c, g, or t
  misc_feature (207)..(207): n is a, c, g, or t
  misc_feature (209)..(210): n is a, c, g, or t
  misc_feature (219)..(219): n is a, c, g, or t
  misc_feature (229)..(230): n is a, c, g, or t
  misc_feature (249)..(253): n is a, c, g, or t
  misc_feature (256)..(256): n is a, c, g, or t
  misc_feature (259)..(259): n is a, c, g, or t
  misc_feature (288)..(288): n is a, c, g, or t
  misc_feature (309)..(309): n is a, c, g, or t
  misc_feature (396)..(396): n is a, c, g, or t
  misc_feature (398)..(398): n is a, c, g, or t
  misc_feature (565)..(565): n is a, c, g, or t
  misc_feature (571)..(571): n is a, c, g, or t
  misc_feature (573)..(573): n is a, c, g, or t
  misc_feature (575)..(575): n is a, c, g, or t
  misc_feature (597)..(597): n is a, c, g, or t
  misc_feature (657)..(657): n is a, c, g, or t
  misc_feature (659)..(660): n is a, c, g, or t
  misc_feature (672)..(672): n is a, c, g, or t
  misc_feature (706)..(706): n is a, c, g, or t
  misc_feature (764)..(764): n is a, c, g, or t
  misc_feature (769)..(769): n is a, c, g, or t
  misc_feature (785)..(785): n is a, c, g, or t
  misc_feature (794)..(794): n is a, c, g, or t
  misc_feature (838)..(838): n is a, c, g, or t
  misc_feature (853)..(853): n is a, c, g, or t
  misc_feature (871)..(871): n is a, c, g, or t
  misc_feature (873)..(874): n is a, c, g, or t
  misc_feature (883)..(883): n is a, c, g, or t
  misc_feature (885)..(885): n is a, c, g, or t
  misc_feature (891)..(891): n is a, c, g, or t
  misc_feature (893)..(893): n is a, c, g, or t
  misc_feature (952)..(952): n is a, c, g, or t
  misc_feature (1000)..(1000): n is a, c, g, or t
  misc_feature (1039)..(1039): n is a, c, g, or t
  misc_feature (1041)..(1041): n is a, c, g, or t
  misc_feature (1043)..(1043): n is a, c, g, or t
  misc_feature (1045)..(1045): n is a, c, g, or t
  misc_feature (1049)..(1049): n is a, c, g, or t
  misc_feature (1055)..(1055): n is a, c, g, or t
  misc_feature (1076)..(1077): n is a, c, g, or t
  misc_feature (1082)..(1082): n is a, c, g, or t
  misc_feature (1084)..(1084): n is a, c, g, or t
  misc_feature (1106)..(1106): n is a, c, g, or t
  misc_feature (1168)..(1168): n is a, c, g, or t
  misc_feature (1171)..(1171): n is a, c, g, or t
  misc_feature (1180)..(1180): n is a, c, g, or t
  misc_feature (1186)..(1186): n is a, c, g, or t
  misc_feature (1188)..(1188): n is a, c, g, or t
  misc_feature (1208)..(1208): n is a, c, g, or t
  misc_feature (1221)..(1221): n is a, c, g, or t
  misc_feature (1223)..(1223): n is a, c, g, or t
  misc_feature (1234)..(1234): n is a, c, g, or t
  misc_feature (1252)..(1252): n is a, c, g, or t
  misc_feature (1277)..(1277): n is a, c, g, or t
  misc_feature (1285)..(1285): n is a, c, g, or t
  misc_feature (1300)..(1300): n is a, c, g, or t
  misc_feature (1309)..(1310): n is a, c, g, or t
  misc_feature (1313)..(1314): n is a, c, g, or t
  misc_feature (1376)..(1376): n is a, c, g, or t
  misc_feature (1410)..(1410): n is a, c, g, or t
  misc_feature (1420)..(1420): n is a, c, g, or t
  misc_feature (1438)..(1438): n is a, c, g, or t
  misc_feature (1465)..(1465): n is a, c, g, or t
  misc_feature (1470)..(1470): n is a, c, g, or t
  misc_feature (1494)..(1494): n is a, c, g, or t
  misc_feature (1496)..(1496): n is a, c, g, or t
  misc_feature (1520)..(1520): n is a, c, g, or t
  misc_feature (1525)..(1525): n is a, c, g, or t
  misc_feature (1537)..(1537): n is a, c, g, or t
  misc_feature (1619)..(1619): n is a, c, g, or t
  misc_feature (1648)..(1648): n is a, c, g, or t
  misc_feature (1661)..(1661): n is a, c, g, or t
  misc_feature (1701)..(1701): n is a, c, g, or t
  misc_feature (1757)..(1757): n is a, c, g, or t
  misc_feature (1762)..(1762): n is a, c, g, or t
  misc_feature (1776)..(1776): n is a, c, g, or t
  misc_feature (1799)..(1799): n is a, c, g, or t
  misc_feature (1805)..(1805): n is a, c, g, or t
  misc_feature (1821)..(1821): n is a, c, g, or t
  misc_feature (1834)..(1834): n is a, c, g, or t
  misc_feature (1873)..(1873): n is a, c, g, or t
  misc_feature (1889)..(1889): n is a, c, g, or t
  misc_feature (1906)..(1906): n is a, c, g, or t
  misc_feature (1936)..(1936): n is a, c, g, or t
  misc_feature (1963)..(1963): n is a, c, g, or t
  misc_feature (1966)..(1966): n is a, c, g, or t
  misc_feature (1999)..(1999): n is a, c, g, or t
  misc_feature (2018)..(2018): n is a, c, g, or t
  misc_feature (2024)..(2024): n is a, c, g, or t
  misc_feature (2044)..(2045): n is a, c, g, or t
  Peptide Sequence Number=SeqID_7585
  Probeset Number=SeqID_13923
ntttgggaatnnntttttgtgtttgggtgtntgttggtngnntttgtggtntnnatagtnngtgttgttaataatatatattntntnttggtgtgaaagcacaanagnngagnagagaacacagcagntnangnacaaatatatgagtcgtatgggtacgntgtngtcatgttanatacggcacaatactcatgngcgaanaagaantnngctgttttntttgtctttnngtttctctctctccacaannnnnaanacngtagtgtcgctgctcatgccaactctctnaagtatcaaaataataatcanaatcaaacagcatattaaatatcgtcatagcaaatccatatgaagtatagtctagtgacatactcatggggtgacaaatgctgactnangcagcacatctcactgcgacgctgaatatatcactgctatgcgtggtgcatctcattttcatcgagtgtatatcttgcatagctgtacaagataactaaaatgtgtgctgactttagtctacaacacggcagactgcgacaacacaacatagcgatgagacagcggngacacncncngcctctcgtactgatattgtgnagtaagatgtgggtttgcgtgtcgatagtgtgcgtagtatcttgcgatatgtggtgtggngnnggagtttgttgntatctgtcgtctcatttatctgtttgtcagttcnctctctctcactacgtcgttctctgctccacacactccctacatcacgtatctgagancgacnaaaagacagacgccangcgcgccancagctcacacacacacacaatctagtgcaacaaatatcataaanacactattcatagtntgtgagatatagatgtgntnngtatgagananagaaanangacctatactctactaacattctactatgtgtataatactcatgcacctcgatgttcgntagagatgcgcagctgtcaacgatacaaccgcatgcatgcccgcaccnacccctctcatcgctctatctatgatgcgcaagtatcgntntnantatntatagnattaatcgtctgatatcgatnngtctntnatctcactcgccatgcacacgntcgtatctaaactatgtctactacaccattcgcgcgtgtagagatacatatgatgatgatgnagntgcgactcntacaanancacaccactacatacgatcnacatatctgtcancnatcctagcacncactgcactagactgtgngagatatgttacatgatgatgaatntgatacanaatatgccttctctnagctaattnnacnngatacacattctctatctacatatatcgagtcatgactctcaaactgacacagcactcacgntactgatctaacaccaatcaccacgtcagataantgttaggcgncatacacactgcacagcntgcgcactctgcatcactatcggctgntcgtncgccacacatactcctacgtctcntngttatgccgtcactcatatcaagncatantctacgatatgngatccgctgcatcatgtgctcgtatttcgctgatgacgcagccgataccacacgacgccacgactctatgacgatcgtgatntccatcgtagacgtattgatgtgacgtgngacgactgtgtgntgccgatgtattgtctaatgcgtcatctgacacatcgtanctcgtatatatcttactagctcatctgcgcatacatatcgcagtattgactctcantgccnacgcgtagaacctntttcgtagctgagcagcgctgcntactgnactatccgttcaccanctgctctgcgtanctgtgtctgatgattacattctagtacatccatgctagncgatcgacagcctgcnctcgtcatgcttcgttnagtgtaagtatatctattcgtctgctatgntgatatgctctattactacctctgatntcnactcctctccactactacatcacatcacgcgtncgctcatactctatatatnatcgtntctctgtctatttttcactnn

SEQ ID NO: 4145 - DNA, 1510 bp, Glycine max
  misc_feature (1)..(1): n is a, c, g, or t
  misc_feature (24)..(24): n is a, c, g, or t
  misc_feature (57)..(57): n is a, c, g, or t
  misc_feature (252)..(252): n is a, c, g, or t
  misc_feature (367)..(367): n is a, c, g, or t
  misc_feature (391)..(391): n is a, c, g, or t
  misc_feature (570)..(570): n is a, c, g, or t
  misc_feature (761)..(761): n is a, c, g, or t
  misc_feature (996)..(996): n is a, c, g, or t
  misc_feature (1417)..(1417): n is a, c, g, or t
  misc_feature (1420)..(1422): n is a, c, g, or t
  Probeset Number=SeqID_13924
nccgacgagcataactcgtgagtntcgcatagctcgaggtctgacagcactctcgtnactcacgacagtcgtcgcgctatagttatatcgagcctcgtgacgtgcgtcgcacgcacacctcgctatctgcaatgtgggatcgcgacgcacgcagtctgcgggagatgagtagatgattctggaccagtgtcagagtagagcgagtgcgcagaagtagagaggcgagaagtgtcggatcaggagacacggcgngagagcagtgagcgcgcaggcgagtaacgatatgagacgagactgtgtgctgaggtgacatgtgacatgcgcacactgacggcagtcagtgaacggtatgcgtgtctacatgtgnatgtaatatattagatcgtgtcangggaagcgtgcgatgactcaacgagtatcgtactctgtgtgagatggtatacgtgtcatacacacaactcctcatacagtacgagagcgtcgatgtgagtagcgcgccagtgatgatctagcgagtgcatcgcacgatattcatgcagacgaatatcaagcttcagagcagtgactgtngacggatagcaggaggtgcggcgacctcactagacgactgacatgagatcggagagggataccaggcatctcgctgcctccgctagcggtgcacatcgctcgtccgcgtggtagagcactcatcactgatgcgagctatacgggcagagatatatgccgcatcagatctacgtcgcagtaatgagtgtggnggtggtccgcgcgctgagcgctaagcgtgtgagatacgacgatacagacgtcacaggcgcggctgacatcgaataaccagtcccgcgcgcgcacacgagagcgaggacgcggcgctggcgcgtaaagcgcagcagatcgacaggcaaccacgcggagttggagagagagcatcagatgtaggcgggcgagcacgcgaaatatccaattatagaaagacggacggtcgaaaaaatnaatatactgaccttgtggtgcctagacggatattggatacgctctctattcccgccccgggtatgtgcgaaaaggcgtgcgtgaacacacaagcgagagagggtgtgaagagtagataagcgtgacctggacacaagaaacacactcctatgtatgagccaatcgacacgcacaggcgtggctgaaagcacacagctaagaataaactgagacttatatgctcttatacttattcgtctataatcttatctatctcgtaggtggctgtgcgatgcggcagaggcgtgtgttcgcatagcgatctgccacatagatgagccgagaggtcgggtgtcgacgagctgactctagcagtacccctcccaaaagaattaagatatatagtgtggatgtgtagagtaaacattcaggcgctgcgagnggnnngcgttcatataaaatgatatccagagcgggctgtgatgtatttcataatgcaggagggaggtgtgcgggtgggggggtgggggggagg

SEQ ID NO: 4146 - DNA, 1655 bp, Glycine max
  misc_feature (1)..(1): n is a, c, g, or t
  misc_feature (65)..(65): n is a, c, g, or t
  misc_feature (77)..(77): n is a, c, g, or t
  misc_feature (82)..(82): n is a, c, g, or t
  misc_feature (134)..(134): n is a, c, g, or t
  misc_feature (152)..(152): n is a, c, g, or t
  misc_feature (199)..(199): n is a, c, g, or t
  misc_feature (220)..(220): n is a, c, g, or t
  misc_feature (263)..(263): n is a, c, g, or t
  misc_feature (325)..(325): n is a, c, g, or t
  misc_feature (366)..(366): n is a, c, g, or t
  misc_feature (368)..(368): n is a, c, g, or t
  misc_feature (372)..(372): n is a, c, g, or t
  misc_feature (464)..(464): n is a, c, g, or t
  misc_feature (484)..(484): n is a, c, g, or t
  misc_feature (509)..(509): n is a, c, g, or t
  misc_feature (586)..(586): n is a, c, g, or t
  misc_feature (804)..(804): n is a, c, g, or t
  misc_feature (839)..(839): n is a, c, g, or t
  misc_feature (912)..(912): n is a, c, g, or t
  misc_feature (975)..(975): n is a, c, g, or t
  misc_feature (978)..(978): n is a, c, g, or t
  misc_feature (986)..(986): n is a, c, g, or t
  misc_feature (1030)..(1030): n is a, c, g, or t
  misc_feature (1078)..(1078): n is a, c, g, or t
  misc_feature (1085)..(1085): n is a, c, g, or t
  misc_feature (1106)..(1106): n is a, c, g, or t
  misc_feature (1153)..(1153): n is a, c, g, or t
  misc_feature (1163)..(1163): n is a, c, g, or t
  misc_feature (1174)..(1174): n is a, c, g, or t
  misc_feature (1180)..(1180): n is a, c, g, or t
  misc_feature (1189)..(1189): n is a, c, g, or t
  misc_feature (1231)..(1231): n is a, c, g, or t
  misc_feature (1241)..(1241): n is a, c, g, or t
  misc_feature (1403)..(1405): n is a, c, g, or t
  misc_feature (1408)..(1410): n is a, c, g, or t
  misc_feature (1413)..(1413): n is a, c, g, or t
  misc_feature (1421)..(1421): n is a, c, g, or t
  misc_feature (1465)..(1465): n is a, c, g, or t
  misc_feature (1478)..(1478): n is a, c, g, or t
  misc_feature (1491)..(1491): n is a, c, g, or t
  misc_feature (1516)..(1517): n is a, c, g, or t
  misc_feature (1531)..(1531): n is a, c, g, or t
  misc_feature (1551)..(1554): n is a, c, g, or t
  misc_feature (1556)..(1556): n is a, c, g, or t
  misc_feature (1563)..(1563): n is a, c, g, or t
  misc_feature (1585)..(1585): n is a, c, g, or t
  misc_feature (1628)..(1628): n is a, c, g, or t
  misc_feature (1630)..(1633): n is a, c, g, or t
  misc_feature (1638)..(1638): n is a, c, g, or t
  Peptide Sequence Number=SeqID_7586
  Probeset Number=SeqID_13925
nttgagaagtgagagaagatgcagaggagcgagataaccgagtatcgtgtggtgcggtgtgtttntttgataggcgntggangcgtatgtgtcgtcacatcgcacctattgatcacacacccgagtgatcacgncatatatacatctcttgnccggagtcggcgcgcgctctccgctgtcacacatcagaagacgtaantatgacagtagtcaatgtcantcgtcgcagcgagtcgatgtatatgaagaagctgctagcatantgagtgccgcagcacgcgtgatgatatatagtatcatatatatttattatctgtactctttnttattagatatctattgtcttatattacacatccacgcgangngganagagagtgagtgattgatgaatgcgtatgcatatgcagtagagctagtgtacagtgagatgcggacagtagtacagagtagagtgcagcagngcgtagaggagtgattactnggtaagaagacgcgactagatgtgnatatgaagtgatcacgcgacagagagatgagtgcattagctgacagatcgcactacacaattatcgatgtgtgtcanatgatggagggaagggtggttggttggggagtgagaatagtgtgatcgtcatagagcctcatattaatagtgacacagtaagtatgatgagcacaggaatcggcaggtgagcgctccacgacaactcttcacaccatctagatattgatattatagtatgtcttcatgagacgatcggcggtccgctgtctctatgcacgacacttatatattcacangtagattgatattatatgtgcgttcttttgtggtntgtctctttctgcagcgacgactctccgcgcagcgatgagaagatcagagaatactacgagaacaacacaccncacgcaccacgacaacgacacaagagacgcagactagttgctcgccacctgcattggtcacgngcnagcgccgngcgcggccgacgtcggagacgagaggaagatgcacagcgtagangtgggtagagtgctctccgacgacagaagtagagaagaggagaggggnagtgagnagagagtaacggagatgatanttgatgaggcgcgtagagagaacgataatccccttcggctcgatccnctacctaacnactacaacatntacacntaagtttanttgtatgtttacgagtataaacatgatgttattatgtttatnttcgtctctnatctctgttgatgtaagtaggtcatctatatgtcatcacgtattatgtagctatcagattagtgagtgatagtggatagtgtaataggatgtgtatattgcggtctgtgctgctgtgattgtgatgttgtgtgtggttcttatggcgcaaggcgtgtgacannnctnnntcnccaaaagnaatatcgactcttgttactctatgtctagacgaagcgtcatgtncttatctatgttntcttcgaggagangcgagggccgggcacagcgccccgnnggccgggagagganggaagatgagtgtaagggtnnnntnggggctncgcgcgggcgcgcgcggcccgnctgagagaggccagagcgccctgcgacagagaaaaggagcaanannnngaganagagagaggaaaaaaaa

SEQ ID NO: 4147 - DNA, 618 bp, Glycine max
  misc_feature (270)..(270): n is a, c, g, or t
  misc_feature (601)..(618): n is a, c, g, or t
  Probeset Number=SeqID_13926
tctcacacacactgcagcgagaaccaaagaaaaaaaaagcttcttccattttccgaaatcgaagcattagggttagggttttttccgatctgagaaattcgcggcccaatggcggaggaaccggagagcaccgtcaccaacggcgccgccgacaaatcgctgctcgataagatcaccgaaaagcttcacggccacaattcttcgtcctcttcatcttccgactccaactccaactccaaaaaaaccgttacttcctccattaaggataangtttttcacctcttgcaaaagaacagacccattcactccattttcagcgccaaaaaacctactaatatattatgtatgaaaaacaataaaatttctactagcatactgtacacatccactactatttagagtctttgtaagttacttaagtatcacgttcttactctaatatgtcacatgttgatactatgactcgcaagtctattcttataatacaatacccatgacttgatgcacaaatctccacctcacatgccagaatgtgatgttgcagaagagccggtcctgcgaattacatctacattataaattgaagtcgaccggacgttgnnnnnnnnnnnnnnnnnn

SEQ ID NO: 4148 - DNA, 588 bp, Glycine max
  misc_feature (546)..(546): n is a, c, g, or t
  Peptide Sequence Number=SeqID_7587
  Probeset Number=SeqID_13927
gcggggtggagagaagtggtggatagtggagagtaagggtgagaaagtggggctctgattatcatgttcatgggtgaataccaacatacgattgatacaaaagggcgcatgatcatccctgctaaatttagagacggtctcggagaacagtttgtgctgacgagagggcttgatcaatgtttatttggctaccctatgagtgagtggaaactaatcgaagagaaactcaaagcactgccgctaacgaaaaaagatgcacgtgcgtttacccggttcttcttctccggcgcagttgaatgcgatctgggcaagcaggggcgcattaacatcgcatcaaacctactccaatatgcaaaactcgaaaaagaatgtgtggtcatcggcgtttcaaatcgaattgagttgtggagtaagtcgatctgggaacaatatacagaagagcaagaagattcttttgctgaaattgctgaaaacatgattggatttgatatataataatcccttgtgcagcaagctttctacacattcatttctatttgaaaaagngtgggaccataacatcatgttccaacatgagacagtattatt

SEQ ID NO: 4149 - DNA, 591 bp, Glycine max
  Peptide Sequence Number=SeqID_7588
  Probeset Number=SeqID_13928
ttggcggtgggggtgttgacaaggactttttctcggccgccccattgggggtgcccttggtgggcctggttaaccaatggaaccaaagaacctgggatgggaccaaccacaagtttcaattccgggacttagttggtggtgggaacccaaaccagcctggggaggcaacaagggttgggggccttgcccaaaccaaaaattttggtccaaacccagagcccccggaaggttaaaaagccatccggggcccaccaaaaggggtaattccaccagccttctttggtaaaaatgggcccggaaccctggttttcgcgctctctcccgctgccgatttcggcgccaggccctttatcgatggcaccttttactacacaggaattagctattgttggagaaattgttgaaaggtttcatttaatatttgtatcatatgctcattctttattcactgtttgtaaaaaaaagtaaacaaatgtatacgaatgttgagggtgggataattcaacttctttttggtaaaaaaaaaaaaaaaaaactggaaacaaaaaaaaaaaaaaaaaaaagaaaaaaaaaaaaaaaaaaaaaaaaaaa

SEQ ID NO: 4150 - DNA, 2106 bp, Glycine max
  misc_feature (14)..(16): n is a, c, g, or t
  misc_feature (19)..(21): n is a, c, g, or t
  misc_feature (24)..(45): n is a, c, g, or t
  misc_feature (47)..(48): n is a, c, g, or t
  misc_feature (54)..(57): n is a, c, g, or t
  misc_feature (60)..(60): n is a, c, g, or t
  misc_feature (75)..(76): n is a, c, g, or t
  misc_feature (78)..(78): n is a, c, g, or t
  misc_feature (83)..(84): n is a, c, g, or t
  misc_feature (86)..(86): n is a, c, g, or t
  misc_feature (238)..(238): n is a, c, g, or t
  misc_feature (263)..(264): n is a, c, g, or t
  misc_feature (268)..(269): n is a, c, g, or t
  misc_feature (277)..(277): n is a, c, g, or t
  misc_feature (306)..(306): n is a, c, g, or t
  misc_feature (324)..(324): n is a, c, g, or t
  misc_feature (340)..(341): n is a, c, g, or t
  misc_feature (343)..(343): n is a, c, g, or t
  misc_feature (362)..(364): n is a, c, g, or t
  misc_feature (406)..(406): n is a, c, g, or t
  misc_feature (427)..(427): n is a, c, g, or t
  misc_feature (489)..(489): n is a, c, g, or t
  misc_feature (494)..(494): n is a, c, g, or t
  misc_feature (510)..(510): n is a, c, g, or t
  misc_feature (568)..(568): n is a, c, g, or t
  misc_feature (608)..(608): n is a, c, g, or t
  misc_feature (717)..(717): n is a, c, g, or t
  misc_feature (759)..(759): n is a, c, g, or t
  misc_feature (886)..(887): n is a, c, g, or t
  misc_feature (1033)..(1033): n is a, c, g, or t
  misc_feature (1094)..(1094): n is a, c, g, or t
  misc_feature (1118)..(1118): n is a, c, g, or t
  misc_feature (1163)..(1163): n is a, c, g, or t
  misc_feature (1207)..(1207): n is a, c, g, or t
  misc_feature (1231)..(1231): n is a, c, g, or t
  misc_feature (1244)..(1244): n is a, c, g, or t
  misc_feature (1262)..(1262): n is a, c, g, or t
  misc_feature (1299)..(1299): n is a, c, g, or t
  misc_feature (1321)..(1321): n is a, c, g, or t
  misc_feature (1359)..(1359): n is a, c, g, or t
  misc_feature (1371)..(1371): n is a, c, g, or t
  misc_feature (1433)..(1433): n is a, c, g, or t
  misc_feature (1467)..(1467): n is a, c, g, or t
  misc_feature (1492)..(1492): n is a, c, g, or t
  misc_feature (1500)..(1500): n is a, c, g, or t
  misc_feature (1518)..(1518): n is a, c, g, or t
  misc_feature (1529)..(1529): n is a, c, g, or t
  misc_feature (1553)..(1553): n is a, c, g, or t
  misc_feature (1608)..(1608): n is a, c, g, or t
  misc_feature (1615)..(1615): n is a, c, g, or t
  misc_feature (1636)..(1636): n is a, c, g, or t
  misc_feature (1651)..(1651): n is a, c, g, or t
  misc_feature (1653)..(1653): n is a, c, g, or t
  misc_feature (1655)..(1655): n is a, c, g, or t
  misc_feature (1668)..(1668): n is a, c, g, or t
  misc_feature (1679)..(1679): n is a, c, g, or t
  misc_feature (1738)..(1738): n is a, c, g, or t
  misc_feature (1746)..(1746): n is a, c, g, or t
  misc_feature (1751)..(1751): n is a, c, g, or t
  misc_feature (1765)..(1765): n is a, c, g, or t
  misc_feature (1770)..(1771): n is a, c, g, or t
  misc_feature (1813)..(1813): n is a, c, g, or t
  misc_feature (1820)..(1820): n is a, c, g, or t
  misc_feature (1833)..(1833): n is a, c, g, or t
  misc_feature (1835)..(1835): n is a, c, g, or t
  misc_feature (1838)..(1838): n is a, c, g, or t
  misc_feature (1840)..(1840): n is a, c, g, or t
  misc_feature (1843)..(1843): n is a, c, g, or t
  misc_feature (1865)..(1865): n is a, c, g, or t
  misc_feature (1894)..(1894): n is a, c, g, or t
  misc_feature (1926)..(1926): n is a, c, g, or t
  misc_feature (1987)..(1987): n is a, c, g, or t
  misc_feature (1994)..(1994): n is a, c, g, or t
  misc_feature (2015)..(2016): n is a, c, g, or t
  misc_feature (2020)..(2020): n is a, c, g, or t
  misc_feature (2026)..(2026): n is a, c, g, or t
  misc_feature (2032)..(2032): n is a, c, g, or t
  misc_feature (2073)..(2073): n is a, c, g, or t
  misc_feature (2079)..(2079): n is a, c, g, or t
  misc_feature (2091)..(2091): n is a, c, g, or t
  misc_feature (2094)..(2094): n is a, c, g, or t
  misc_feature (2106)..(2106): n is a, c, g, or t
  Probeset Number=SeqID_13929
tttttccccccccnnnccnnnttnnnnnnnnnnnnnnnnnnnnnntnntcctcnnnntcntcttctttattaggnntncttanntnagcaggtgtacatcccgtcatttttcttcacatcgctgctatatgatcctatcatagagcagtctatagtgcatcggtgagacacgtgtagcgtgctgcgagtaagtatgaatatcaattgtgcaagcacgagtaagccgctcaaatatctnatgtacgaatagaggcgatatgagnntganntatatttnacctcactccacatataatcatcacttanccactactcattgtcgcntggcgtcgtcggcgcnngngagcaggagagagagagtnnnaggcgcgggctgtggtgcgcggcggccgcccgcgtgagcggnggaactaccagcacacatganctactttaccgtgacacgtacacatgtattattaattatattagtctgtgacgtatacggtngctgntatgtggatgcgacancgcagtagtgtatatgtatcctacgtggatctcagtactctgtgtgtttgtcgttcgntctcggagttgctgagtggcccagtggacggcgtgaggangctcgccgcgacgaagcgtgtcgtgcacgacgcgcaaagcgacgcagtgcagacttctagtacatgtgtgcgtagcgcgctacgaacagccacgaccaaaacgaacaanagacgagtaatgaataaacaaataatatatacaataatttanatcacagtatatgtatgtttctacagctcgcacacccgccacacaccacaaaacaacacaacacgcaaccatccccgacctcgtacgctctctctctatgtatttactcttctcgtactacctacgnngagcgcacgtcttgtcgtgggtcgtctgtgtcgctgcagtgctcggtgtgttgcgtgcgtgtttgtcgtctcgcgccgcgtgtactgacttcgatatgtagaagactcgtataataacatatagctatatgcgtcgacagtatatntaatgagaatatgtatatgtgagaatgatgcgattagtagatggcacatataacgatgganacctgtagcacatgagataccttncgcgtcatacgcatacgcactcagagatcagtacgcatacacagntctatcagcgcctgtatgtcgagcgtggtgtcgaccactcgacnactcgcacatcgcacgacatgacncatgtgtgcgctntgtgacatattgatgcgngcagatgtgagatcatgtcgagtatcggtgatttttnacatatagatgtcgcgaatgtntctgaggtagtcgtgatggtgttgtatgtgcttctgcntcgagtgacgancggtctagtacacgtagtgcgtaccacgacgcgagcgctgacgtgacgacagacgacgccgntgcataggctcacgacgacatgacttcgtatcantgtacacggccgttgtcgtcatcancacagctncgagcatccgcgtatctnatgacgcgagngtgtcgacgcgacatccagcttcnacgacgtcactatctgatacgatcgtttctctcgcattgctgtgcgcatatagtngagcttncgtaatatagtatatagtaangaaccagtacagcantnanttgaagtaggagntgatgagtgtnatgagtacgatactcgcactactgcatgatggcggacgctatgacaacacatcatgtcntcacatgntcganctacgctcatacgntgcgnntgctacgatttgtcgtccgctgctcagtgtcgtgatcatctncgtatcngctgacctatgtntntgntnatntttagtagtcagtcgtacgatnactgatacagagatgactatcggatctgntgaggtcagctgactgtactcgtactcgtccntattatcacgttataacgattatgttactgtcaatgattatgtactcgatgacgatgccgnatcttcntcacgcgtacagtggtcgacnnctcnacgcancgtgtncggcagaggacgacgacgcagtcacgacgcgcgtaggctgncgtcanacaccgaggcgnctnatgcggcggtgn

SEQ ID NO: 4151 - DNA, 548 bp, Glycine max
  misc_feature (515)..(516): n is a, c, g, or t
  misc_feature (542)..(543): n is a, c, g, or t
  Peptide Sequence Number=SeqID_7589
  Probeset Number=SeqID_13930
gaattcggcacgagagaagaggtgcctcttactcgtctcgtctttcaccgttacgagtgagttcgacccctcctcttgctcttccttctcttctcttctcttctcttctcatatcaaagcaataaccctagaacatggaagagagcttcgttttccagtggagcgtcatcagatctctcttgtccatccttcagtggtgggcgttcaatgtcaccgtcatcatcgtcaacaagtggatcttccagattccgccgttactatgctcgacactgatgcttcgtgtgtaatgaaatagtccgagtgtggtttcagaatacaactgccgtggattactgttttttttggagtatttgtgttgattgctattttcggcgttgcgttttgatttgtagaattgtggttgtttgacgaaacctttattgtgcgtttcgatcgagttgttttgtgtttgaaatggcgtgtgaaattgatgatgaaagtgattcttctctcaaaattaatcaaaaatcaaacgnnattccattcccagccggttcactggnntaggt

SEQ ID NO: 4152 - DNA, 967 bp, Glycine max
  Peptide Sequence Number=SeqID_7590
  Probeset Number=SeqID_13931
aaaatcgctgaattaatttttatttaccatggaaacagaccagtcacttaagaacactactcaaggcaaccctatgcccaaagaagaaaacggcttcgatgatggcattgaagtcgaaatggacaacttggaatccaacaatcaaattgatttcgaaaaggccaccgttgaaaatttagtcaagaaagacgaaaagagaagaatccccgtccctcctcatagacttacccctttgagaaacaactgggaaaagattgtcacaactgttgtcgaaaacatgaaattacaaatcagaatgaatactaaaaagaagtgtattgaagttaaagcttctgaatacactgaagataaaaactctgtccaaaaatgcgctgatttccttaaagctttcatgctcggttttgacctcaatgatgccatcgccatgttgagacttgatgatttgtacattgaatccttcgaaattaaagatgtcaaaaatcttcaaggagaccatctttccagatgtatcggtcgtatctcaggtgaaaagggtaaaaccaagtacgctgttgaaaactctaccaagaccagaattgtccttgctgatagcaaaatccacattcttggaagtttcagtaatataaagatggccagagatgctatctgctctttgattcttggtagccctccasgaaaggtttattctcaattgaaatatattgccaaaagacaaggtgaaaagttttaattgcaaggctttgtatatggaaacttattcaaaacatcctcaacaaaagcatgtgtatgccattgagcaatctattttttgtttcatgtgattatggtgactagttttcagggtataaaagttgttatatatagctgattcacgttcgtatttataacattttacaacgtaatccatttatttatctctatctattattttattatcaaagaaacaaaaaaaaaaacctcctctttt

SEQ ID NO: 4153 - DNA, 2408 bp, Glycine max
  misc_feature (1)..(1): n is a, c, g, or t
  misc_feature (6)..(36): n is a, c, g, or t
  misc_feature (52)..(52): n is a, c, g, or t
  misc_feature (60)..(60): n is a, c, g, or t
  misc_feature (96)..(96): n is a, c, g, or t
  misc_feature (99)..(100): n is a, c, g, or t
  misc_feature (136)..(136): n is a, c, g, or t
  misc_feature (182)..(183): n is a, c, g, or t
  misc_feature (198)..(198): n is a, c, g, or t
  misc_feature (200)..(200): n is a, c, g, or t
  misc_feature (217)..(217): n is a, c, g, or t
  misc_feature (223)..(223): n is a, c, g, or t
  misc_feature (248)..(248): n is a, c, g, or t
  misc_feature (252)..(253): n is a, c, g, or t
  misc_feature (269)..(269): n is a, c, g, or t
  misc_feature (441)..(441): n is a, c, g, or t
  misc_feature (485)..(485): n is a, c, g, or t
  misc_feature (487)..(487): n is a, c, g, or t
  misc_feature (490)..(490): n is a, c, g, or t
  misc_feature (511)..(511): n is a, c, g, or t
  misc_feature (618)..(618): n is a, c, g, or t
  misc_feature (657)..(657): n is a, c, g, or t
  misc_feature (676)..(676): n is a, c, g, or t
  misc_feature (687)..(687): n is a, c, g, or t
  misc_feature (689)..(689): n is a, c, g, or t
  misc_feature (716)..(716): n is a, c, g, or t
  misc_feature (732)..(732): n is a, c, g, or t
  misc_feature (752)..(752): n is a, c, g, or t
  misc_feature (767)..(767): n is a, c, g, or t
  misc_feature (783)..(783): n is a, c, g, or t
  misc_feature (862)..(862): n is a, c, g, or t
  misc_feature (879)..(879): n is a, c, g, or t
  misc_feature (922)..(922): n is a, c, g, or t
  misc_feature (924)..(924): n is a, c, g, or t
  misc_feature (953)..(953): n is a, c, g, or t
  misc_feature (959)..(959): n is a, c, g, or t
  misc_feature (965)..(965): n is a, c, g, or t
  misc_feature (968)..(968): n is a, c, g, or t
  misc_feature (972)..(972): n is a, c, g, or t
  misc_feature (979)..(979): n is a, c, g, or t
  misc_feature (1045)..(1045): n is a, c, g, or t
  misc_feature (1079)..(1079): n is a, c, g, or t
  misc_feature (1083)..(1083): n is a, c, g, or t
  misc_feature (1165)..(1165): n is a, c, g, or t
  misc_feature (1181)..(1181): n is a, c, g, or t
  misc_feature (1194)..(1194): n is a, c, g, or t
  misc_feature (1197)..(1197): n is a, c, g, or t
  misc_feature (1203)..(1203): n is a, c, g, or t
  misc_feature (1213)..(1213): n is a, c, g, or t
  misc_feature (1248)..(1248): n is a, c, g, or t
  misc_feature (1305)..(1305): n is a, c, g, or t
  misc_feature (1308)..(1308): n is a, c, g, or t
  misc_feature (1315)..(1315): n is a, c, g, or t
  misc_feature (1323)..(1323): n is a, c, g, or t
  misc_feature (1326)..(1326): n is a, c, g, or t
  misc_feature (1332)..(1332): n is a, c, g, or t
  misc_feature (1350)..(1350): n is a, c, g, or t
  misc_feature (1394)..(1394): n is a, c, g, or t
  misc_feature (1441)..(1441): n is a, c, g, or t
  misc_feature (1498)..(1498): n is a, c, g, or t
  misc_feature (1513)..(1513): n is a, c, g, or t
  misc_feature (1548)..(1548): n is a, c, g, or t
  misc_feature (1562)..(1562): n is a, c, g, or t
  misc_feature (1575)..(1575): n is a, c, g, or t
  misc_feature (1585)..(1585): n is a, c, g, or t
  misc_feature (1596)..(1596): n is a, c, g, or t
  misc_feature (1603)..(1603): n is a, c, g, or t
  misc_feature (1686)..(1686): n is a, c, g, or t
  misc_feature (1706)..(1706): n is a, c, g, or t
  misc_feature (1724)..(1724): n is a, c, g, or t
  misc_feature (1733)..(1733): n is a, c, g, or t
  misc_feature (1740)..(1740): n is a, c, g, or t
  misc_feature (1798)..(1798): n is a, c, g, or t
  misc_feature (1806)..(1806): n is a, c, g, or t
  misc_feature (1808)..(1808): n is a, c, g, or t
  misc_feature (1866)..(1866): n is a, c, g, or t
  misc_feature (1871)..(1871): n is a, c, g, or t
  misc_feature (1977)..(1977): n is a, c, g, or t
  misc_feature (1991)..(1991): n is a, c, g, or t
  misc_feature (1996)..(1996): n is a, c, g, or t
  misc_feature (2000)..(2000): n is a, c, g, or t
  misc_feature (2002)..(2002): n is a, c, g, or t
  misc_feature (2012)..(2012): n is a, c, g, or t
  misc_feature (2019)..(2019): n is a, c, g, or t
  misc_feature (2021)..(2021): n is a, c, g, or t
  misc_feature (2033)..(2033): n is a, c, g, or t
  misc_feature (2044)..(2044): n is a, c, g, or t
  misc_feature (2050)..(2050): n is a, c, g, or t
  misc_feature (2054)..(2054): n is a, c, g, or t
  misc_feature (2062)..(2062): n is a, c, g, or t
  misc_feature (2067)..(2067): n is a, c, g, or t
  misc_feature (2099)..(2099): n is a, c, g, or t
  misc_feature (2131)..(2131): n is a, c, g, or t
  misc_feature (2140)..(2140): n is a, c, g, or t
  misc_feature (2151)..(2151): n is a, c, g, or t
  misc_feature (2155)..(2155): n is a, c, g, or t
  misc_feature (2160)..(2160): n is a, c, g, or t
  misc_feature (2162)..(2162): n is a, c, g, or t
  misc_feature (2169)..(2169): n is a, c, g, or t
  misc_feature (2175)..(2175): n is a, c, g, or t
  misc_feature (2180)..(2180): n is a, c, g, or t
  misc_feature (2190)..(2190): n is a, c, g, or t
  misc_feature (2195)..(2195): n is a, c, g, or t
  misc_feature (2217)..(2217): n is a, c, g, or t
  misc_feature (2230)..(2230): n is a, c, g, or t
  misc_feature (2241)..(2241): n is a, c, g, or t
  misc_feature (2247)..(2247): n is a, c, g, or t
  misc_feature (2254)..(2254): n is a, c, g, or t
  misc_feature (2258)..(2258): n is a, c, g, or t
  misc_feature (2292)..(2292): n is a, c, g, or t
  misc_feature (2297)..(2298): n is a, c, g, or t
  misc_feature (2304)..(2304): n is a, c, g, or t
  misc_feature (2316)..(2316): n is a, c, g, or t
  misc_feature (2319)..(2319): n is a, c, g, or t
  misc_feature (2322)..(2322): n is a, c, g, or t
  misc_feature (2325)..(2325): n is a, c, g, or t
  misc_feature (2351)..(2352): n is a, c, g, or t
  misc_feature (2363)..(2363): n is a, c, g, or t
  Peptide Sequence Number=SeqID_7591
  Probeset Number=SeqID_13932
nggggnnnnnnnnnnnnnnnnnnnnnnnnnnnnnnnccccacaaacgaggancaaacgcncacaggagagagaggatatacatgaggataaagganaannaagatgtttatatagtattagttatcttagtatatngtattctgtattgattttctatatcatgtatattgtgtactaattnnggggagtataatgantntatatttttcttattantttatnataatactggttagatagtatgtangatnntatatatagatctatnatgtgatatatatatataatataatgttgctcatgtgcgatataggtatattctatatatgcttctatcctctcattatatgttctgactgttgtgatatctatcgagcatctactgtgtctgtggtgtgatgtgtgttatgtactatgtctactgtttattatacttatcntgatagttgtctattatctagtagtatgatatatgatcgactgntnatntatataatggtgattactgtnctatttataatgtatgtgaattctatatatatatatgataataaattgacacgatgatgtgaaatgataaatgatttgtttatatatgatgctgatatatacagatngattaagaaatgttaaatcatgtactctcgtctagatgntcatatgatgctgtcatantgtatatatantngtagatgactagagtgtatttatatantatgcatagtattcangtattctacatatttgaatntcacacacaatatanaatattacatgactanataatactcatatttagtaagtatgtgcaattatctgatgatataagtgtagacatatgatatatgatatacgtaattnatacagaatagagtaantgagatataatattgaattgatagaagatgtagtgatagatantnatattaatatcataacatataatttgatnatatanctattntanctcncttattnttatctattactcgtgtctgtatgttcgtaatactgctatcatactgctgatttacatgacctacntgagtactagactctcatctcacgacatctatantatngtgatctatcatgtatgtgtgtctatactcatcatatactttcatttatatgctgtaatcatcatactattactcatgtatntgtgttgttctgtctncgtgctcttctcnctncctctncctcatctcnctgctaattctcgtatatactcgagtgtgcacatnacataatccacatactctctattacttcgtctagagctctgtatatatctactatcnctncatactntgtcatancanctgatngtatatatgcgtacattnatgacgtatctacatacatctgtctcgatctcgtctctctacgngagaacatcgtgactgcatcttatagtacgatgatgtgtctgagagntactatttgtgattatctatactacatttagatatatatagctgtgtgtcaactgantgatatgtcagtgtnactactataatcgtacttcgctacataaactgctngatatatcttatcnatcatatatgacntatgatcttnatactctatcncttaatngtcctctatctgtgcatacttctaatttctatcactatgttacctatcactacgcacgatctcatatctgtcacgtactgatntagactactctgtactgtcntgtcacgcatctatgatnctatctttntatattnaagtactgatgctggcgattcgatgattagaccactcatcatatatagactagattanacgtatanantatgtgagataatgatacatctacgtctacatctactacttctatcgcgctacgggcngctcntcatgtgtgacgggacgagctctgccgtatcacgttcgtcatcttcatatgactatgttgacgtgtgtgattgtacattacgatgtggtcgtgtcagctagctgtngtatcttacattanttagnactngnatgtgttgangtcgtantnctgctgcatcgngtggtatttgntgattnatantatgacanatcancattgagtggtactatagcaggagcactgatncagtcggtcgctactgtcgtctcaagctcgtncgcttattngctgtctgttntcanactantngactatnattgtngtatngatgacagtnacgantatacattactagtgctgattngataattgcatantattgaaaganactatnacgaaanaatncatatacattaattactacatgaattacatgatncatanntagtanatctatcattanatngangtntagctgtgagacgtaaactaattagnntcactactacnctattgatagctataatatagtctacgtcaatctctcatgaaacc

SEQ ID NO: 4154 - DNA, 1982 bp, Glycine max
  misc_feature (13)..(13): n is a, c, g, or t
  misc_feature (17)..(17): n is a, c, g, or t
  misc_feature (28)..(28): n is a, c, g, or t
  misc_feature (33)..(33): n is a, c, g, or t
  misc_feature (36)..(36): n is a, c, g, or t
  misc_feature (38)..(39): n is a, c, g, or t
  misc_feature (41)..(41): n is a, c, g, or t
  misc_feature (43)..(43): n is a, c, g, or t
  misc_feature (45)..(46): n is a, c, g, or t
  misc_feature (49)..(49): n is a, c, g, or t
  misc_feature (51)..(51): n is a, c, g, or t
  misc_feature (53)..(58): n is a, c, g, or t
  misc_feature (60)..(60): n is a, c, g, or t
  misc_feature (62)..(65): n is a, c, g, or t
  misc_feature (76)..(77): n is a, c, g, or t
  misc_feature (79)..(79): n is a, c, g, or t
  misc_feature (86)..(86): n is a, c, g, or t
  misc_feature (91)..(91): n is a, c, g, or t
  misc_feature (98)..(98): n is a, c, g, or t
  misc_feature (118)..(132): n is a, c, g, or t
  misc_feature (145)..(145): n is a, c, g, or t
  misc_feature (147)..(147): n is a, c, g, or t
  misc_feature (165)..(165): n is a, c, g, or t
  misc_feature (199)..(199): n is a, c, g, or t
  misc_feature (203)..(203): n is a, c, g, or t
  misc_feature (354)..(354): n is a, c, g, or t
  misc_feature (358)..(358): n is a, c, g, or t
  misc_feature (405)..(406): n is a, c, g, or t
  misc_feature (420)..(420): n is a, c, g, or t
  misc_feature (453)..(453): n is a, c, g, or t
  misc_feature (587)..(587): n is a, c, g, or t
  misc_feature (639)..(639): n is a, c, g, or t
  misc_feature (706)..(706): n is a, c, g, or t
  misc_feature (726)..(726): n is a, c, g, or t
  misc_feature (744)..(744): n is a, c, g, or t
  misc_feature (747)..(747): n is a, c, g, or t
  misc_feature (838)..(838): n is a, c, g, or t
  misc_feature (843)..(843): n is a, c, g, or t
  misc_feature (890)..(890): n is a, c, g, or t
  misc_feature (905)..(905): n is a, c, g, or t
  misc_feature (972)..(972): n is a, c, g, or t
  misc_feature (1006)..(1006): n is a, c, g, or t
  misc_feature (1099)..(1099): n is a, c, g, or t
  misc_feature (1101)..(1102): n is a, c, g, or t
  misc_feature (1104)..(1104): n is a, c, g, or t
  misc_feature (1116)..(1116): n is a, c, g, or t
  misc_feature (1120)..(1120): n is a, c, g, or t
  misc_feature (1124)..(1124): n is a, c, g, or t
  misc_feature (1128)..(1129): n is a, c, g, or t
  misc_feature (1142)..(1142): n is a, c, g, or t
  misc_feature (1144)..(1144): n is a, c, g, or t
  misc_feature (1147)..(1147): n is a, c, g, or t
  misc_feature (1149)..(1149): n is a, c, g, or t
  misc_feature (1151)..(1151): n is a, c, g, or t
  misc_feature (1153)..(1153): n is a, c, g, or t
  misc_feature (1195)..(1195): n is a, c, g, or t
  misc_feature (1199)..(1199): n is a, c, g, or t
  misc_feature (1202)..(1202): n is a, c, g, or t
  misc_feature (1226)..(1226): n is a, c, g, or t
  misc_feature (1247)..(1247): n is a, c, g, or t
  misc_feature (1270)..(1270): n is a, c, g, or t
  misc_feature (1320)..(1320): n is a, c, g, or t
  misc_feature (1365)..(1365): n is a, c, g, or t
  misc_feature (1383)..(1383): n is a, c, g, or t
  misc_feature (1474)..(1474): n is a, c, g, or t
  misc_feature (1519)..(1519): n is a, c, g, or t
  misc_feature (1524)..(1525): n is a, c, g, or t
  misc_feature (1572)..(1572): n is a, c, g, or t
  misc_feature (1577)..(1577): n is a, c, g, or t
  misc_feature (1583)..(1583): n is a, c, g, or t
  misc_feature (1597)..(1597): n is a, c, g, or t
  misc_feature (1617)..(1617): n is a, c, g, or t
  misc_feature (1643)..(1643): n is a, c, g, or t
  misc_feature (1645)..(1645): n is a, c, g, or t
  misc_feature (1650)..(1650): n is a, c, g, or t
  misc_feature (1717)..(1717): n is a, c, g, or t
  misc_feature (1788)..(1788): n is a, c, g, or t
  misc_feature (1925)..(1925): n is a, c, g, or t
  misc_feature (1935)..(1935): n is a, c, g, or t
  misc_feature (1946)..(1946): n is a, c, g, or t
  misc_feature (1949)..(1949): n is a, c, g, or t
  misc_feature (1982)..(1982): n is a, c, g, or t
  Probeset Number=SeqID_13933
aggaggtgtagtnaganggtgcgcccgncccgncgngnngngngnngtntntnnnnnnancnnnntatagagacannanaatttcncacancgactanacatcgagatatcgacaaannnnnnnnnnnnnnnacatataagtgtngnagatcctccttggagacnccccccccccactccatgaaggggaagtattgangacntaagagagcgtgggcgcgctgctcaccactctctctctctacttataacacaattattcaccagcgcgcacactgtatatattctattgtagttgagacagacacatatggctgtggctccacggagcgcgctgctctgtatctatgcgcncgcnccgtggctacgcgtcacgactctgtcaacctccacgcgtctcacccnncaccgctcgcactnattcctgctaatacactggcagcccatctctcncatctcctaatacattgccttagtttatatcagtgatgtgggttgactagcgatgtgctgagatcctggcactctagtctctatggcggctagagcgtttgtcatgtgctatatctcgttagaacgactctacnactacttctactaatgtatgtggtatgatgatgacggtcagatatgatgtanccttatgaataaatatgcataacatcatatccgtatgatgcctacgactcatatacaatatagcagngtatagggatgatatgtatnttatgtcaagcagagatntcnctatgtccattagtcgtgccatgctgaggtatgacgcatctcgtggcgacggccggaggctcggcctgtcgcttgtacagagaacagatcnacacntctaactcatccacacggatatcagttcatagatatagatgtagatntagtatataacacangtgattctagatcatgataacgatgagagcaccactggatagctgacgctgttcgtgctggagcatnactaccactacatagagtagtgtatactctcatnagtgtatagtcgaatgtgctatagcatgcataccgtgctagagatcatatgtatactattatatgatatgatgtgtggtgtgtttggttatanannancaacaaaatganaaanaaanaaannaaataaaacatananaananananacacccccctccctctgtgtgtgttctgtattgctgtgatancaanccnaccgcccaccgactcacacacccnctgcagcgtgttcgacagtcnattgctctggtgcgttctgacanctcatcgatgtatctgcgctgcgtgactagtaggatagtgacttgcgccntgtcccttcatcacgcctatcacatcgctcacttcgctgcagtcntcagttatatgtgatctntgaacacctgcactcgtcgccgacgtcctatgagccctcacaacgacagcgagcgaggatagatactgtgatgctgtgctcctgtctggcncgtagcgatggtgacatcgtctcgtagatatctgacgtatcctgnaggannacagacctgtccaaacctctcgctcacttgagagtgatgtaattgtnacaanattgcnaagcagacaaacanagcgctgttccccacattgncagtagacaccatatacaatctgtancncagcngcgctcacattacgagagtgcatgcgtgtctacgctgcctcgtcaggaagacataccatacttgtcntttatactctacactacttttcgcctactatggtacatgggtacttctgccacaggagacgcgtgcgcacntcttgtcatctgcatgctcatgtctcactacgtaccctgtgctctctattgcatttattactatagtgacacgtgtgatctgtttccactcatcacatgatcttgtcattgaagctactgtgtgcgtactgcacacnctgcacagtncgtgacggcgnttnatcatgtcagcatgtcggctgctgcgcacgccn

SEQ ID NO: 4155 - DNA, 1587 bp, Glycine max
  misc_feature (1)..(1): n is a, c, g, or t
  misc_feature (47)..(47): n is a, c, g, or t
  misc_feature (49)..(49): n is a, c, g, or t
  misc_feature (80)..(80): n is a, c, g, or t
  misc_feature (107)..(107): n is a, c, g, or t
  misc_feature (256)..(256): n is a, c, g, or t
  misc_feature (260)..(260): n is a, c, g, or t
  misc_feature (267)..(267): n is a, c, g, or t
  misc_feature (283)..(283): n is a, c, g, or t
  misc_feature (308)..(308): n is a, c, g, or t
  misc_feature (577)..(577): n is a, c, g, or t
  misc_feature (586)..(586): n is a, c, g, or t
  misc_feature (649)..(649): n is a, c, g, or t
  misc_feature (717)..(717): n is a, c, g, or t
  misc_feature (882)..(882): n is a, c, g, or t
  misc_feature (961)..(961): n is a, c, g, or t
  misc_feature (1006)..(1006): n is a, c, g, or t
  misc_feature (1198)..(1199): n is a, c, g, or t
  misc_feature (1251)..(1251): n is a, c, g, or t
  misc_feature (1259)..(1259): n is a, c, g, or t
  misc_feature (1299)..(1299): n is a, c, g, or t
  misc_feature (1301)..(1304): n is a, c, g, or t
  misc_feature (1366)..(1366): n is a, c, g, or t
  misc_feature (1368)..(1369): n is a, c, g, or t
  misc_feature (1374)..(1374): n is a, c, g, or t
  misc_feature (1377)..(1377): n is a, c, g, or t
  misc_feature (1401)..(1401): n is a, c, g, or t
  misc_feature (1404)..(1405): n is a, c, g, or t
  misc_feature (1409)..(1409): n is a, c, g, or t
  misc_feature (1412)..(1412): n is a, c, g, or t
  misc_feature (1419)..(1419): n is a, c, g, or t
  misc_feature (1441)..(1441): n is a, c, g, or t
  misc_feature (1445)..(1445): n is a, c, g, or t
  misc_feature (1520)..(1520): n is a, c, g, or t
  misc_feature (1544)..(1545): n is a, c, g, or t
  misc_feature (1547)..(1547): n is a, c, g, or t
  misc_feature (1551)..(1554): n is a, c, g, or t
  misc_feature (1556)..(1556): n is a, c, g, or t
  misc_feature (1558)..(1558): n is a, c, g, or t
  misc_feature (1562)..(1562): n is a, c, g, or t
  misc_feature (1564)..(1567): n is a, c, g, or t
  misc_feature (1574)..(1576): n is a, c, g, or t
  Peptide Sequence Number=SeqID_7592
  Probeset Number=SeqID_13934
ntgtcggccgaatatcgtgagcgcagatagcagattgttgtcgcgtngntagtcgcgccacacccgcggctgcggcgtgnatgcgcacagagatgacaacggtgatnacgtctttaggcacagagagaacagttataccctctaatcttctacaccagatacaaatatgtatcatcacacaccaccaatacatacaaatattatgtattatccacctcccttttgtgtggtagatagctgtgcggcgaagtgcagngatnaggatcnatcattccctcgtgtntttgtcgccagcacactcgttgcancccgacgacgaaaatgttgtatcattcgccaccgcacacgtgatgtatacaaccacacgcgcgctgtgtgatcccacaatacatacataacatatgaggtttcgcagagaagccgtgcaggtcaccgccagtacgacgtaggctggagcatgtgattgtgcggtgtagtgaagagtgatgtagtgagagcgccaggtgtagcgcgaggagtgattgatagtggcgagcgcatggtattgttgtgtgcccggtgttagtcttggttgttncgccacagnaggagaaatgaacagtcttatagtaaataagagcgagcaggagttgtgtggaggagccgaggnggagcccagccgctacctttccaagaactatgcctcacagtgcgacatacgagaggatacaattgatnaagacgctatacgagatctgttgttaccacaacactacaacaaatattctctcgcaacgacaagacataggtaccaccacaccaaacgatatgtgtgaggagagaatctccacaaaagtagggaagcaaaacaagcaaagtagaaaagtgttaagatataagagntaagtgtaagagaagagagagaaagagagttggatatagtgtattgctgatgaatatattgtcacgcacgtgtctcccncgcggtgcgtatgtgtgtgtgtaggcgggcgctgagtagtgtggnggcgacgctttcattcaccgtttggccgcgcgcaattatacataaaacccacgaatatgaaaaagaagtgtgttgatataaattatgaatgattagtctgttgtcagtattaaataatatatttgccgagaatagtgtatctagacttgatcccagccacgttaacctggtcgcgcagaagaacatatgttnntgtctggcacatttgtgcgtatgtggcgccaggaagcaacgccgatcccagngggaagtntcatagttagagatagatgtgagagcgagtgagtgtaagnannnnttttctctcattttcctctttttccttcctaccctccttcagacgtctcccttttctcccantnnactcnacncaacatatataatatattatccanaanntacnctnaaaatcnaacaaaagaaagtaaataaagngaanaataatacgatgcacaggacgagaagatatagaatagtgtataagagagcggaaggtatgagcagaagcgagggnagaagaggagagagtggaggcgcnngnggtnnnngngnaggngnnnngcgggannnaaaaccggttt

SEQ ID NO: 4156 - DNA, 1549 bp, Glycine max
  misc_feature (19)..(19): n is a, c, g, or t
  misc_feature (484)..(484): n is a, c, g, or t
  misc_feature (638)..(638): n is a, c, g, or t
  misc_feature (820)..(820): n is a, c, g, or t
  misc_feature (1292)..(1292): n is a, c, g, or t
  misc_feature (1319)..(1320): n is a, c, g, or t
  Probeset Number=SeqID_13935
aaaagccggggcggaacgncgcgccgcacaccaaacagcaaggtgccaagacatttcattggtggagtgataatctctcctgcatgtaactctccccctccttttttttctcctcttcccccccctttctggttctatttcatcctctcatcttgggttattttggtctgtgtctgtttttctttcttttaaaataaactttgtgggggacttttttctcccgcgcccgggcggggggggtgggggatccgcggcattcttctttttttattccccccaggggggggggagtttcccccctctcccggcgggttctttttgtgggcgaggggaaaaacctcccttcccccccccttctatatctacaccccccttctttgtccatttatcacacacgacaacgttctcttatttcctcctctctttttacttttattttatttaataatgaatatgcgcgcgctcccggtgcgaggcaacacancaagcgattattattatgtttaatcatcggtcttaccctcgcatgtagtagacaaagctttgctctccactcggcgcggccgcccaccccctgcccctcaccccccagcacgccgcccccccctgcttgcttctcctcttcgccctaatcaccnccttacctttctctatttaatagtttgctgttatctatttctttcgtcccacctcagtctctcgctggtacctatcattgcccgtgagtgcgcgttcccatgtcatatatctaataactctctatctcttcctactaaatagttattctgtgttcttctcttctgtttttctatacctttantcctactctacgctcctcatacttatcctccctcctcctgtttgtgccttcccattcatttccctatctagtccttatcacacctgtgtactgtcgtgtttatgctcacacacctgtgtgtgttccatatttacaccgcgctgcggctctcttatgtgccacccatctatgacttccattttctcttttgttaagtgcgcgccgactttactcacttctggttttttttctcttattattatttatacctttcttcctattccaaataatataccgcgaggatttcatctagaaataaactccagggagtgcatgatcttttaatctctcttactatcatcaaaacaatccgggcgggtacctattataaagtaatgagggtgtgtgttacacacccactcacgctgggtgcagaccctcacaccaacctatgtgttatggtcgcgccgcttcatactccgcgtcccatctncatctgtgcgacaacccctttatgtcnntgttgttcttctcttactattgttttcaaccttctatgctcttatctgcatagcatcacgcgccctcctctcctgtgctcctcttcctctctccctcctcattctacgcgacaatacacacacgcacacaactaaattctctcttcgtgttctgtgtttctcgttctcattttaatgctcagtatatatattactgtagtgtttcgttcgtatggtgtggatttatgtt

SEQ ID NO: 4157 - DNA, 1813 bp, Glycine max
  misc_feature (20)..(20): n is a, c, g, or t
  misc_feature (24)..(24): n is a, c, g, or t
  misc_feature (28)..(28): n is a, c, g, or t
  misc_feature (38)..(39): n is a, c, g, or t
  misc_feature (54)..(54): n is a, c, g, or t
  misc_feature (57)..(57): n is a, c, g, or t
  misc_feature (153)..(153): n is a, c, g, or t
  misc_feature (254)..(254): n is a, c, g, or t
  misc_feature (403)..(403): n is a, c, g, or t
  misc_feature (431)..(431): n is a, c, g, or t
  misc_feature (489)..(489): n is a, c, g, or t
  misc_feature (498)..(498): n is a, c, g, or t
  misc_feature (525)..(525): n is a, c, g, or t
  misc_feature (540)..(540): n is a, c, g, or t
  misc_feature (555)..(555): n is a, c, g, or t
  misc_feature (559)..(559): n is a, c, g, or t
  misc_feature (624)..(624): n is a, c, g, or t
  misc_feature (633)..(633): n is a, c, g, or t
  misc_feature (693)..(693): n is a, c, g, or t
  misc_feature (769)..(769): n is a, c, g, or t
  misc_feature (778)..(778): n is a, c, g, or t
  misc_feature (813)..(813): n is a, c, g, or t
  misc_feature (846)..(846): n is a, c, g, or t
  misc_feature (927)..(927): n is a, c, g, or t
  misc_feature (1066)..(1066): n is a, c, g, or t
  misc_feature (1086)..(1086): n is a, c, g, or t
  misc_feature (1150)..(1150): n is a, c, g, or t
  misc_feature (1173)..(1173): n is a, c, g, or t
  misc_feature (1203)..(1203): n is a, c, g, or t
  misc_feature (1251)..(1251): n is a, c, g, or t
  misc_feature (1324)..(1324): n is a, c, g, or t
  misc_feature (1349)..(1349): n is a, c, g, or t
  misc_feature (1403)..(1403): n is a, c, g, or t
  misc_feature (1449)..(1449): n is a, c, g, or t
  misc_feature (1454)..(1454): n is a, c, g, or t
  misc_feature (1456)..(1456): n is a, c, g, or t
  misc_feature (1459)..(1459): n is a, c, g, or t
  misc_feature (1530)..(1530): n is a, c, g, or t
  misc_feature (1574)..(1574): n is a, c, g, or t
  misc_feature (1618)..(1618): n is a, c, g, or t
  misc_feature (1656)..(1656): n is a, c, g, or t
  misc_feature (1660)..(1660): n is a, c, g, or t
  misc_feature (1741)..(1741): n is a, c, g, or t
  misc_feature (1746)..(1746): n is a, c, g, or t
  misc_feature (1768)..(1768): n is a, c, g, or t
  misc_feature (1771)..(1771): n is a, c, g, or t
  misc_feature (1777)..(1777): n is a, c, g, or t
  misc_feature (1780)..(1780): n is a, c, g, or t
  misc_feature (1813)..(1813): n is a, c, g, or t
  Peptide Sequence Number=SeqID_7593
  Probeset Number=SeqID_13936
atagaagtgacaccgcgcangtanaaangaagaaatannaagcagaggcatatntantataatataattgatattaatataacataaataaatagagaagaagtagtatagactagtaaatgatagatattagtgtgagtgaagtatgagggngccggtcgcacataaatagatgcgatgtatagacacaacataaagtggtaccaaacttcggcgtcgcccgcctcgcgatccgtggtgtggaggatatgaangttggtagtaggtatattagtatgctgcgagtcacctgtacagataagagcacctacagcgctacgcgccgagaaaccaagtagcagtcgctacagaaatagaagtggagaccgacggcggcgacaagagtcttcacaactgtgtgagntgcacaagagagaacaatagatgtcganaatatggagagcgcaacagagaagcggagccgtctagccaagggtaacatacacaaanggcacaggntcgcgaccgacagaacaaattcctcancaagacacaactgcnagcacaacacaccanccanacacataacacaagcgcgatgaggcggtgagagagctaatatcaagtgagcgggcaacacgcganaggcgcctngacgcgtcgtaataccaatactcgtacaatagtgatagaatgtgtagagatgagagaatngctatctgtaacgcgtctattatgttatttgatctaatgttcgctctatattgttggtgatattatttagtatgtntaataagtnaattaggaagtaatataatgagacagtgatagatnttgtgtgtcgtgctacgtatagcttatcattcnaaacggacgcacaccagactccataatctcaagtatggcgcctctcactgtatgtacggacgctctagcagtgtctgcttngctgcaagaaactagagacgagacgccgaacctctacaccagatctatacacaatacaatacatctatataacacttagacggacacacacactatgcatcgaacaacatcttatatgagtacgacgcgcgctgacacnacgaacaaacggctggacgntctcacgcggaccagactcacatcatacgtattattatatctatacatgacactgcgatcgtcncgacacacgacgacgaactcgcngcgctatctcaccacctgcacatccacacngcgcgatcgtgaacagattcgtacacctctcacctacctcctagagantgatagacatatgcgacggtgatcgacgagtcgatagtatatgtacgcgatgactctacatacgtgacgtcgncacagctactaaatatatactaganccctctctcatgatggcctctactgaagtgctcgacgcactgcacgcctctacnataatatgtaccgactcaccgtgcggccgtccgtcgcgtctctccnacttncncgnccacatatcgtcgcgcgctcgacctgcgccgtgccgtcctcgactcgctcgccgtcacgcacacataatanccgtgtgtgggagagcgtgcgtgcgcgcgcgctctcacaacacncacacaccgcacgacgctacgtatcgggtgtaggagtctctcgnatatatatacacagtacttatatactacaaactagtgntggncgcggagcacgagatatagcaacacacagacagggccgactgtccgcgagtcgcacactctgatcttgatatagatcaccnatccnagtctctcgacaccacgccacnacnacttcncantaagctctcacatactgtcgagcgaagtgctan

SEQ ID NO: 4158 - DNA, 292 bp, Glycine max
  misc_feature (200)..(201): n is a, c, g, or t
  misc_feature (206)..(206): n is a, c, g, or t
  misc_feature (209)..(209): n is a, c, g, or t
  Probeset Number=SeqID_13937
aaataaaagaatttaaaaacttttttctttcttccttcccctctaatggcgcttccacacatactctcttcaccaccgtccctcaacttcgttatctccgtctttcaaaccaaagccgcctctctcaccggcctttgctagtaatctccggcggtgcaagctcacatccttccgatgttcgtcgtcctctttctccgagnngcatnacnacgcgaaccctccaaaacccgatgacgtcgtcgagcttcctctcttccctctccctctcgttctcttccccggcgctatcctc

SEQ ID NO: 4159 - DNA, 1945 bp, Glycine max
  misc_feature (1)..(1): n is a, c, g, or t
  misc_feature (41)..(41): n is a, c, g, or t
  misc_feature (53)..(53): n is a, c, g, or t
  misc_feature (233)..(233): n is a, c, g, or t
  misc_feature (359)..(359): n is a, c, g, or t
  misc_feature (374)..(374): n is a, c, g, or t
  misc_feature (376)..(376): n is a, c, g, or t
  misc_feature (529)..(529): n is a, c, g, or t
  misc_feature (545)..(545): n is a, c, g, or t
  misc_feature (563)..(563): n is a, c, g, or t
  misc_feature (673)..(673): n is a, c, g, or t
  misc_feature (680)..(681): n is a, c, g, or t
  misc_feature (692)..(692): n is a, c, g, or t
  misc_feature (709)..(709): n is a, c, g, or t
  misc_feature (740)..(740): n is a, c, g, or t
  misc_feature (772)..(772): n is a, c, g, or t
  misc_feature (852)..(852): n is a, c, g, or t
  misc_feature (1005)..(1005): n is a, c, g, or t
  misc_feature (1034)..(1034): n is a, c, g, or t
  misc_feature (1102)..(1102): n is a, c, g, or t
  misc_feature (1107)..(1107): n is a, c, g, or t
  misc_feature (1193)..(1193): n is a, c, g, or t
  misc_feature (1230)..(1230): n is a, c, g, or t
  misc_feature (1268)..(1268): n is a, c, g, or t
  misc_feature (1292)..(1292): n is a, c, g, or t
  misc_feature (1315)..(1315): n is a, c, g, or t
  misc_feature (1334)..(1334): n is a, c, g, or t
  misc_feature (1459)..(1459): n is a, c, g, or t
  misc_feature (1526)..(1526): n is a, c, g, or t
  misc_feature (1639)..(1639): n is a, c, g, or t
  misc_feature (1653)..(1653): n is a, c, g, or t
  misc_feature (1680)..(1680): n is a, c, g, or t
  misc_feature (1688)..(1688): n is a, c, g, or t
  misc_feature (1690)..(1690): n is a, c, g, or t
  misc_feature (1753)..(1753): n is a, c, g, or t
  misc_feature (1829)..(1829): n is a, c, g, or t
  misc_feature (1831)..(1831): n is a, c, g, or t
  misc_feature (1849)..(1849): n is a, c, g, or t
  misc_feature (1868)..(1868): n is a, c, g, or t
  misc_feature (1870)..(1871): n is a, c, g, or t
  misc_feature (1886)..(1886): n is a, c, g, or t
  misc_feature (1896)..(1898): n is a, c, g, or t
  misc_feature (1919)..(1919): n is a, c, g, or t
  misc_feature (1929)..(1929): n is a, c, g, or t
  misc_feature (1935)..(1935): n is a, c, g, or t
  Peptide Sequence Number=SeqID_7594
  Probeset Number=SeqID_13938
ngagagcatgtgatcagtgcgtgagaggtcgtaagtcacanagatagacgagngaagagagacagtagggaggagtgagtaggcggacacacgctcacacgctggatgccggcagagacgtctcgtcgcgcctatatctcattcgattcggacgtctcatgagtacatacgcaagtccgcgtccgtcgctccagcgcacggtcgtccctctctctggcgtcaagtatcacctncactctcagctacgtctctatcctctctcgcctcgcgtacaacagcaacgcatacagcacgacgcgctgcccgtcggagcgactcacacaaacataattctgcgaatagcactagtcacgactacnccgcggtgtatacantncgcgctagcagcatctgagcgcgacgcacgcatacggctcgccgattacgagacgtctcgtggcgccgcggcgtacactgccatcgagcaagcgcgcgctgcggcgtccacgtgactgcggccgtgtgtgacagatccacagcactggttatnccacgccgctcgtcgnctcgcggcacgcgcgtgngcggagcaggcgcgctacagcacctagcagcgctcatacgaccagcgacacatcgacgcgtagcaccagcactacgatgcacgcgcacgacgtatcgcataagatcgtanagacctnncgcatccactnagactacaccgtcgcangcctataagaggtgaagacgatgatagcgtntcactcgatgtatagtaccatcgatgcgatgngcatgcgctattgtatgcgacgatataatcggagcacacgtcgttcggccacgctgctcgtgggctgatcgagtcgcgangtacgttggattctgtgcatcgtgccgcacgctgcgtgccacgtacataccacacacgcacttctcgcgcgtgcgtgagtgtctcgatatcgacgatccgtcgtcgcaatcgtgcacatagcaatcatctagtagtatcatgtggagtcggtngcgtgcgcgatcgtccgtgcctgatgctncgaatacgtacgtcagtcatcagtcatcatggcacaatacgcgccgacatgagtcatcctagcagtcntgatncctgtctcacgcagctctcacacgacttgtctgagtcgcatgacatacatctgtatgacatagtcatacacacatactcgacattncgatatcttgcgtactcacactcacacatatccctantacatctctctatccgtcgcacgtcttcgtgtgctgcnctcgcaacacttctatcgtctcanagtatcactatcactaatcaatncaccgcatgcgctagcgtncctcctaatcgtcactcgagtctcgcctatacgctcgatgacgacagctactcggcgatgcatagagtgagtgattactgtactcgacgcgaggcagctgctcgacacacgcagcgagcgcgggnacatcacgcgatgagcgcacagtacaagcagctagaccagcgcagtaccatcgcatctatacacgcntgaggtgcgcgacatacaatacgcacctaacgcggtgcgcgagtccacatcaatatcgcgcgcagccagggtcgcctcgcgcacacaaacaccataccgctccgttgcgtatntactcttcgccggngagtcgtgcatcacgctctcgatctanggcgcttngnttgatgatggaatggtagcacacgcagatcgcagcatgagacgtatagtgatgatgtgtgtanatatgatgcacagtaatctagatgctttgctgtctacttgtatattgtcacagatgatggtagatatggtatgtgnanatatgaatgttttagatnagtcagtatatagtgtatnannacacatagttatatntaggcagtgnnntattttatatataataatatntaagaaaaanattatnaaatataata

SEQ ID NO: 4160 - DNA, 437 bp, Glycine max
  Probeset Number=SeqID_13939
aaaatattaaattaatcagataaagcatcgccattatcaatgcaagacaacccagttactgctcaagtcttggaactcctcggcaaaaccggttccagaggtggtatcactcaagttagagtccaactcatcgaccccaacaatggtcaacaaagacaattgatcagaaacgtcctcggtcccgtcagaaagggtgatactctttcccttatggaatgcgaaagagaagccagaagacttagataaacaataaattttgccagtttcgggatatatgaattgaataaagatgcattcattatgtattaactacatgaattggtactcaaaccatttatcttttgcgagagcttcgtgcaccgtgatgtatgtcaaacattaaattcaaaacgtagatctagaatctctcctgtggtcagttaaaaaaaaaaaaaaaa

SEQ ID NO: 4161 - DNA, 1761 bp, Glycine max
  Peptide Sequence Number=SeqID_7595
  Probeset Number=SeqID_13940
aaattttattgaccaaaataacagtcatctctcaattctttcaaaatgaccactactcatatccatgaaactattcacgaatatcctgctcctatcatcactcctaactatcctgcaattgccattgaagagctttctcaaagatataaggcccttattgaggctgaaagaaagcattttatgacaactgagcaagagtataatgattttatttataaaatggacatgattcaccaagaacttgaatcaaaagttcaaggacaaactcgaacaattgatgagcttagacgtgataatgaagaattagcaagaaggcttcgtgaacttgaaaatgattatttcaagaagagtgatactttgaagaagctatattatgtctataatcacttgacaaagaaacttcaagctgcagaattcgataacttggatctcagaactactatcgacaaaaccagtgacagaaactttgaaattaacactgatcttaagcacgcaatctctgaaaagaattatcttgatgatagaatgtccgaccaacattctcgtcacactatggaattgaatagattgaacggaattcttgttgataaagataagcaaattcttgatagagacagagagattgatagacttaatgctgaaatgagaagaattcttgaagatcttcaccgccaaaaaatggatgctgattcacttagaatgaattacgagggaatgctacgctcaaaagatatagaaactgctcagcttcgtagacttctagaagaacaaagaaatctcgttttaactgagaatagatcaattccaattgttgatttgagtggaaatgaagaaactattagaaaactcaagacaagtcttgaagaagcttatagaacaatcgagcaattatcacagagaaagcatgtagagatcatagaaagaccaaaggttgttgagaagatagtggagaagattgttgaaaagcatgttgaaagatcaccaagacgtaattatggagatgatgatgaggaaagagtattaagaagcggcaataagatgagatctcctcatcgtggtggagaggatcaagataatagatgggatgaagatcgacttgaaagattattggcaatcgctgaaaaagctttcaataagaagcttgttcatctttattacataatctggaagctattgttccatattgaacacttggacagattgaataagaagcaaagaagaggctctactgatggtcaagaaagagaaaaaatggccagatctatgcctactatgagccttgaatatggagatagtgtgataagtttgtatcatgatttgagaacaggtatcgtcgatttcatctttgaaatctttattagaagtgctaatcatgctcatcaaaagaaagtcaattcattgattttgtttattatcaatgtgaaagaattgaaagaacgtaatattggcttctatttgcttcttctcgatactttcatgagaataagagatgttgtaaagattcatgtgaagacaggacagagaggaattgaaggaggaattgcgaatggaatttcaacaggaggatcaccagataagagaaagactgtggatgttgaatttagagatatgwccaactcatggattcaagatactcttgaaagtgtaaagaagagaagaaattatgataagcatgatcctgaarrrtatggaatatttgwacttgtttagattgttggcaattaagtacagartgatttatccattgagaggaaaggcatt

SEQ ID NO: 4162 - DNA, 1029 bp, Glycine max
  misc_feature (1)..(1): n is a, c, g, or t
  misc_feature (771)..(771): n is a, c, g, or t
  misc_feature (878)..(878): n is a, c, g, or t
  misc_feature (956)..(956): n is a, c, g, or t
  Peptide Sequence Number=SeqID_7596
  Probeset Number=SeqID_13941
ngaaatttttcccacatcatcgattaaaattacggctgcgagaagacgacagaaggggggatgtgttagaaaacaaaaccctaacacgttcaattctgaaaaaaaaataaatcacaatccctttcttttcctctctgatctgcaaacacatttcaagagaacgtttttgttgttgcgcccaatcggtgttgcatttttcttttgcagagaggaggggaagtctttatttgtgagatttttcttaggaagatgaaaaacacggagaggattgcaaatttggccgtagcaggtttaactttagccccgcttattgtgaaagtagattcaaatgtaaatgttatcttgactgcttgcctcaccgtgtatgtgggatgttatcgttctgtcaaaccaacaccacctactgagacaatgtccaatgaacatgcaatgcgtttcccctttgttgggagtgcaatgttattatcacttttcttgctcttcaagtttctatctaaggatttggtcaatgctgtgttgactggttacttctttttactagggattgtcgctctatcggcaacattattatcatctgtcaaacgttttttgccaaagcattggaatgaggaccccatagtctggcgttttccatattttcattctttggagattgagtttacaaagtcacagatcattgctacaatccctaaaacctttttttgtgcatggtatgccttacagaagcattggctagcaaataatatattagatcttgctttctatatacangaaattaaaatactctctcttaaatctttcaaaactaatactattctcttaactaaactctgtatttataacattttctaaattttcttcactccaatgataatcancattacaaaatcatgtaatactccaataaatgctttattccccaccgcaaattctacaaaaccatgttcaatacttanacttaataacattattatccctaatatctgtatacctttaaccttacaagttaatatttctaaaagaaaacaa

SEQ ID NO: 4163 - DNA, 658 bp, Glycine max
  misc_feature (1)..(47): n is a, c, g, or t
  misc_feature (648)..(658): n is a, c, g, or t
  Peptide Sequence Number=SeqID_7597
  Probeset Number=SeqID_13942
nnnnnnnnnnnnnnnnnnnnnnnnnnnnnnnnnnnnnnnnnnnnnnncggcgcggcggcaagacggtctggcaggccggccgcgacgatgtcctggcctttcaccgggcgcgtcggctgtcggcagctccctaccgcatctcggctgcgagctggaaccggagcgttgccgcgctcgacaagctctatcgctgggctgtcgaggaaggaatcattgcgatctcgcccttcagctacggcgccacccttcgcagggccggcggtagccgcgcagtgctcgctgtgacgacgaaccgtgcccgcgagcgcgccgcgcggcgccacgatacccgttacatcgatcttggccgctacctgctgttccgcgaggtgggattgcgcggccggcttcccgacggctcggaggacgcgacgtggcgcggccgcaacggcgagcgcaatgcgttgtttgccgagcttctcgtcacgaccggcctgcggctgacagaggccggcagtctgctgctgagtgagctgccgcgcctgaccgatcccgaatcgcgctcggtgccgttcgatctccccggtccgatcgccaagggcggacgaccacggcgcatccgcgttccccgccgggtactgagattgatcggcgactatgtcgatctcnnnnnnnnnnn

SEQ ID NO: 4164 - DNA, 1496 bp, Glycine max
  misc_feature (143)..(143): n is a, c, g, or t
  misc_feature (150)..(150): n is a, c, g, or t
  misc_feature (178)..(178): n is a, c, g, or t
  misc_feature (186)..(186): n is a, c, g, or t
  misc_feature (319)..(319): n is a, c, g, or t
  misc_feature (386)..(386): n is a, c, g, or t
  misc_feature (495)..(495): n is a, c, g, or t
  misc_feature (545)..(545): n is a, c, g, or t
  misc_feature (814)..(814): n is a, c, g, or t
  misc_feature (1068)..(1068): n is a, c, g, or t
  misc_feature (1105)..(1105): n is a, c, g, or t
  misc_feature (1267)..(1267): n is a, c, g, or t
  misc_feature (1375)..(1375): n is a, c, g, or t
  misc_feature (1381)..(1381): n is a, c, g, or t
  misc_feature (1465)..(1465): n is a, c, g, or t
  misc_feature (1476)..(1476): n is a, c, g, or t
  Peptide Sequence Number=SeqID_7598
  Probeset Number=SeqID_13943
ccactactctcctcatcatatggactacaccgctgcgcccgcgtcgatccctctatactctccacctcgttcatgatccacagaggtgtgtcgcggcgcgatgcgatagtgatcacgcggcgctctctcacagacgcggacgngcgcacnacatcgcgactgctctgtactattgttntgggtgcngatcatccctcacgcacaccacgcacaccactactctctcactcatgcccagctcgcagatcaactcaatagcgctcacacatatactcatacagacagcgacgtacgacagtcgctacgcatcgccgaggcnagtaagtgatgatgcacaaatacactaatactgtcactactatatacccgtctagccacgctcgtantgttcctcatcatgagtcgcgagtggcggcctcgatcacacacgtatctaattactatgtaatcaagtggtctaggaatgcggttgtgagtggagagggagtatcatanactaatatctgacatgtagtcgcgatcgtggctattgcctcatgcatgcntatactcgactactcttcccacgaactcatcactctaatacgacatcagacacgagtcaagcacagaagcatatctgatcgtgataaagcaaggtcatttctcaattctataacgagcggaggagtgagagtcaccaaattacctactagcagatgagtgtggtatgatatccatttactaataaggattgttcgtatagctagcgttgcatatagatccacacataaccatcacacactcccgatgacgcgataggtgtgatatgatnttttctctaatttcttatctctgtgtagcctgcggggtggtgccgctctaacttctattccgcacgagatcacacaacatcaacgacaacaccatgataatcacagcacaaagagatggaggtcgtgataggatatcggagtagtgcagacaccatccccgtcgacaccacgcgcgggcggcctcgcgatgtagtgccgtgtctcgtacatacgcgaagcatgagagagatgagtagcattgtcgtcgagagangaatagagaatatttatttgggtggtatgttgtgttngtatatagttgtttttttgttttgttgtgtttgatatgatggtgagcgtagtgagttggtgtgtggcgtgctacatataagtagatgtaacgtgggtcttccgaccacttgtttattggtgtagatgtgtggcgtactcactctctatccatcctactctancgacgacgggggttcctcttggtgtaacaacacccacagcagtacagttcatacatcgattgatcaatacaagaaaaagtgtgatgatacatatgtaggcacaccatngatatntaattataataaaactatatcaactccacatctatcaacatctcctccctagcatctataagatagtagtatagaagaggatanatgtaggagangtcccaccgctgcgtctttt

SEQ ID NO: 4165 - DNA, 2015 bp, Glycine max
  misc_feature (21)..(21): n is a, c, g, or t
  misc_feature (23)..(23): n is a, c, g, or t
  misc_feature (28)..(30): n is a, c, g, or t
  misc_feature (33)..(34): n is a, c, g, or t
  misc_feature (42)..(44): n is a, c, g, or t
  misc_feature (61)..(61): n is a, c, g, or t
  misc_feature (74)..(74): n is a, c, g, or t
  misc_feature (118)..(118): n is a, c, g, or t
  misc_feature (160)..(160): n is a, c, g, or t
  misc_feature (229)..(229): n is a, c, g, or t
  misc_feature (236)..(236): n is a, c, g, or t
  misc_feature (292)..(292): n is a, c, g, or t
  misc_feature (305)..(305): n is a, c, g, or t
  misc_feature (312)..(312): n is a, c, g, or t
  misc_feature (351)..(351): n is a, c, g, or t
  misc_feature (359)..(359): n is a, c, g, or t
  misc_feature (377)..(377): n is a, c, g, or t
  misc_feature (413)..(413): n is a, c, g, or t
  misc_feature (488)..(488): n is a, c, g, or t
  misc_feature (512)..(512): n is a, c, g, or t
  misc_feature (514)..(514): n is a, c, g, or t
  misc_feature (516)..(516): n is a, c, g, or t
  misc_feature (518)..(518): n is a, c, g, or t
  misc_feature (584)..(584): n is a, c, g, or t
  misc_feature (586)..(586): n is a, c, g, or t
  misc_feature (606)..(606): n is a, c, g, or t
  misc_feature (612)..(612): n is a, c, g, or t
  misc_feature (725)..(725): n is a, c, g, or t
  misc_feature (739)..(739): n is a, c, g, or t
  misc_feature (741)..(741): n is a, c, g, or t
  misc_feature (759)..(759): n is a, c, g, or t
  misc_feature (761)..(761): n is a, c, g, or t
  misc_feature (806)..(806): n is a, c, g, or t
  misc_feature (809)..(809): n is a, c, g, or t
  misc_feature (811)..(811): n is a, c, g, or t
  misc_feature (862)..(862): n is a, c, g, or t
  misc_feature (909)..(909): n is a, c, g, or t
  misc_feature (961)..(961): n is a, c, g, or t
  misc_feature (981)..(981): n is a, c, g, or t
  misc_feature (1057)..(1057): n is a, c, g, or t
  misc_feature (1066)..(1066): n is a, c, g, or t
  misc_feature (1068)..(1068): n is a, c, g, or t
  misc_feature (1089)..(1089): n is a, c, g, or t
  misc_feature (1101)..(1101): n is a, c, g, or t
  misc_feature (1182)..(1182): n is a, c, g, or t
  misc_feature (1515)..(1515): n is a, c, g, or t
  misc_feature (1520)..(1520): n is a, c, g, or t
  misc_feature (1564)..(1564): n is a, c, g, or t
  misc_feature (1587)..(1587): n is a, c, g, or t
  misc_feature (1589)..(1589): n is a, c, g, or t
  misc_feature (1618)..(1618): n is a, c, g, or t
  misc_feature (1621)..(1621): n is a, c, g, or t
  misc_feature (1623)..(1623): n is a, c, g, or t
  misc_feature (1627)..(1627): n is a, c, g, or t
  misc_feature (1634)..(1634): n is a, c, g, or t
  misc_feature (1665)..(1665): n is a, c, g, or t
  misc_feature (1684)..(1684): n is a, c, g, or t
  misc_feature (1687)..(1687): n is a, c, g, or t
  misc_feature (1689)..(1689): n is a, c, g, or t
  misc_feature (1694)..(1694): n is a, c, g, or t
  misc_feature (1710)..(1710): n is a, c, g, or t
  misc_feature (1720)..(1720): n is a, c, g, or t
  misc_feature (1729)..(1729): n is a, c, g, or t
  misc_feature (1748)..(1748): n is a, c, g, or t
  misc_feature (1781)..(1781): n is a, c, g, or t
  misc_feature (1805)..(1805): n is a, c, g, or t
  misc_feature (1810)..(1810): n is a, c, g, or t
  misc_feature (1816)..(1816): n is a, c, g, or t
  misc_feature (1867)..(1867): n is a, c, g, or t
  misc_feature (1890)..(1890): n is a, c, g, or t
  misc_feature (1913)..(1913): n is a, c, g, or t
  misc_feature (1948)..(1948): n is a, c, g, or t
  misc_feature (1978)..(1978): n is a, c, g, or t
  misc_feature (1984)..(1984): n is a, c, g, or t
  misc_feature (1986)..(1986): n is a, c, g, or t
  misc_feature (2015)..(2015): n is a, c, g, or t
  Peptide Sequence Number=SeqID_7599
  Probeset Number=SeqID_13944
atatctcgtaagcattctcantngatannncgnncatgatannnaagatcccactacactncatcatctcactngttcgtggttgtgtgatggttgacattcgtgtacgctagcgcgnctctatctacggagggcgcggaggagcgagagcgcgcgacgngcagagccggtcgcgtggtgctctcgcacaccgacgaggccacgacgcagagagggagcagcatgagtnactctcncctctactcgctgggctcttatcctctaacaggataagtcataccgtccagctganagatgtataagancttaccnctgtctctatctcgatcgtaatatctcacacctgctatnatctactntcgtctccacatctactngtcactgatacgagctcagacgtttacgcgctactncagcgctagctgtgataagacgtactgtgactgcaacacgcgaccgcagtgatcagtacgcaattgatcatgcangtgcctaagatgtgactaacgtcncncnangtacgggagagtgatctgcactatagatgatctcgatgctgctcgcctagaccgctatctgagttncngcagcgacgattggtggagntgtaantcggccgcgagtgcacgtcgtctgaggtaggctgtgtgttatattacagctgacatcgagtgttatcatcgtgtgagtgtcgatgacgtatgtacatggcacgcagcatgtcnacagcatctaatgntnacgtattgcgaatgatgngntacgtcgatcgtcatgtttgatcgtctagtatgattgatacgttnacntngaaactaatacactactcgatcgcgcatcatatagatacatcatcgtagtnctgactcctacttctatagtctctgcacgacgtcactatagtctgtngcgcgctacgtcgcgtgtcgggcgccgctcagcgcctcgctagatcgcgcgngtcgtcgatgatgaatgtanatggaacgactgttagtgagctgaggatcgtgtcgctatcagctctaggtactgtgtgcagtgcacagcgacggcntgacgcatncntgtctgagcaatagcactcantcacctcatatnacgtaagcacgtcatgaagcattaatactggcgtgcgtctcgcgacttatcgctgatctgctattacatgcatgtattagntacttatcgcacgacgctatgatcagctctcctgacgatgcaccacacaccagtgcgacacacgacctctatgactatgaagtaatctactacgtcacgatagtactcgctacgagtgatagacgtcagtactccggtgtgtactatcacgcgtgcgatgtgtaccaccactcacgatactgcatatgctcctcctactgtgtactctgctgcagacgtgcgcatactcgaccgctcatagcgtcgtgaccctctctctcagctacccacacgtccgcgcgctgcgcgtcatgtgcgttggtcaggacgcatactgcgcactccgcgctatgntctgnactcgagatcgtagtgcactcgtcgcgatctcgccgctctgcancacatcatcatgtatgtcagtgntnctcgtcgtacgatgtgtcgacgtatgcanacncngctnatagttnatgtcgatcgctgcgtagcgatgacacgatncacacgatcacgacatgtnatntntcatnattattaagtgtctancgtatgtgantactagaanatcaatgtcatgtctcatntatcaatcgtacgaggatgcactacacatatgncagttcgtgatgaccagtaaccgnaggancgaganggacgtctctttgcgtctcatcgtgtgacgatcgactaatcacgctataantactgatccgacgctgcagcatnatgttatatacgtagtcgtgcangctcagcatgactcatgtgacgcgagagacttgtngcataaagctgatacgagtctgacgtgaantgctgntncactagtcgacgacgccgcacgccatcgn

SEQ ID NO: 4166 - DNA, 1404 bp, Glycine max
  misc_feature (18)..(18): n is a, c, g, or t
  misc_feature (23)..(23): n is a, c, g, or t
  misc_feature (27)..(27): n is a, c, g, or t
  misc_feature (38)..(38): n is a, c, g, or t
  misc_feature (51)..(51): n is a, c, g, or t
  misc_feature (56)..(57): n is a, c, g, or t
  misc_feature (84)..(84): n is a, c, g, or t
  misc_feature (190)..(190): n is a, c, g, or t
  misc_feature (341)..(342): n is a, c, g, or t
  misc_feature (373)..(373): n is a, c, g, or t
  misc_feature (750)..(750): n is a, c, g, or t
  misc_feature (752)..(752): n is a, c, g, or t
  misc_feature (811)..(811): n is a, c, g, or t
  misc_feature (898)..(898): n is a, c, g, or t
  misc_feature (924)..(924): n is a, c, g, or t
  misc_feature (976)..(976): n is a, c, g, or t
  misc_feature (1010)..(1010): n is a, c, g, or t
  misc_feature (1094)..(1094): n is a, c, g, or t
  misc_feature (1156)..(1156): n is a, c, g, or t
  misc_feature (1161)..(1161): n is a, c, g, or t
  misc_feature (1188)..(1188): n is a, c, g, or t
  misc_feature (1195)..(1195): n is a, c, g, or t
  misc_feature (1220)..(1220): n is a, c, g, or t
  misc_feature (1284)..(1284): n is a, c, g, or t
  misc_feature (1286)..(1286): n is a, c, g, or t
  misc_feature (1349)..(1349): n is a, c, g, or t
  misc_feature (1352)..(1352): n is a, c, g, or t
  Probeset Number=SeqID_13945
tattattgatgttgtggnggggngaangaggagatagncgagaggcgcganaacannaacaaaacaaacatagatgttaactancgcgcgctctcacaacaccgtacccacgacaggaaacacactacacacggaccaccaatgagcaccaaaaattcagcaccacacacaatgaccctacgcacactcnaaaacagacaatagcccagaacacatcctccgtagcctacacaaagcgtctaaaacaaaccaactaccaagatccaggcaaatataatggggtgtttttttgtgcggagtggataattacggtgagccgaaagagcacgaagaagaaaagnngggcggggcggacctctctaccggactacgncgacgattacactagaggggaatgaagtatgcatagtcaaaagaaaaagaagggatatggggtggtgagcgtggatataaaaagggtagagtgatctgagtgaacaacaccggtaaaaatataaagagcaatgaagagaataacatatataatcttataacacaacaaacattcttggagaattgaggcgggcgatagcgcgtcgacgctaaagaaagggggaagttaaaaacggagaagaggcgaaaatattaagaaataagtgaaagttagaataacacaaactagacaaaactacaatcctcgcccagacgtcgaaccacattgaatgtacactactccttcatacacttctctatatatatacatcgcccccncnactacccgcaatacaataataatttaaatgtaatttgacatagtataataaaatgacanacaccaccacaaacatcatataacagatgacataagagaagttagcaaagaatatgtataggcagaaacgctgcgagcaacctgtanctgaacataatgctgactgcagcttngcgagagaatgagcgagacacgatactctactacataaacagaatatcatantgatcatatatcacgatatatcgcatctcaccgncctcctctcgtaactagtccatacatgcatactaggatgagacgcactcgttaaatagagcaatagattcccagaaaaattatncatagtatatatacaactgctacacgaaactcatcgatatgtattcataacacatcttgcancgcgngcgtgtctttgtaattgtactgctcancttgccntcgcactgtgtctgcatcgaaagtnactgcgacgcctaactacacacacggcgcccacgcagcagcacactccaccactcatgcagcancncctacacacacacactcattcgctacgaccaactcaatatataaaatatattacatatatacntcncgttggcgcgctagataaacagtataaaacatacataatccatatatgctca

SEQ ID NO: 4167 - DNA, 668 bp, Glycine max
  Peptide Sequence Number=SeqID_7608
  Probeset Number=SeqID_13946
aaaacaccacaagataattaccagcagatcatcatcatcatcacattaacgcgccgagctagctaaacgcgaagcgctaatggcgatcgtttacgtgcttctggtggcgctgatcaccgcggcgtcccatgcgccgcacggcgcgcacggccagacgtggcacggcgacctcgcggcgctcgccgccgccggcaagctccgcagcgaccccaacgccaccctggcggcctccacggacttcggcaacatcacggcggcgctcccggggggcgtgctgttcccgtcgtccccggcggacgtggctgcgctcctacgcgccggggaacacaacggtggcgtgggcgtaaaaccatctcgttccgcgggcggggccaatccgtgatgggggcaggcttggccctcggcggcgggggcccccacatgccgtccctgggggggcccggcctccggggggggattcaacgtgggcggggaacggccaaaaatccacccccgggggggaacaaaaggggggatcaaccgcctggggttaaactttggaacgccggcgggggccccgcaagtcggggaacggaataacctccccctccaccggccggggggaccctctctcctaaggcccggaaattaaggggccccaaaccacacggggaagcggccccccaaat

SEQ ID NO: 4168 - DNA, 374 bp, Glycine max
  misc_feature (19)..(19): n is a, c, g, or t
  misc_feature (26)..(26): n is a, c, g, or t
  misc_feature (37)..(37): n is a, c, g, or t
  misc_feature (42)..(42): n is a, c, g, or t
  misc_feature (56)..(56): n is a, c, g, or t
  misc_feature (61)..(61): n is a, c, g, or t
  misc_feature (100)..(100): n is a, c, g, or t
  misc_feature (105)..(105): n is a, c, g, or t
  misc_feature (120)..(120): n is a, c, g, or t
  misc_feature (159)..(159): n is a, c, g, or t
  misc_feature (164)..(164): n is a, c, g, or t
  misc_feature (177)..(177): n is a, c, g, or t
  misc_feature (184)..(184): n is a, c, g, or t
  misc_feature (210)..(210): n is a, c, g, or t
  misc_feature (212)..(212): n is a, c, g, or t
  misc_feature (215)..(215): n is a, c, g, or t
  misc_feature (229)..(229): n is a, c, g, or t
  misc_feature (246)..(246): n is a, c, g, or t
  misc_feature (274)..(274): n is a, c, g, or t
  misc_feature (279)..(279): n is a, c, g, or t
  misc_feature (293)..(293): n is a, c, g, or t
  misc_feature (312)..(312): n is a, c, g, or t
  misc_feature (316)..(316): n is a, c, g, or t
  misc_feature (318)..(319): n is a, c, g, or t
  misc_feature (323)..(323): n is a, c, g, or t
  misc_feature (329)..(329): n is a, c, g, or t
  misc_feature (336)..(336): n is a, c, g, or t
  misc_feature (351)..(351): n is a, c, g, or t
  misc_feature (372)..(372): n is a, c, g, or t
  Peptide Sequence Number=SeqID_7609
  Probeset Number=SeqID_13947
ttttttttttttttttttnaaaaatnaattttttttntcaancaactaataaaaancaaangtcctacaaaaaaaattgtagtaaactcatcctaaattnttaangttctaagttctaanatgttgatgactacgtgaattcaaaaatcattttttttnttaancaactaataaaancaattgncctacaaaaaaatgagggggaaatancnttnttaattaaggctcncaatgcagggaagttanacaatgattttcattccttgaaatcatntttgncatcaaggggaatnggtctgttcatccaaaacncggnannagcnctcccnccaagcnccatgcaaacaacgntaacagcaaaaggaacagctnca

SEQ ID NO: 4169 - DNA, 304 bp, Glycine max
  Peptide Sequence Number=SeqID_7610
  Probeset Number=SeqID_13948
tgcacgtaagtcggcccccaccaccggcggcgtgaacaacccacaccgctatcgccccgataccgctgccccccgcgagagcacgaaataccagaacaacaccgacctcccgatcacgaagctcccccgccacagggtggctcgggcaattgctcaccacatccagactgagctgcgcgtccagagccatgcagtgctcgcatcccaagacactgcggaggcagaccatgcagcactcttagaggatactaacccgcgtgccatacaccctcagcatggaacaattatgcccaagaatatccga

SEQ ID NO: 4170 - DNA, 1443 bp, Glycine max
  misc_feature (30)..(30): n is a, c, g, or t
  misc_feature (108)..(108): n is a, c, g, or t
  misc_feature (112)..(112): n is a, c, g, or t
  misc_feature (196)..(196): n is a, c, g, or t
  misc_feature (370)..(370): n is a, c, g, or t
  misc_feature (472)..(472): n is a, c, g, or t
  misc_feature (540)..(540): n is a, c, g, or t
  misc_feature (574)..(574): n is a, c, g, or t
  misc_feature (667)..(667): n is a, c, g, or t
  misc_feature (951)..(951): n is a, c, g, or t
  misc_feature (968)..(968): n is a, c, g, or t
  misc_feature (1107)..(1107): n is a, c, g, or t
  misc_feature (1190)..(1190): n is a, c, g, or t
  misc_feature (1265)..(1265): n is a, c, g, or t
  misc_feature (1396)..(1396): n is a, c, g, or t
  misc_feature (1412)..(1415): n is a, c, g, or t
  misc_feature (1435)..(1436): n is a, c, g, or t
  Peptide Sequence Number=SeqID_7611
  Probeset Number=SeqID_13949
cggcatagtccagtcgatgtgcgcgacagntgtagtctcatgcattgctgtaatggcgtcacatcgacgataggtggtgtgacgccagtcatccacaagatacacatncacnacgcagacacgcgacgatgacgtcacaccgtggtgtgagtcgaggcgtgcggcgccgtcgtggtgcatcaacactgccgcactntgtcagattgctgcgtgctgtgtcagctgctcagatactagcagtcgctgtctgcttgctgtgtatgtactcatatatgatgatgtagtatagtgacgcgcgagatggtgggagcgggtgaaagcatgcgactataggactcgcgtgaggtcgggtgcgcggggtggtggggtnataatcaccaaagcaagtgtgagtgagtcggaggcgactacgaattctgacgtatattatcgctctccgtgcgattcactatctctactcatagcgactctncgtatctccggtgctctttcgtcgcatggtatgtacgacgtgtctgtccactcgcggattgttgtgtnttcttcatcacggcgacactcacgcgtcgtggtntcgatcacgcgatatgatgtaagtgtgtgtgtgatgtatatgtatcacgccggcggtggctgcccgcgccgctccgagaacagagccatgcgnatctgatggagtcgatggcagcagcaacatggagtagagttagtgaggtatagcttaaggcgtgtatatgctttaacgtgctggttatgtgatagctattgtgtgtcgcgtctctgcacatagtatttatgtataagttgaggggcagaggcgcactggaggcgagacggttgattggatagcttgatcacattactgatagaagtcgtatggggagacgatgggtgtgcttagtgtgggatatcgagggggaagaggaggtgggtcgtaattagacttatttntgcccacgccagatagncgtgtagttgttctggcggggcgagacggtgtacgcgggcgggagagcggcgctggtagacttgtgtgtgtggtgggctctggccctagcgccagtgtggtgtgtgttcgctctgtgtgattctattccctatgttcanggattcctgacgatgtgttgttaagataatagaacagtctgtcttcgcgcaggcgatcacagcagctcaatcgtcttgtgaancatatgaactgatgagacaagtcggcatgccgtacaggtggcagcacatgcccacgcaataccccgccgtcaggnctcgcggcggcgcagaccacgggtaggttccctccgacatctagaccggccctagcgagtccgtagaagccttaatcaggtagtcgggtgtcacagccccctccccatcaacgcgggtcacccccacaganccacccccatgccgtnnnnccctcccacgcacgtcgttnngcgtcaa

SEQ ID NO: 4171 - DNA, 432 bp, Glycine max
  Probeset Number=SeqID_13950
atatgcatgttgttttcttttgacatggagcgccctggccgatcacagccaccaccgcaggccattcaatgccacctccgcaggttgtctccagccagtcgtcgctgcccccggcgcctccacgcccagacccccttcctccgttcctcaaaaatctgtcaattcgaaagcctcaaaaacccgtcagttggaaatccgttcaacatccgtggttgataacgtccacgagctcctctgtgattagttccttcggtcgataatgggttgtggctccttggtgagcaaacctttcgtccctgttgtccagtcattgcctggagtaaggatgttgtgcatacacgtgcgtcagtgcactatcggctataacaaaagttgaagttcgtgcaaatgccaaacttgttgcagctgggtgcaacccgtgaaggggctatg

SEQ ID NO: 4172 - DNA, 634 bp, Glycine max
  misc_feature (634)..(634): n is a, c, g, or t
  Peptide Sequence Number=SeqID_7612
  Probeset Number=SeqID_13951
aatcctcgggtaatcgaagagcaaaataatttttcacactccacagcctaaacccaaccctaaaccacaaaaactataaataaataatgggtggctgtgcgagtagacccaaggagtcagacatgaacaacgaaggctctgttcctaagcctgtgtctgaaaacgtagtagccaaggagatcaacacagaagaaagcggtgagaaacaaaaccaaacagagaccactgaaacaacttctgtcgaagctaaggagacatctgaggtcgaaccgaccaaggaaacagctcctgctgctgaagcagaggttgcagcagccgtggaagagtcatcttctgctggtgaggttgcagcagcaactgagaaagtggagaacgtagaggctgcaacagaaaacgttgaggcggttgcggtagctgctgcacctgaaaaggttaaggccgaaccagtaaaggaagagaaagaagctgtcgtcattgtttgattggattaaagctgtggaaaatattttgaatgttgttgtataccaccttgatttgattttctactacctgatttaattaactggctttggttgttctgtgtatgtcataataattcttctttgattcaattaaatataaatcagttttgctn

SEQ ID NO: 4173 - DNA, 1501 bp, Glycine max
  misc_feature (23)..(23): n is a, c, g, or t
  misc_feature (27)..(27): n is a, c, g, or t
  misc_feature (35)..(35): n is a, c, g, or t
  misc_feature (53)..(53): n is a, c, g, or t
  misc_feature (58)..(60): n is a, c, g, or t
  misc_feature (63)..(63): n is a, c, g, or t
  misc_feature (86)..(86): n is a, c, g, or t
  misc_feature (96)..(97): n is a, c, g, or t
  misc_feature (147)..(147): n is a, c, g, or t
  misc_feature (151)..(151): n is a, c, g, or t
  misc_feature (216)..(216): n is a, c, g, or t
  misc_feature (499)..(499): n is a, c, g, or t
  misc_feature (506)..(506): n is a, c, g, or t
  misc_feature (528)..(529): n is a, c, g, or t
  misc_feature (534)..(534): n is a, c, g, or t
  misc_feature (781)..(781): n is a, c, g, or t
  misc_feature (899)..(899): n is a, c, g, or t
  misc_feature (1104)..(1104): n is a, c, g, or t
  misc_feature (1218)..(1218): n is a, c, g, or t
  misc_feature (1335)..(1335): n is a, c, g, or t
  misc_feature (1344)..(1344): n is a, c, g, or t
  misc_feature (1387)..(1387): n is a, c, g, or t
  misc_feature (1501)..(1501): n is a, c, g, or t
  Peptide Sequence Number=SeqID_7613
  Probeset Number=SeqID_13952
gttgtaggaaggaatggaaaaanaggnaggagatngtgacaattctgtttgtntttannnttncttcttacttaattctgaggagntctctttggnnttacccgtgtggcatctcacggtgtggggtctcactggggttggcgtgangccnctgcaataataaggtgtatgctcgatagatctggcgtaatatttcaatactgtggggttgggtgntgccgatgggtacgctctacgctgtttgcctctgtgggactcccgctattcttttcatctcgtcatcgctgccgtacccagatcaatcgcgctgatcgcgtctggttgtcgctagtgggtgggacaactacaataattctaaagaactcatatattctctggtagagaaagagagaggggagtggggtggggtagaagagtgtgggagaaacaacggtgataacaatagctgttggacacatacaaatattgcaatgacgtcggggtgggtagcctcgggagngtgagangagaaagtgggtggaggcgtgnnggaantcgtggttcttctctccgatgtgtattatcgcgtgtggaggaaacaacaaataacggaggtgtgaaaatgctgaataaacaataatgtaaaatgatatatatatatatatagaataaggcgggatgagtgttatataattattatcgtagaaatatatatttattggtggatcatccagagtggtggtgtgatgagggcgggcgatgatatcaatacaatatcggcgtcactacaacactatattcncgacgtgcgggggaaacagaaggagatgctgtgtgtaaccgcgcccacacacgaggggtggtggtggggtgaggtggtgacacatggcgtcttgggtaaagatgtatatacttctgcncaccaccacacacacttcttcatgccgcgtatgttgcttgcatatggtgtgacacaggtcgtccgatgttgtgatgttcggtcgctgtgcccatacagcttatcgcgcgacagtcctacacagcgagcctcggctcgctgcgctcatccctcacacagccaccgctcgtcaatgtactcgtgggtgtctgtcgcgtgcgaccccncgcactcgctacgcgtcgtgctgtcgccttcctctctcgttatctcattccggctcgtcgcactggcatccctctctgagaagatagcattggggctcggtcagatgagatatnagtgtgcgcgctcgtcgtgagatgtcgccacgagatcatatatagtgattgcgcacaatgaataacggtatgagtgtagagagagttggtctctaatctctgatgatgttactctgnagaaagcgntcgattgatagtatgtcttatgatcgtacaacagttcgagtantatatttcttgctctatctttgttgtttatgttactcgtctatcgtcctctgtgccgtgtgctagtgtatggtgtctcactacgctttctatatgtattctctcttgcttagtn

SEQ ID NO: 4174 - DNA, 526 bp, Glycine max
  Probeset Number=SeqID_13953
atcccaagctagcaaagcccacctagcgctcagccacaagccagtacactctagctagctactagcgttatccacatagcaatggcgccctccaagctcgccctcttcctcgccatgaacctggccctcctcgtggccgtgcatggctgcgggtcgtgcggcaacacaccgcccgtcccagtcccaagcccaccgatcgccgtgcccccaccagctcccgtgccgtctccgccttcgcccggcggcgggggcggcacctgctcaatcgacacgctgaagctgaaggtatgcgccaacgtgctgaacctgctgaagctcaacctcggcgtgccgacggacgagcagtgctgcccgcttctgagcggcctcgccgacctagacgccgccgtgtgcctctgcaccgccatcaaggccaacgtcctcggcatcaagctcaacgtgccggtcgacctcgtgctcctcctcaaccagtgcggcaagactgccccgccgacttcacctgccctcgctgatccatccatcacaa

SEQ ID NO: 4175 - DNA, 1489 bp, Glycine max
  Peptide Sequence Number=SeqID_7614
  Probeset Number=SeqID_13954
atctccacaaattacaaattataaatgaatcaccacaattgatcatatttattaaagttatttaatcatgccaacactagttaatctacatgtatatttcaaaaggataaaaccactatcaatcaagcggctatcttcatgcattcatcaatcttctcatactcgctcatatgcaacatcatcaaataataaacaatacaaaggacttcacaaaacaatagatacacaaactgctgttcagaatttcaattcatgggcaagtgatttgtggtttgccccaagagaatggcaagcacatttaggagataagattaaatgtcattatttgcccttctggcatttcaatggtgttggtactctgagttatattggacgtattggattcaatcgtactagaagagttttaatcaacaataaggagtcttatgaaacatacattgattggagaatcattccaatacgtcatgtaactaatttccacttttctaataatgtatatgcaagttatgaattagaaagagatcatgtaaataaattagcaccatgggatcaagatgaaattacaaatttaatatcttctgacttaaatgattctaatgttgacacttatactgttgattctggaacggcatattcattaggatggaatgaacaattatattatattgtagaaaaagcatgtttatatgatttgagaaattcaaatgtgaatattggtgatcattatgatattcatagtttcgatttacatgaatctcgtttacaatatacaatggtatattttccagcatacgtattacaatacacatatcaaaatagtgaatttcaagttttaatgaatgctagatctggtgtcataagaggatatagacaatatgatgaaaataaaataacagcaactgtttttggagccgcgggactttcttatctcgtgggttctttttatttagcaaatgaggtctctttctttggtgctgtgctttttgtttttgtaccatcttttatcgcaggaataggaatgagatttttcccccagttcatgcaaacttattatcgtccttttatgaaacaacatkctggacgattctcccaaacsaaaatatycccagaaggaggctcagaatccgaatacgaagaaatcaatcaatcagaagaggcaagawagagacaagagagagaagagagacaaaatcaatatggaagaagtaataggcagcaatctcagtctcaatcgaaatcgaaagatttatatgctgtgttaggtgttagtaaaaatgccactcttccagaaattaaaaaagcatacaggaaaaaggctatggaaaatcatcccgatcgaaatccaaataacaaaacagaagctgaacgtaaatttagagaaattaacgctgcttatcaagtgctaagtgatgatcgtgcaagggcagattatgatcgctatggaacatattaaattaattcattgtaaattaattaaaacaatatatat

SEQ ID NO: 4176 - DNA, 1620 bp, Glycine max
  misc_feature (25)..(25): n is a, c, g, or t
  misc_feature (28)..(28): n is a, c, g, or t
  misc_feature (34)..(35): n is a, c, g, or t
  misc_feature (40)..(41): n is a, c, g, or t
  misc_feature (73)..(73): n is a, c, g, or t
  misc_feature (79)..(89): n is a, c, g, or t
  misc_feature (92)..(92): n is a, c, g, or t
  misc_feature (95)..(99): n is a, c, g, or t
  misc_feature (103)..(103): n is a, c, g, or t
  misc_feature (118)..(119): n is a, c, g, or t
  misc_feature (125)..(125): n is a, c, g, or t
  misc_feature (127)..(127): n is a, c, g, or t
  misc_feature (170)..(170): n is a, c, g, or t
  misc_feature (179)..(179): n is a, c, g, or t
  misc_feature (224)..(224): n is a, c, g, or t
  misc_feature (236)..(236): n is a, c, g, or t
  misc_feature (278)..(278): n is a, c, g, or t
  misc_feature (361)..(361): n is a, c, g, or t
  misc_feature (365)..(365): n is a, c, g, or t
  misc_feature (642)..(642): n is a, c, g, or t
  misc_feature (679)..(679): n is a, c, g, or t
  misc_feature (808)..(808): n is a, c, g, or t
  misc_feature (856)..(856): n is a, c, g, or t
  misc_feature (891)..(891): n is a, c, g, or t
  misc_feature (951)..(951): n is a, c, g, or t
  misc_feature (957)..(957): n is a, c, g, or t
  misc_feature (959)..(959): n is a, c, g, or t
  misc_feature (970)..(970): n is a, c, g, or t
  misc_feature (1080)..(1080): n is a, c, g, or t
  misc_feature (1110)..(1110): n is a, c, g, or t
  misc_feature (1139)..(1139): n is a, c, g, or t
  misc_feature (1251)..(1251): n is a, c, g, or t
  misc_feature (1257)..(1257): n is a, c, g, or t
  misc_feature (1319)..(1319): n is a, c, g, or t
  misc_feature (1342)..(1342): n is a, c, g, or t
  misc_feature (1420)..(1420): n is a, c, g, or t
  misc_feature (1427)..(1427): n is a, c, g, or t
  misc_feature (1448)..(1448): n is a, c, g, or t
  misc_feature (1464)..(1464): n is a, c, g, or t
  misc_feature (1475)..(1475): n is a, c, g, or t
  misc_feature (1526)..(1526): n is a, c, g, or t
  misc_feature (1528)..(1528): n is a, c, g, or t
  misc_feature (1544)..(1544): n is a, c, g, or t
  misc_feature (1558)..(1558): n is a, c, g, or t
  misc_feature (1578)..(1578): n is a, c, g, or t
  misc_feature (1605)..(1605): n is a, c, g, or t
  Peptide Sequence Number=SeqID_7615
  Probeset Number=SeqID_13955
ttatttgggtgctctcctccccccnccnctgctnntcatnntctctctcctcttgtatgcgcacgcagagagngccacnnnnnnnnnnntgntcnnnnnctcnaatctgggcggctcnncgcgtncnccgacccatccagcggaggcgtcgatgtgtattatcgttgttntgaataaancactacttagtcgtcatgcttatggtgtgtgtttgttgtatgttnttatttgcttgnctcgctggtgatgtagcagacgagtgtgagtgtgtatgtgtnttattcttttccaccgcacaacataccaaaaaatggccagccactgtctcccagtgtgcgacatggcgcgaccgcgcagcccncggnctcgcgtgtgtgtgtgctctcttctgttcactttattctgttcggctgtgaacgtacgttctgtcctgtgtgctctcctatcaatgctataggtgagatgtatagtgttcgagcgtgggtgatggtcattgtatgtcgttcgtgttgagactatgtgtactaacatagtcgtgcactgttctatctaattggagaatcattctgtgtatatatacacgaatagatataggtatattttataagtagttaacgacggatggcccaccaacaccaccgncccagtaacaggaagtcagtgtttaaagagatggggnaattaaatggtatcaaccatacggatatgatctaaatatatgaacaatgagagataaagagaatgaatactacaccaggtcaaccacacacgctcactgcgcagactagcgatactcgctacttactcnatggaatattcattgtgtatgtattactgttacgtcatctatataccnacacacatgtatataaataagaataaagtcagtanaacataacacgagacttctcattattataaggacacccacccgacccacccatcccaccnccatgnanacgagcatganattggtaagatgtcagttatgctctgctgatatctctgacgctctctacgctcttcagtatactgagatatcactgctctaattctatatatctattctgataacctatnctcctaattgcttcggtgtgtgatgtcacntctacgtgtcagtctacctgtatctccangtcagtgtgagcctcgtccgtgactcgtgcagtgcactcgttcgtgatcgctgcatgccctgcgtccgcgtcgttagcgacgtatcatttcttagtgcgctgcgctcgactnactctntctcgaccccgcctacgatcgtctgtcttgcagatattcaatgttctgcgtgcaccggggancgctctcagacggtcgggctcgnagtgtggtgcatgctgctgtatgtgctgcgcgtatgttaagggcgcgtgtctcgtgatgtatagatgcgactgctgtntgactcncgctcgcgctggtagtagtgngcactggaactagtancgctgagtttnatgcatacgcctatcgtctgtgcgtgccttgctgctcttctcacatgtgtntnttcatctcttagcgtncatcgcttgtgctntgtgtgctactcgttcgtcntgtagctatcgtgcttatactatacgntgagcttgactggtg

SEQ ID NO: 4177 - DNA, 343 bp, Glycine max
  Peptide Sequence Number=SeqID_7616
  Probeset Number=SeqID_13956
ggcttcaaatcatgaagaagtgatactttagggcaagtgggccagcccatttagcaacagactagaccttgctctgaagctcaagggagttccctacaaatactcgagggaagatcttgctaacaagagtgctgatcttctgaggtacaaccccgtgcacaagaaggagcctgtgtgagtgcacgatgagaacacattgcccgagacacttattaatgaatgaaacatcaacgagacatggaaaagtaaatacctcgtgcctcgagacccttacgagagagctctggctcgatatagctctaaaactttaggagacagaatgtcggctgctatatctaaagct

SEQ ID NO: 4178 - DNA, 1363 bp, Glycine max
  misc_feature (24)..(24): n is a, c, g, or t
  misc_feature (31)..(31): n is a, c, g, or t
  misc_feature (33)..(33): n is a, c, g, or t
  misc_feature (43)..(43): n is a, c, g, or t
  misc_feature (61)..(61): n is a, c, g, or t
  misc_feature (736)..(736): n is a, c, g, or t
  misc_feature (804)..(804): n is a, c, g, or t
  misc_feature (900)..(900): n is a, c, g, or t
  misc_feature (950)..(950): n is a, c, g, or t
  misc_feature (1000)..(1000): n is a, c, g, or t
  misc_feature (1051)..(1051): n is a, c, g, or t
  misc_feature (1079)..(1079): n is a, c, g, or t
  misc_feature (1098)..(1098): n is a, c, g, or t
  misc_feature (1109)..(1109): n is a, c, g, or t
  misc_feature (1170)..(1170): n is a, c, g, or t
  misc_feature (1215)..(1215): n is a, c, g, or t
  misc_feature (1222)..(1222): n is a, c, g, or t
  misc_feature (1225)..(1225): n is a, c, g, or t
  misc_feature (1233)..(1233): n is a, c, g, or t
  Peptide Sequence Number=SeqID_7617
  Probeset Number=SeqID_13957
ttggggggccctttttttgctttnacccaancnaacccagcgnaccccgacactgtttttntttttccctatatattctacgggcgccccccccggggggaatattgtgggggggcccccccccctttttattacaataaatttaaaatgggtgaaaccgagcgcaacaccactgaaaacggacgcgcccgaaacgtgagaattgtaatcgattgattaaaattctctatttgtcaccgtctcggggcatgggcccttctccatacccacgcgtgtgtgggtatgtgcggcgagacatatatacctatgcccccgggtatatcctaatctgcgaaaaaaaacttaagagagaaagagggggatcgttagaatgggtcagcgagcgaaaggacaactgggagcaagggggctacagatcaatgggggtggcgaaagacgagaaattggtaaaagttaatttaagtgactgaagagtattcctaatacaatatcagtggagaaaagaaacaagggtgaaaagggcagaacttgtggatacatcatcaataatgacacccggcgatgtcgtaatttcgagcgcctggactgcgttcttacataatcattccatgctcgtgtcgtattgtataacctggtgtggaatattagtataatccccacgcaaaccagccacagcagaagcgcaaactaacgaacaagggaggtcgagaaagagaggagaaattacgaccaaccnccaccacccatatacaaaacaactgcgactcctcggaatgatacaccatcacacaatccaccacacanctgtaactcagtgcgggagaattacgcgcgcagagcgttgtcggacaatgctatatcagcatatgctgctgagatactcgctgcatatatagtggnacagcgagccgaaaagcaacaaatagactggacggaaacatctagcacgnaccatatcgctgtgtataatgtatggcgaggtcaacacacgacacaatantacgtctcgatctgctactctgctcggtcgcctgctatctcctgcgcgaanatacacatacgagagcgaggtgagatcntcggtcgcactacatatcncaattctgcgngttaaaaataataacgttgctgtacgcgtctcacataatacaatacttggagacatatcangcatcacatacacacgcgacaaggagcagcgggatgactgcgagngctaacnaancggtcganacactcactcgctacatgcctcgcagcagagtggaggggatgacaacatatatgccgcgcacacacatacgataatatgctagacacatatggacatggacgatataggtgtattagatcacttgacttt

SEQ ID NO: 4179 - DNA, 725 bp, Glycine max
  misc_feature (1)..(8): n is a, c, g, or t
  misc_feature (670)..(725): n is a, c, g, or t
  Probeset Number=SeqID_13958
nnnnnnnntccgtgggaaaaaaaattcaccaaaaaaaaagaaagaaaaaagcatagagagaaagatcacatggtgttgaggaaagtgggtaagtatgagattggaaggaccgttggagagggaacgtttgcgaaggtaaagttcgctcagaacacagagagtggcgagagtgttgccatgaaggtgctagaccgtagcgccatcatcaagcacaaaatggtcgaccagatcaagagggaaatttctatcatgaagctagtcaggcatccatatgtcgttcgtctacacgaggttctagcaagccgtactaagatttatatcatattggagtttattacaggtggtgaattgtttgataaaattgtaagccatgggcgtcttagtgaagctgaatctagaagatacttccaacagcttattgatggtgtagatttttgccacagcaagggagtttatcatagagatttaaagcctgaaaatcttttacttgattcacaaggaaatataaagatttcagattttggtttgagtgcatttccaggacagggggtcagtttgcttcggacaacttgtgggactccttattatgtagctctggggtactcagtacaaggggttattatggggcttcaccagatgtttggtcgtgtggggtaatcctctacgttcnnnnnnnnnnnnnnnnnnnnnnnnnnnnnnnnnnnnnnnnnnnnnnnnnnnnnnnn

SEQ ID NO: 4180 - DNA, 1454 bp, Glycine max
  misc_feature (1032)..(1032): n is a, c, g, or t
  misc_feature (1076)..(1076): n is a, c, g, or t
  misc_feature (1296)..(1296): n is a, c, g, or t
  misc_feature (1382)..(1382): n is a, c, g, or t
  misc_feature (1424)..(1424): n is a, c, g, or t
  Peptide Sequence Number=SeqID_7618
  Probeset Number=SeqID_13959
gtttagctcatcagcgcacccgccgcccgtgcgagaaacggacacgcactctcgcctattgtgtatgtgctgccgctgaagtggaggggactgttcctatgacccattttatacccccgacacacacgcccgcccctacaataattctcaccccgttatagattgaaaggctgtgtattgataagaaaaaattctcttaccccctcttcctaataccaaccatgaaactcctcgttatagttcccccgaaaccgcgtcatacgcacctccgcggaccaaaatgacttaatgtaatacccgagtactgtataccattattctgatgtccagctccgctagccactatattacaataatcactattctattactacgccctcaaatcagacacacgtggatgcgtatagggtgccgtattgtgtaccctcacgtagatttaatcgccaccctcccaagtaaacctgggacaatgatgtcgctggtcggtcactggcgttgtttcggagagtgcggtcgatgttgttatctgctttcgccgctcgggtgtacctccggctccgaggcgacgaacagtgtaaggccccgcgaaacgatattgaaattgtgtattgcaagttgcattaggacggcggcggagttatgctattcgaataattaatcgaatcggttgtttctgctattccctctatactacactaaagagtatatctcgcgcaccgtatagaagctgaagacgcatccagtgatcgctacgtaatgtacctagtcacatgagaagtgatgcgagtggaactaacggggcgtgatttgatctcttgtaagtaagataagagcggacaacgcaaaggacatatcgttcggcaaatatagaaagcattctctgcatacaccgctcagcatctcccattattttactggcgattaaactactcgagcagctcagtcatatcactccttctcttacacagcctccgcgactagcgagctgtacgagtctgcgacgtcattgtatgtcgagctaccagactatancgattagtacacagtgttatatcaccgacagccccacctcgcangctctcatgtatatgtgtgtgttctcacccgcagagtcggcatacacacgtcatctcgtgtacatcgatgatgatactctacagagcatcgacacgatagcgcgcttatatatatatgatgatgtatagctcgaccgatcgcttgtagtatatgggcactgactattagatacacagagattagttgtatgtgcgtgtatagacagctggcatctgcgcncgactgtacgagactctatgcgtcgtcacagactggacacgtcgtgaggataggtcctgatgatgagagagacgacgacggtgagnagatgcgtgacacgttgggtgcgcgtcttgtgatcaaggctngtacgaggactatttgatgaaagcatctcg

SEQ ID NO: 4181 - DNA, 628 bp, Glycine max
  misc_feature (624)..(628): n is a, c, g, or t
  Probeset Number=SeqID_13960
ttttttttttttttttttccatatacaattttattttcctcagtcatgatctcctaacagttgccatgctgacaaaaaagatattaacaagagctctgaatatagcttgagctatattaacaagatcatcaaagacaaatggtacagtttacattaagtgcaatttcctttgtagctctgaatgtaccaaaatagtacattatacctgcccctacacatttttttggggaatacagtgaactttatataaacctgaacatttcatcacaaatcgaccaaaaggaaagactgaaagcctttaagtgtacgagcaaatgtgctatctttaacctctttgatttgtcaaatccaatggatgcttccaagttccaagcaagacgtgtcaagggtagttcagtagacagccaattcttgaaacaggcatgaattttgttatgtggtctcaatcagacaaaaaaaaaccagtaaacactccaaaatatgttgccgaaaaatataccaaaataataaaactaagaacctaaaactcctaaaaataaaatgcattcgaattcctcaattgcaatttacaaaaaataaagcaccaaaacccagccctccagcatcacatcaacaactagaacnnnnn

SEQ ID NO: 4182 - DNA, 1707 bp, Glycine max
  misc_feature (1)..(1): n is a, c, g, or t
  misc_feature (75)..(75): n is a, c, g, or t
  misc_feature (84)..(84): n is a, c, g, or t
  misc_feature (195)..(195): n is a, c, g, or t
  misc_feature (228)..(228): n is a, c, g, or t
  misc_feature (247)..(247): n is a, c, g, or t
  misc_feature (330)..(330): n is a, c, g, or t
  misc_feature (369)..(369): n is a, c, g, or t
  misc_feature (451)..(451): n is a, c, g, or t
  misc_feature (474)..(474): n is a, c, g, or t
  misc_feature (548)..(548): n is a, c, g, or t
  misc_feature (578)..(578): n is a, c, g, or t
  misc_feature (584)..(584): n is a, c, g, or t
  misc_feature (645)..(645): n is a, c, g, or t
  misc_feature (842)..(842): n is a, c, g, or t
  misc_feature (1161)..(1161): n is a, c, g, or t
  misc_feature (1640)..(1640): n is a, c, g, or t
  misc_feature (1642)..(1642): n is a, c, g, or t
  Peptide Sequence Number=SeqID_7619
  Probeset Number=SeqID_13961
ntcatgatattacaacaacactactcgcaggcgatcgactccatctacagattcgcgcctatatcgcgcttgcgncgtactagngcgagcgatcattatactcatagcctcagttcattacgcgacgtaccatcctactcgatgcgtatcatatatctacaacgtcgcacaccacgccaactcagagatgtctgnagccgccggcgctcttcacctccagtcacgcantcgtgtcatgacatgctgnagcacgcttactcactaacgacgatgctcacacgctccatcgtcttctcctgtctatctccccgagacagcgagcaatgcganagaattcgtcgtctcaccagacgagctcgcgcgcatcgncatgctactcccaacgagtcgcctcgcccgtacaggacgctcgagctcagcgactgcactacgacttctgcgtagaccactncacactatccgacgaggtatagnagacgcacgcagtataatgacatacataatagcagtatatcacagacaacgcgcgtcacatatcgacggagatnacgtatatgacagattagtacgtcatcgantcgcgncacaggcacgtcatcactccgatgaagtgtgaaagcgcaagcacagcgcaatttgcaatanggcgcgcgttggtgcgtcgtatccagctgacgactatgttatcgagtgctgaccgaaccgatacacatcgctaatctcgccatcgagcgcgcgactccacaccatcagactagtcatcaatggacacgaccctgagttcactcgaccctatcgcttatttcaccgcgatcacgcgtccacgcgagtcgtgtcggcangcgcagccatgactgaacatgcatattacagccagccgggacgcgcgatgtgatccacagagctcagaacttcggcgactacgacgatcatccacgacctctctcatcaatagccagcgactcgagtgcgtggcgcgcccgtctcctcgttgcgtatcatgtatcacgctttctccagcctgcgccttataccgcttgatgcactgatgtgtgttcgacatcttccttgcgtccggtcatatgtgctaagagtcgctcgtaagtcacagaagatgcgcgtgcacacctcgcggcgacgacgagcgaccatacgaaatanttataccctctctacatcgtctaccgttctgactgctgtaggagttgtcctcacctcatgaattcagcgcgacgagaatctatagtcgatctaggtgcaggcattaacatgttctccggtagatcgtactacacattagatacacatcagctacataatatagcgacaggcagcgcgcaccaagtcgcgtcagacgacacaatcgaccgtccacaagacggcacctatctccgcgccgatataagatatgtagccgcgacagtccacgcgttgtatcgtcggcgctttacaagactgtccgttcggcgtaaacactacgaccacgaatatacaaagttcgcgcggcagcagaccgccgtatcgtctctagcgctctcaatagtattcatcgcctacaccactgcaatgccgcaccctccgacaaaactcctgtgccgcaccccgctctcccggcccactacccccgccacctccgatcntngtattcatagttccgctcccgacaccgcgagagataagtacgcgtgagcgaaatagagagtgatt

SEQ ID NO: 4183 - DNA, 1454 bp, Glycine max
  misc_feature (74)..(74): n is a, c, g, or t
  misc_feature (78)..(78): n is a, c, g, or t
  misc_feature (136)..(136): n is a, c, g, or t
  misc_feature (146)..(146): n is a, c, g, or t
  misc_feature (321)..(321): n is a, c, g, or t
  misc_feature (378)..(378): n is a, c, g, or t
  misc_feature (423)..(423): n is a, c, g, or t
  misc_feature (489)..(489): n is a, c, g, or t
  misc_feature (852)..(852): n is a, c, g, or t
  misc_feature (1058)..(1058): n is a, c, g, or t
  misc_feature (1233)..(1233): n is a, c, g, or t
  misc_feature (1267)..(1267): n is a, c, g, or t
  misc_feature (1386)..(1386): n is a, c, g, or t
  misc_feature (1390)..(1390): n is a, c, g, or t
  misc_feature (1403)..(1403): n is a, c, g, or t
  misc_feature (1421)..(1422): n is a, c, g, or t
  misc_feature (1428)..(1428): n is a, c, g, or t
  misc_feature (1433)..(1435): n is a, c, g, or t
  Probeset Number=SeqID_13962
aggactgtacggacgggacgtagtattctatcgatagtacagcggcatagtatcgcttcgtcgatctctcagcncttncctatgttcgtcgcatagctcacctggcgtcgacatgccgtggcactaatcagttacntactgattgngctgcacctctcacgtagcgcactgcgcatgagtgtgataagtctcgagtcatcgtctcgaagtcagaaacattcgtcgcgctcatcgaaacatcagctcagagctgtagtgtgatttgtcctctcgcattatatttatattacaacttatacaaactcatagaagatcatgtantccgctctctacacgaatgccgtgaatatgcgcgagtgagtgaggtggatggtgtgntgggtcgccgcgcgtgatctatatagtatgcagcgagtctcacantgcgacgaatagactagcagtcgcgcgcatccggcgagatgagaggaccgagagaacatgggagtntgtaagtgctctgatgtgagaggtaggatatcgctactgttatagacgggtgcgagcgatgcggaggatgcgtttgcgtgcggacgcagccgatctgcttcatcatatacctacgaccatgctctctgtgacgctataactctagattctcctctcacatctggcgtaggttagtcgcggtcgtctctctactagtgagcgtgcaactatcaggatgtgagcagctgatctactcgcacaacgtgttcccggctggccgtgtcgcgagagccgacgtgtcgggtcggccgcaccgcgcgagtcggctcgcggaggccgcgcgcccggcaactctcgaacaagacacggggagtggcaatatantagtggagaatactatgagatagtatacgcctcaacaaccaatacaaccaaacaacaataacgcctagctctaattacactcatgtcgataagtgaagagtatctcgtgattcttatagtgtgggtagtattggtagcgcgcgagcctacatgtagcggtatgcgcgtgtattactgcgagtggccgaccagagagaggtcgtcgngttttgtatacacgttgcgtcggtgtggtgtattgtatactgttcgtttctatcttctagatagcttcacatctccgctgcaagcgtaggtacatgatgggaaaagtgagaggctgagtacaataacttgcgcgaaacactcatgtgtagctcggcgtcatatctccgtaacatngctgggcgaagataaaagcaacagtgcctctacngaggtgtgagagtgtaaggcagtgtagtgggggcggtctaattctcctctcaatagcgcgtgtgtttaacatgtgtttttttttatatatataatgtataccatataccttatgtcgantgcnactgaagagaggnaaggaaccacgccacacnnacaaanagaannnaccccacccaccccccccc

SEQ ID NO: 4184 - DNA, 479 bp, Glycine max
  Peptide Sequence Number=SeqID_7620
  Probeset Number=SeqID_13963
atgccggcctggaccaaaggttggtgcagggtcgaagagaccatcaaccaggtcgcctgaccatgaaagggtctctgagtctccatcctctctagcctgcctagggctggaccagtttggcactgctagatattagctagctagcatcggttcataagggggtgtgaaggccagagggagcccaggccagcaaggagacctcagataccaagaagaacggaaggtgaagaagctcatcaagatcgctgatggaagacggcagggctttgaggaggatgtctatccctacccgcagaagcagatctgccgatttccacaatttttcagaaaggaggagacgggataagatcaacgagaagctcaaggcactgcaagagctacttccaaactgcaccaagacggacaaggtgtcgatgctagacgaagcgatcgactacctgaaatcgctccagctgcaactccagatgctagtgatgggg

SEQ ID NO: 4185 - DNA, 1466 bp, Glycine max
  misc_feature (33)..(33): n is a, c, g, or t
  misc_feature (101)..(101): n is a, c, g, or t
  misc_feature (117)..(117): n is a, c, g, or t
  misc_feature (145)..(145): n is a, c, g, or t
  misc_feature (300)..(300): n is a, c, g, or t
  misc_feature (540)..(540): n is a, c, g, or t
  misc_feature (1122)..(1122): n is a, c, g, or t
  misc_feature (1438)..(1438): n is a, c, g, or t
  misc_feature (1441)..(1449): n is a, c, g, or t
  Peptide Sequence Number=SeqID_7621
  Probeset Number=SeqID_13964
atgtctcgctcgcaatctcacacatgtgtctgnacagagagaatagtattatgcgtctcggacaggagacccgcacggggtcatgggtgccgaaacaacanacctatagggtgcggnggagagagggcgcgcacgtaataatgcntcatatgtgaggtgagatacatcagtccgagcgccatattatgtgatgtattgtaatttcttattctccttttttgttgatttaccataagttatgttcggcggtccgcttgccgtcataattttgtatttgtctatattatatgtttttgtatnccgtgatgattctatattcgctgtggttgtattatagtattttctttgatattcttcctttacctccctctcttcgcttattttattatttgtatcgattgcatatcttgtatttttgcgttatgtttgttatttaataatattatcgaacttatcatatacttctatcccgtgtacacatatattatccatatagtccgacatcgctcgtcgcgcggctttgtgttttagctatattangtgaggggcggggttgttacaggacgcatctttgtgttctttattcgtaggactctctggtgtgtgtttagactaattgcaatttctattctctatataacaattagaggcgatatgtgggatatatagctgtccatcggttaccgagggtgtggggggtttggcgggtgtagtggtgtcaactctggggttttattgggctgattgtttccattccctcccgccacagtatgtagttcttgtgtgtatagttagtgaggaaaattatagtgggaggtctaaaaccttgtttcttaatttcggtaatttcattttattaggcatacaatattgtggctcatatttactaaatagtaaggtggggcattaaccaatccatttcctttctttggtgcatacacataaataatcgctagcttgatttattgttaggatattaattatggttcagcctttgtaattattttattattttattttgaatcttattctcgtatattaagaacatatttataagaaagcatgatcaggtaataaacaaccttttagtatgtgagaaagaaagaatagcagttactttcngccggcgtcgcacgggagtggattgtaggcccagtggcagttttctcactcggctcgtgtaaacgaggtagcagttgatctgcgcgtgggttattgcggttttttttgtagatgtgtctattaatattccttcatttaatatgttttatgacataatttatttgtctttttgttttaaattcgccgcggaggggggaccacgcttatgggcgcgctggttactgttgattcacgtaaaagaccatctttcgcaataaaccagaagaagcaagcgacgcgggcacaaaccaaggaaaacatggaaacaacaaccaanaannnnnnnnnaaaaaaaaaaaaaaaaa

SEQ ID NO: 4186 - DNA, 919 bp, Glycine max
  Probeset Number=SeqID_13965
tccatcctgattaacccaatatacgatgggtatttgaaactggggttgaataaaactacatctttttttcctcctccagtttactttaaaccaagtgttagtgtttgagggattcaagaggaacaactctttcaagcttttcaaacctttgttttcccataatggccaatctgcattttcctttgtgctagttgcagtgccatattcttccctcctcacagcagctaatgtaacatgggaagtcagtgatcaaagaagacgagtaactcaactaagcctcaatggaaacaaacacacatgacccttccttgaagctcttgtacttctttctctccaaagtgggagtttttgtggagcttctaggaatcacaatcttctcatagctcgagttaagtccattgttgtcattgcctctctttgtggcaggaagcctaggggactttaactttggagaaaccgggggtgtcaatgaggtcttccttcaaagtggtggtgatggtggacaaattgactttggtggtaccactttcttgattgaaatcctcctctcaaggttttgaacgcgattacaagttgagttggagcactgcccttccattcattttatccacttaggactttgcagcacccacctctaattgtgaactctcattcccttctgtattagcgctccaccttatgttatatttatattcctagttataatagatttttcatatctaaaaggttatgttaacaacaaagaaaatttaccagtaatttatatacgaattcaatcaaaatatttcatctttcaggaaaaacagccacgggggatcccctttttcgtatgcctccacctccgcgtcgtaatcccatttgtggggggtagttatattattaaaataatacttgatagaacttggtgaaagggaaatat

SEQ ID NO: 4187 - DNA, 362 bp, Glycine max
  misc_feature (5)..(5): n is a, c, g, or t
  misc_feature (7)..(7): n is a, c, g, or t
  misc_feature (9)..(9): n is a, c, g, or t
  misc_feature (12)..(13): n is a, c, g, or t
  misc_feature (16)..(16): n is a, c, g, or t
  misc_feature (18)..(19): n is a, c, g, or t
  misc_feature (31)..(31): n is a, c, g, or t
  misc_feature (38)..(38): n is a, c, g, or t
  misc_feature (42)..(42): n is a, c, g, or t
  misc_feature (45)..(45): n is a, c, g, or t
  misc_feature (316)..(316): n is a, c, g, or t
  Peptide Sequence Number=SeqID_7622
  Probeset Number=SeqID_13966
aactnananaannacncnnatcagtaatctnagactancagntcnagaactgcattttgattcttccctccgccttcatccatagacctggcctccgtcacttctgcagccgttgtctattccctcattgcactggcctctcaaaggcaagcgcaggcaaagtgagtgccgccgcagtttaaagtctcagctccccaagccacaaggttctgcggcatcaaggcttccctcaaagacgttggagtcgctgttgtggcctactgccgcgagcgcagtgtctggctagcaacgccttggccattgttgtcttgctggngccctgtccccgcctctctgttttttttttctccctttctctcccc

SEQ ID NO: 4188 - DNA, 1679 bp, Glycine max
  misc_feature (1)..(1): n is a, c, g, or t
  misc_feature (15)..(15): n is a, c, g, or t
  misc_feature (54)..(54): n is a, c, g, or t
  misc_feature (67)..(67): n is a, c, g, or t
  misc_feature (104)..(104): n is a, c, g, or t
  misc_feature (123)..(123): n is a, c, g, or t
  misc_feature (130)..(130): n is a, c, g, or t
  misc_feature (137)..(137): n is a, c, g, or t
  misc_feature (139)..(139): n is a, c, g, or t
  misc_feature (202)..(202): n is a, c, g, or t
  misc_feature (242)..(242): n is a, c, g, or t
  misc_feature (426)..(426): n is a, c, g, or t
  misc_feature (432)..(432): n is a, c, g, or t
  misc_feature (436)..(436): n is a, c, g, or t
  misc_feature (462)..(462): n is a, c, g, or t
  misc_feature (482)..(482): n is a, c, g, or t
  misc_feature (594)..(594): n is a, c, g, or t
  misc_feature (801)..(801): n is a, c, g, or t
  misc_feature (900)..(900): n is a, c, g, or t
  misc_feature (902)..(902): n is a, c, g, or t
  misc_feature (1139)..(1139): n is a, c, g, or t
  misc_feature (1163)..(1163): n is a, c, g, or t
  misc_feature (1171)..(1171): n is a, c, g, or t
  misc_feature (1285)..(1285): n is a, c, g, or t
  misc_feature (1307)..(1307): n is a, c, g, or t
  misc_feature (1313)..(1313): n is a, c, g, or t
  misc_feature (1350)..(1350): n is a, c, g, or t
  misc_feature (1357)..(1357): n is a, c, g, or t
  misc_feature (1359)..(1359): n is a, c, g, or t
  misc_feature (1362)..(1362): n is a, c, g, or t
  misc_feature (1366)..(1366): n is a, c, g, or t
  misc_feature (1483)..(1483): n is a, c, g, or t
  misc_feature (1668)..(1669): n is a, c, g, or t
  Probeset Number=SeqID_13967
ncggtagagaagtangaggtagagaaatatggtagtgatgaggtcatactctgnacacgcacagcantgcagtatgaacgaatacgtatcagtcgatatgacgnaagtgcagcgtacggtccntgtcagntgcggtncnagcccgcagcgctgttctcagccgacgctcgtgtactatatgagatcatcgactagtgaatcngcgatatatatgcgtcgagtgctgacgtagtgagtggtgntgtgtgatgtgggcatcgcgcggcaggcgcgccacacgagcacgcgcggagtatgatgtctatgactagatcagtataacgcagacgcgagagagcgtatgacgagatgccggagctcatgcagagacgcatagcacagcacgtcacgcagttatcggctgtgaggagcgacgtggcgtgtacntatacngatnattgcagactcacgatgtcgtacggngtagcgtgactcgatattantcacatccacaacacagatagagctctcgcgataactcatctctgtatagtctcatagtatcgtcctctcacacgatcatcgcatcgacgcgcagatgtgtcgtatagacgnatgagacggtatctagtcgagtcgaggagagtgcggtagctgcttaggacgtagtcggcgcagatcgtcgacgagagaagaaagcgacgacgagcagatatgtatatgtggacggctcagctgagcgccgtgtttgctcacacgagcagcgcggcgtatcgcggcgagcagctagacacaccgcagacgcgtcggtggctcacggangtgggcgtatgggtgtgcgatattataattatgtaggagaccgatagaccagcgccagtaaatcactctagtacatcgatgagatagaacacatctgcncntagaccctcacactcgcagatgtgtatgccgtggccctgcatcttcagcctaggtcgcgtgacccgagcgaggtagtgcacgacgcacgtcgcagcgcggcacagccctcgcggcacacgacacgcccaacacgcacagctggagaggcgcgcgcgcgcgccgcctcgtccatcgccgcgccatcttgtagacggtgtcgtcgttgcggctgcgcgcgcttgatagcttctgttctnctgcgcccggcgtcgcggcgcgcncttgctgngtgtgcgctctcgtcgttattttcatgtcattgaatatatccatgtatgtcctttttatattatatattatctgtcaagtagagatgatgtggtgttgtgatgttcgttgtcgnggagatgtgtatgtgtcacacnatgtgnggtaggagagccgagcagaaagagggagtgacacagntcgtccntnttnaganttacacgctctagacacagacacacatacagcgccgcgccacatcgtctgcccctctctcttatttgctgctactgagcgcgtgcacgacatgtggtagaagaagaacagaatatanatatataccgatgatatttatcttacctagcttcactctatcgcatccctctcctactcttccatcgccgcgcgtcgtcttctccgtgcgtacgatcacctccagcacatcgctcttcgcccacaccgcacgccggcgcggcccgcatctgctgctaccggcgcccccgctcgcactactccatnnacctacccac

SEQ ID NO: 4189 - DNA, 2088 bp, Glycine max
  misc_feature (1)..(1): n is a, c, g, or t
  misc_feature (21)..(21): n is a, c, g, or t
  misc_feature (25)..(25): n is a, c, g, or t
  misc_feature (55)..(55): n is a, c, g, or t
  misc_feature (117)..(117): n is a, c, g, or t
  misc_feature (124)..(124): n is a, c, g, or t
  misc_feature (133)..(133): n is a, c, g, or t
  misc_feature (142)..(142): n is a, c, g, or t
  misc_feature (211)..(211): n is a, c, g, or t
  misc_feature (334)..(334): n is a, c, g, or t
  misc_feature (353)..(354): n is a, c, g, or t
  misc_feature (361)..(361): n is a, c, g, or t
  misc_feature (391)..(391): n is a, c, g, or t
  misc_feature (396)..(396): n is a, c, g, or t
  misc_feature (466)..(466): n is a, c, g, or t
  misc_feature (530)..(530): n is a, c, g, or t
  misc_feature (582)..(582): n is a, c, g, or t
  misc_feature (601)..(601): n is a, c, g, or t
  misc_feature (641)..(641): n is a, c, g, or t
  misc_feature (689)..(689): n is a, c, g, or t
  misc_feature (697)..(697): n is a, c, g, or t
  misc_feature (715)..(715): n is a, c, g, or t
  misc_feature (726)..(726): n is a, c, g, or t
  misc_feature (748)..(748): n is a, c, g, or t
  misc_feature (768)..(768): n is a, c, g, or t
  misc_feature (787)..(787): n is a, c, g, or t
  misc_feature (874)..(874): n is a, c, g, or t
  misc_feature (925)..(925): n is a, c, g, or t
  misc_feature (975)..(975): n is a, c, g, or t
  misc_feature (1027)..(1027): n is a, c, g, or t
  misc_feature (1109)..(1109): n is a, c, g, or t
  misc_feature (1127)..(1127): n is a, c, g, or t
  misc_feature (1199)..(1199): n is a, c, g, or t
  misc_feature (1235)..(1235): n is a, c, g, or t
  misc_feature (1277)..(1277): n is a, c, g, or t
  misc_feature (1645)..(1645): n is a, c, g, or t
  misc_feature (1673)..(1674): n is a, c, g, or t
  misc_feature (1687)..(1687): n is a, c, g, or t
  misc_feature (1691)..(1691): n is a, c, g, or t
  misc_feature (1707)..(1707): n is a, c, g, or t
  misc_feature (1720)..(1720): n is a, c, g, or t
  misc_feature (1728)..(1728): n is a, c, g, or t
  misc_feature (1783)..(1783): n is a, c, g, or t
  misc_feature (1815)..(1815): n is a, c, g, or t
  misc_feature (1819)..(1819): n is a, c, g, or t
  misc_feature (1841)..(1841): n is a, c, g, or t
  misc_feature (1979)..(1979): n is a, c, g, or t
  misc_feature (2013)..(2013): n is a, c, g, or t
  misc_feature (2015)..(2015): n is a, c, g, or t
  misc_feature (2021)..(2021): n is a, c, g, or t
  misc_feature (2026)..(2027): n is a, c, g, or t
  misc_feature (2029)..(2030): n is a, c, g, or t
  misc_feature (2033)..(2034): n is a, c, g, or t
  misc_feature (2037)..(2037): n is a, c, g, or t
  misc_feature (2039)..(2040): n is a, c, g, or t
  misc_feature (2051)..(2061): n is a, c, g, or t
  misc_feature (2066)..(2088): n is a, c, g, or t
  Peptide Sequence Number=SeqID_7623
  Probeset Number=SeqID_13968
ncgctcgagtagaagcatgcncatncgatcagtcgcgcatactaccatcctctcntcgctgctcatcttccgttctcacatctcattctctacatagtcttataaacagtcgtttancatcctnctacactcncacacttcncatcatcatcacatctatactacctctgcacccccctctactatctcgtcgtgtcacacccactaccantgcaaacgcatcatagtacgaagatcgcgcatatactaggacggttcatagcgctgctcattttatgcggacttatgcgcgagatcgcacgccggtgcgcacgcacgcacgcacacagctcancaggcgtgcctatcagcgnncgcgtgngagacatatcatcgcaagacacaccgttcncgacngagacatatactgcaacgctccagatacacagacatagcgtacatatcgaagaaccacactcatctcgcncgcgctctccatcactcacacatatacatgatagatatatgatacatagcacaaagctcacatnagagtacacacaactcatgcacgagcacgagacgtcgttacgacgccggctnctcgcgcacgagtacgacnatcagcgcagacgagtaagtagtgacgacgtagtcacagngcacatactacgacacgcacgcacgcgatgcgtgtaatacacactcancttccaancaatcactacagacgcangccactcacanacaatcgtcgctacacaacganatatacaacagtccatcacncgaccacatcatcacacanatccacgtgtgtgcggacgcgcaatatgcatcagatctacgtacgcgcgtgcggtcgtcgcgcgatcgcgcactcacgatcgtcggnaggcgcatcgcatgcggagatacgtgtgatagctactacgctatcattaantgtcacatctttagtgctttgaacaatatgagacatgagcgtatcttcanttcttctactccattcatatgacatactgtacacacacattaactacagctncacataacgagagagagaatatgaacacgacacagcctccgatcgcacgtagcggtacggacgagatgttgtcgcaccacgncagcgccagctgagagtncatcataacatactcgcgtgacaacgcgcgcctcagcgcgctcgctaaatcctctgacgagtaccgtgagancgctcagaagtgaacaccgtacgacacctatgtatnattgcactgtacaacagtacgagtcctactgacgacgagcanataacatcgtgtcggtatagcattctaataaaatatgacgatcaacgatgtctgcttcaccgacaatcgtctctctacagtcaccttcagatatcagtgcttcacaattgtcaactatcaactattaatatgtagcctactctcactcacattacataaggtatagtgaaccctctcacccatacgcgatacacgacgtaatccacactacatcactctcacatagtctctaaatataatgctcacactaaatactaaccatatatatacgacatcatactctaacactattactaatccataccaacatctgatatcatactccaatctatatatccattaatcatctctcttatccctttctatgnatagacttgcataattcttttagttagnnaagtctgtatgtntatnctcatctttgcggtanttatgcatctatntatcgagngagatgatcgatatatactgtcgctcatggtattattatggtatttactatcatnatgtgtaattcatttgttttctgtgatctgtnattnttactgtatcccctcgatgctncaacgaccgactaactcaccaagctaccagacaccttcctcctccacatactctcaacggacacatacactcctcaacctcacatttatctcacgtacagctatctctctaccacaatcacacaccgagttcagaacnactccaccacatgtatatctaacactacccagcncnatcacnacaannanntcnnaantnnccaaacctttnnnnnnnnnnnccccnnnnnnnnnnnnnnnnnnnnnnn

SEQ ID NO: 4190 - DNA, 1439 bp, Glycine max
  misc_feature (71)..(71): n is a, c, g, or t
  misc_feature (75)..(75): n is a, c, g, or t
  misc_feature (77)..(77): n is a, c, g, or t
  misc_feature (240)..(240): n is a, c, g, or t
  misc_feature (355)..(355): n is a, c, g, or t
  misc_feature (683)..(683): n is a, c, g, or t
  misc_feature (720)..(720): n is a, c, g, or t
  misc_feature (960)..(960): n is a, c, g, or t
  misc_feature (1130)..(1130): n is a, c, g, or t
  misc_feature (1148)..(1148): n is a, c, g, or t
  misc_feature (1229)..(1229): n is a, c, g, or t
  misc_feature (1316)..(1316): n is a, c, g, or t
  misc_feature (1352)..(1352): n is a, c, g, or t
  misc_feature (1375)..(1376): n is a, c, g, or t
  misc_feature (1378)..(1378): n is a, c, g, or t
  misc_feature (1397)..(1397): n is a, c, g, or t
  misc_feature (1399)..(1399): n is a, c, g, or t
  misc_feature (1405)..(1405): n is a, c, g, or t
  misc_feature (1411)..(1411): n is a, c, g, or t
  misc_feature (1429)..(1429): n is a, c, g, or t
  Probeset Number=SeqID_13969
caagacgacgacgagacatgtgtggcatatagaatcttactaagtagacacacacgcacacgacatgatantatntnaccgcagagcaagcgccgcgcggacgcgagacggagggggtatatgtttgagaggtgatgtgggtgtatgcagagaggagataggtagcagagatgatgaatagagaggagcgtatgtacgagagtattttatttcagagagcgcatgagatcagtatatagntacatgtatgtgggtgtggacggatccgatgagtccgcagagtattgtgtccgcagcacacagtcagtatagaaagaaagtagaggaagagtataaagaggtgttatgaaagtangagagagaagtgcagatcatgtgatagtagatagtaggtgggaagcgcgataggtagatataggtatatggatagttgtgttgtgagatatatgtgagaggcgaggcaccgcatatgagagtgatgtatatatttatcacaagtgggagccgagagtggtgagtgtggtgcgcaccacagcacacataatgtacagccgcgccggcatgttgatatgtatctggcgagtcggtcgtatatttttacggccacacacaatattagataagtatgagacgcgcagcagagcgtcttgatatatgtttattagtttatcccagcagccgtnccgattgtgcacgcgccgaagtgtgttgtgtgcgcgngcagcgggcttttttatttattcccaccaacagtttatgtttcttgccacacaccttaatatataaatttattaacacgccacaaagaatatattcgccgagcacgaattgatattatgaccagagttattattttctgcgccacgccagaggatatttttgtttgagacgccgccgcgaggtaatgagttgggtgttggtattgcaccatattaattattaatacgcgccaccttgtancgagccgcacagcccagcgcaatcaatatcacaaatccacgacaagtagagacagccgtggtttgatgaacagaccagagcagaagatatatataaatggacggcggaggtgcaaaatacagacgattgcacggtcgatgctgtccgagagagagataataggttagctnggcagccctgatactagncgggccggggcggggtttcgcgccgatgtttatagatcgccacatttatataataggcgcacgacatataagagcagcagncgcaccccccgcgcccgggaggtaccgcaccacgcacacttatttgtcgcctcacgacgctctcgtagttttggggttgaatattanacccctcctctcccccaatctttttccctagggganggcggaaatataaaaaaccacanncncagcgagaggtgggcgggngncgcttntgtctngggtaaaagaaagtgtanagatttcaca

SEQ ID NO: 4191 - DNA, 1726 bp, Glycine max
  misc_feature (24)..(24): n is a, c, g, or t
  misc_feature (26)..(26): n is a, c, g, or t
  misc_feature (35)..(35): n is a, c, g, or t
  misc_feature (80)..(80): n is a, c, g, or t
  misc_feature (123)..(123): n is a, c, g, or t
  misc_feature (162)..(162): n is a, c, g, or t
  misc_feature (185)..(185): n is a, c, g, or t
  misc_feature (230)..(230): n is a, c, g, or t
  misc_feature (234)..(234): n is a, c, g, or t
  misc_feature (358)..(358): n is a, c, g, or t
  misc_feature (361)..(361): n is a, c, g, or t
  misc_feature (364)..(364): n is a, c, g, or t
  misc_feature (381)..(381): n is a, c, g, or t
  misc_feature (392)..(392): n is a, c, g, or t
  misc_feature (495)..(495): n is a, c, g, or t
  misc_feature (524)..(524): n is a, c, g, or t
  misc_feature (528)..(528): n is a, c, g, or t
  misc_feature (698)..(698): n is a, c, g, or t
  misc_feature (767)..(767): n is a, c, g, or t
  misc_feature (772)..(772): n is a, c, g, or t
  misc_feature (774)..(774): n is a, c, g, or t
  misc_feature (779)..(779): n is a, c, g, or t
  misc_feature (1024)..(1024): n is a, c, g, or t
  misc_feature (1057)..(1057): n is a, c, g, or t
  misc_feature (1077)..(1077): n is a, c, g, or t
  misc_feature (1082)..(1083): n is a, c, g, or t
  misc_feature (1086)..(1088): n is a, c, g, or t
  misc_feature (1115)..(1115): n is a, c, g, or t
  misc_feature (1117)..(1117): n is a, c, g, or t
  misc_feature (1120)..(1120): n is a, c, g, or t
  misc_feature (1122)..(1122): n is a, c, g, or t
  misc_feature (1229)..(1230): n is a, c, g, or t
  misc_feature (1254)..(1255): n is a, c, g, or t
  misc_feature (1290)..(1290): n is a, c, g, or t
  misc_feature (1311)..(1311): n is a, c, g, or t
  misc_feature (1355)..(1356): n is a, c, g, or t
  misc_feature (1364)..(1364): n is a, c, g, or t
  misc_feature (1394)..(1394): n is a, c, g, or t
  misc_feature (1414)..(1414): n is a, c, g, or t
  misc_feature (1425)..(1425): n is a, c, g, or t
  misc_feature (1501)..(1501): n is a, c, g, or t
  misc_feature (1503)..(1503): n is a, c, g, or t
  misc_feature (1506)..(1508): n is a, c, g, or t
  misc_feature (1513)..(1513): n is a, c, g, or t
  misc_feature (1515)..(1517): n is a, c, g, or t
  misc_feature (1520)..(1520): n is a, c, g, or t
  misc_feature (1562)..(1562): n is a, c, g, or t
  misc_feature (1564)..(1565): n is a, c, g, or t
  misc_feature (1567)..(1567): n is a, c, g, or t
  misc_feature (1569)..(1570): n is a, c, g, or t
  misc_feature (1598)..(1598): n is a, c, g, or t
  misc_feature (1602)..(1602): n is a, c, g, or t
  misc_feature (1605)..(1605): n is a, c, g, or t
  misc_feature (1607)..(1607): n is a, c, g, or t
  misc_feature (1627)..(1627): n is a, c, g, or t
  misc_feature (1639)..(1639): n is a, c, g, or t
  misc_feature (1642)..(1642): n is a, c, g, or t
  misc_feature (1646)..(1646): n is a, c, g, or t
  misc_feature (1649)..(1650): n is a, c, g, or t
  misc_feature (1652)..(1654): n is a, c, g, or t
  misc_feature (1656)..(1656): n is a, c, g, or t
  misc_feature (1658)..(1658): n is a, c, g, or t
  misc_feature (1680)..(1680): n is a, c, g, or t
  Probeset Number=SeqID_13970
tagtctctctaccttctcttctcntnctctgttcnctgcatccctcgcacctgctcactcacttctgtactcatcttcgnctctctaaataatactatcggggatccatcacaccccgctcgngcttgcgtctgtggcccgccactccctacgtatatatangcttgtagaatactcacccacgncgcggcgtaggcaagagacatgtgatctgattccatatcgctctnttangtatctcgcgatgctcactagtgggggacgcgctcaagactacacacaggatccagtccctgctccacgcacttctgtcgctcgactctcctcgcatactgggaggtaaacgcatactgcgagntanatntgtcactacatagtacnatctcgtaaantgacacgtctactactcttgtacgcactcgcgcacgcagagcatcgtcttagtatatatcttgtaccctgatgtcactctatactctatatggtcgtactcantagtcaagcagcatgttagcgcacgagcntagnacgcatccttgcgtcgcagcgcgtgactagtgccgatttagaggtcgtcctccattcgcaaaatcggagcacatatgttacgctcatttttctctatctgtactgttgtactgctcgtatacacttagactcgctcacgacatctcaacctgtagacgaatttgagttanctatagcgccacacattcgtatacgctcagcatattgcttatctctccgtatccccatcatgacatctngtgantnatctnggaattgactattagcatgttatcgcgctcgcgtatttatctactcgcttctctacttcctctctcactcgtgatggatatcctctgatactacactacactcaccctagtatatctggtttccccctttgccctctagtgcccatggacggcaactagtcatagattctcactctctccctctgtacctatcattttacgctatctggtgtcccttctataacacttgcgtatcgtttcttctnctctcacactcacctctatctacactctcatgncatgtatactcatagttatnatatnnttnnnttatcttgctctgctcgctttttgttntnttntngaatctgcacatgtcagtcgcaggtatgcgatcgtgcgcacgctcctctctcatactctttcgctctcacatataactactctcttactctgcgcagtgcggttgtnncgatatgatagcatgtagatgtannattctctactaccagtatgtatcttatataagtangatctatcataacgtcctgtngtctcgctacgtctactcactacatacgcatcgatatcgtggtnngctgatantgccgtcccaccacatgtcgctagctactntgcactctgatcagcctagnagtgtggacgncgcgtggctacaccacgtatatattttatctgtcctcactgcgacgcactcactatactctctcacgacatcatgntnttnnntgctncnnnctncccactctactcagtctgtgattattccacacatcagtactncnntncnncagatgatatgctactatcatctgtatngacnatnanttacactactatcaaatttnatcagtatctanacnctantgnncnnncntnactgctcttctgactacctatnagtaacgttcttcaacgtcatactatccagctacatcgtcatctcg

SEQ ID NO: 4192 - DNA, 1395 bp, Glycine max
  misc_feature (1)..(1): n is a, c, g, or t
  misc_feature (16)..(16): n is a, c, g, or t
  misc_feature (224)..(224): n is a, c, g, or t
  misc_feature (534)..(534): n is a, c, g, or t
  misc_feature (1006)..(1006): n is a, c, g, or t
  misc_feature (1030)..(1030): n is a, c, g, or t
  misc_feature (1033)..(1033): n is a, c, g, or t
  misc_feature (1145)..(1145): n is a, c, g, or t
  misc_feature (1240)..(1240): n is a, c, g, or t
  misc_feature (1359)..(1359): n is a, c, g, or t
  misc_feature (1362)..(1362): n is a, c, g, or t
  misc_feature (1389)..(1390): n is a, c, g, or t
  Probeset Number=SeqID_13971
ngctggtcaagagtgngccgcgcggtgcaatgtcgtatacgtcgtcatgacatgagagcacacagcgacgcgctgccctgcgtatcatctattcgcctcctatcgtagcatagatcaattagttgaaatactacactactctcagtattacatatccagtcatctcagcgaccgcagcgcgagtatgtatataatatctgaggtgacgcgagcagcatgactcnggctgcgtagccggagagcggcctatccttctcaccacccacacgacacatcacttactattcaacaattatgctagtatggagtgcgaccgtctccctactcgtccatgacagatcacagacaagtgtgggtgacagcagagcaagattcacgaagagatattatagcgtttgcagagagggtgtaaagagggagtgcatagcatataaatagcatgacatagtcacacagaccgtggacgaccgtgcaggtatgatgtcgtaatgtcactcatgtctacgcacccatagagtagacggactatggagngaacgacgcgcgtgttgacggacagacaatctattcactttcttgtctatatgacatatatatgtggacggggcgttcacctcatctgacgtctatatcgtgcctagtcatattcataacatacctcctcaacacacaatataaactgcacgtaactcccgccactcacgcacacacactctcactctccctccctcccagcatcggtagcctcgcgccggcgagagcggcaaacgataaagtgcacgcaggacacgagcaggggacacgcggtcgccgaaagcatacggatcatatacaacgcgcagtgtgatatagtatgtattatatgtatgctattatgtgacaacaataatctcattagtgtacatatcactatcttctttattcttctatttactctgctcatcctcatcgtattatatcatacccacaacactcggacatcatgtatatcatacacaaccatcgntctcggacatgtgtcgtatgtatntgnggtgttcatttgtgcgggcagtcgctattagtcgaccctgtatagcgagcgcgtatgcaaaccctagtgccatgtgtctctttcactcatacatcctagccatactcatccngaccggcaacatctacactacctaccctaccacacaccgtcgcggagaagtcatatagacattttaacatatcgtagagcttgtttgttgtgtgntctgtccacatacttaatcatacacttagtttcatataaacctcttacatctcactcgcccacttccacgccactccccccctctcccgccgatcactcctgcggggtcgaagatattngcnacgaaaacagaaacaaaaacacccttnnttaaa

SEQ ID NO: 4193 - DNA, 746 bp, Glycine max
  Peptide Sequence Number=SeqID_7624
  Probeset Number=SeqID_13972
ataccctatctttcagagactcttagaaaacgcctcattcaattgatctaataaagcttcataactgcgacaacaaacttttcgcctctcactaaaggatgcagtaaccccaccgtctttgcgtttctcagaatcgtacctataaatatggatgtcgacttccatggctctcaccactgcaatctacattccgttcttcactatttctctctctggaattctgtttacagcaaaagacattcacaattcctactctttcaattgcaacacgaccgagaaagtaatgacccgttctgggaagcgcaaaaagtaaaaaaaaatggaaaagctaatcagcgccgccatgctcacgaacgacaaggtagttgttttaattaaatagcgatcttgagaatattgagtggacaccttcatatttgacttttcagatgaagtttgggctgagttagtgacgtaaccgttgccaaccaacacgctggcgatgtcttcgttgtttccgaacagggacgagaggagagagaggtatatctgatggccgttgctgccgagaggtgggaaccagtggatcgccggcggagacggagtggattgtgcggctgtgttagagtttgtttagaactacgccgttaaagattgagaggacagaagacgataagatttgagtggacgacatgttctctttaatttgattttgtttaaggatatttcagaaaaagctcttaaataaaaacgtaaacaaatcaact

SEQ ID NO: 4194 - DNA, 1492 bp, Glycine max
  misc_feature (20)..(20): n is a, c, g, or t
  misc_feature (120)..(120): n is a, c, g, or t
  misc_feature (125)..(125): n is a, c, g, or t
  misc_feature (559)..(559): n is a, c, g, or t
  misc_feature (734)..(734): n is a, c, g, or t
  misc_feature (920)..(920): n is a, c, g, or t
  misc_feature (1139)..(1139): n is a, c, g, or t
  misc_feature (1292)..(1292): n is a, c, g, or t
  misc_feature (1492)..(1492): n is a, c, g, or t
  Probeset Number=SeqID_13973
cgccccccccccctcgcccnctacgcactctatcacccgctactaacggccgcgccgactccacatcaaccactctcagctacgtaatatctccaacgcactcgctcgataggcaggcgngagcncaacagcaagcgatcaatacgacgtgaaacgaagtgtctacttcgagagagtgagtgtgcctgcttatgagctccagctatcgtactctctgacactgtaggagttagtacatgactatcttcatctagaaccatacatagagcctcatcagcaccgagtattgctcgcacgatagtggacacacacacacacgcactatatcatgatctcagactacacatacacgcgagtacatcttgatgctgtatgacgctctcaacatcctctcattgatgtctattatgtcatcatagtttgagctaacaacaatcatctatacgcgtcatagtaagcatatatcatactacacataatatagtaggagcagctgctatatatatgctataactacactagaaatatcatactctaatacgccgagcccgagcgtgancagttctgagtgttaggcgtgtgtctgactggtgcgtttcctcgcatctcgcgcgtcgttaacaatcacatcataccttattctgcacgccatcctactatatgatatatttctcacgctgctcgcagcccgtattcacgtgttgcgtgtgcacatgtgtcatgtcatgctactncagccctcggtgaacaccaaccaatctaacgacttatgactactaacacgacgtctatacacagtcctatctcccctcttcactctatattctatctgtgtagacttgtagtatctccgtatgcatgattactgttctagtgatctcgtagtgcacaggcacgcgtcatccctattcatgagtgtntcacttgtaagtagagcgagacagcacataccgtccaccgtgactgacctcatcatcattatcctatgctaccttccgatcacgagcgctcagtatatcgagacgtgttcagccatagctatcagatcatggcacttatcactacattaagacgatttgcctcacgtcctctgtgtcgtgtgaaactgcctgtctgctcacagagcattgacgttctancagatctctgcctgcgtatgtgatactgctgttatatgccatctccgcgatctcagatcgcataatcgcatacgagacaagacagtattatctcctccatatattacatctccacttcacgttcgacgcgatactacgtacacacaaccagangataacagagcgatcactagtcctcaccgtagtaccttctctcatggtcgtgatccatccatatcacctctctaatatcagcgatatggcgcgcttatatccgtgcttacgaaatcgcgacgcacttccataatatcgtgtcacagtcgagcactgataccactgtctacctgtcattctacctacgagtcattcactcn

SEQ ID NO: 4195 - DNA, 602 bp, Glycine max
  Peptide Sequence Number=SeqID_7625
  Probeset Number=SeqID_13974
gttgaactcgtaattcttttgcatctttgagattctgaagagacaaagttagaaagtgactaccactctgatagcagagggggcgtcctctagggcagctttataaagctaccaattatgatcaaccttacagttcttatcaaaatccgcgtgcccatgctccaactgtgatgtgtatgattctcatagcgattcaagagacgctcgcgcttttacatcctagcctcacgattcgacagacaagcctcacggttctacatccgaagctccgcgttctcaagcgtagcatcacgcctcttcagatgcaagtctttccctcgtcgcattacgcttctcaaggcatctatcagggcagatgattcgcatggtgattcggcagcaataggactgtcatacttggaacgttgtaaaatctgttcagattgatcctcatcttccaggttccttttggacctcggggaatccacctcaagatgactagccgtcatggatgctccctcagccttggagcgcttcagtggcaaaacttcctcctcacatccagcacagcacatagctcttttgagtgtctccattttgttgagcgatccatcgatatcatg

SEQ ID NO: 4196 - DNA, 415 bp, Glycine max
  Probeset Number=SeqID_13975
agcaatggttgcagcaggagctagagtcacatatagcaggcaagatagccatctatggtttgctatagtcttgatcacttctgtggtggccacattttaccaattgtattgggattttttcaaggactgggggtttttcaatcccaaatccaaaaatccttgtctcaaagatgatctaactctaaagaataaatgcatatactacatgtctattgcatcgaatgcttttttccccccccctggcgggggggagggaatgaacctcagaccgccgcctccccaaactacgcctctacattttctgtcggccttccccgacgttattcgaccaccgccttccaacttctcccggtttcaaaattgacctcttacccaccccgcccttcttcccgcccttcacagcaaccccccctac

SEQ ID NO: 4197 - DNA, 1339 bp, Glycine max
  misc_feature (1)..(1): n is a, c, g, or t
  misc_feature (22)..(23): n is a, c, g, or t
  misc_feature (30)..(32): n is a, c, g, or t
  misc_feature (36)..(36): n is a, c, g, or t
  misc_feature (41)..(41): n is a, c, g, or t
  misc_feature (47)..(49): n is a, c, g, or t
  misc_feature (51)..(52): n is a, c, g, or t
  misc_feature (89)..(89): n is a, c, g, or t
  misc_feature (146)..(146): n is a, c, g, or t
  misc_feature (277)..(277): n is a, c, g, or t
  misc_feature (336)..(336): n is a, c, g, or t
  misc_feature (347)..(347): n is a, c, g, or t
  misc_feature (361)..(361): n is a, c, g, or t
  misc_feature (425)..(425): n is a, c, g, or t
  misc_feature (506)..(506): n is a, c, g, or t
  misc_feature (537)..(537): n is a, c, g, or t
  misc_feature (626)..(626): n is a, c, g, or t
  misc_feature (662)..(662): n is a, c, g, or t
  misc_feature (753)..(753): n is a, c, g, or t
  misc_feature (816)..(816): n is a, c, g, or t
  misc_feature (1116)..(1116): n is a, c, g, or t
  misc_feature (1339)..(1339): n is a, c, g, or t
  Peptide Sequence Number=SeqID_7626
  Probeset Number=SeqID_13976
ntttttttttttgttgtttttnnttttttnnngagnacganaggaannnanntaaggaggccgcccgcactggagacaccgcaaaaccnaccacacacatgacacaggccttctcctatatacattttagatggttctccctcgcngcagcgagaagggagagagcattgattggttgggatgtgtttatattaaccaacacctccctctcttgctctcattcctccagcgtgagtctctagcaaggagggtgttgagggtgtgtggggtgtggtgngcgatattctatatcacaatcacgacgacgcatagggggcgctgcaagtacgagcgtgngaggaggtaanagagtaaaatttgntgatgttgactcgagtgtcgttggttacttcatagcttgtggtagggtagtgaggagatgatgntaggacgacacaactatcaatcgtcatctattctagtgtacttatccgagagtcgttgcaggggagcgtgcgggcggtaanattcaaatccagaatccagtactaattcctnatccactacgagctgacaaatagtaagatgaggaagagagtcgccatcaggtctgccgctctcttctctactcgctgcctacataatcnatgtgaggaaagtgtgaagaaaggatagatataaanaacaaaatatatgaatctcagacacggcgccaacgccatggatgcaattcatctcaacatcgatacgagaacgaacgcaacagggcgaganagcgtggggagaccagcactcggactagatatgcgcgctggagctggaaagacatacataacncacccacacacaaacacactcctccacactccctccatctcttttagtgtgttatgaattcatcgcttctctccactgatactatctattacatacaatatgagtcatggtccagtcggagcgcgacgcgcaacgagtagagcagcgcgtatacacagattatagaatcacactaagagtgtcgtccccacccacctcaccgctctcccacacgcgcgcatccacacgcgacggcatccgcgatagatatgtatcttgtcgaactgcgcggcgcggcacgtcataaagatgcgagcgtgngcgggtagacgaaaaataaacagacacgacccttccacgcgcgatagtatacgagcactagagatatgtggacattccgtggttacacactcgctcgaacataatcaatcatattcaaccgccacaccgtaccctaccagctagcgcgtggcgcggcgcgcgcgcaaatacacgcgcaggttgcgttatccgtctcatactctcacgctacctcctacctcgn

SEQ ID NO: 4198 - DNA, 1064 bp, Glycine max
  Probeset Number=SeqID_13977
cacgagaccattacctagaacatcctaatcgaaaatctttttgccatgataaaatcatctctgtcacaatttagcaaagtgagacagagagagtatggcgaccacacttcattgtctctccacactccatcttcttcctcgcaccacccatcgtcctaaaactctcaactctctcaaaccagcctccaaggcgcaacctcccaagatcccagaactaccctccattcccaacgccctccagctccttaaatcatcttccctccctctcgcactcaccgcattgccctttctcatcgatccacaggatgcagcagcagctggaggacagtttgggatcctggaaggacgatcgttcgcgttgatacacccaatagtgatgggaggtttgttcgtatacactctatacgctggttacttaggttggcaatggagacgtgtgcgtaccatccaaagcgagatcaacgagctcaagaaacaggttaagccaactcctgtttctcccgatggatccacggtcgttgactcttcgtcgcctccttctgccacggagcttgagatccgacggttgacggaagagaggaaagagttggtcaaagggtcttacagagacaaacactttgacgcaggctctgttttgttagggtttggtgttttggagtctgtgtttggtggtcttaacacttatcttcgtaccggtaaactcttccccggtcctcatctctacgctggagcagggataacggtgctatgggctgctgcagctgctttggtgccggccatgcagaaagggaatgagacggcgaggaatctacacattgcgttgaacggtctcaatgttcttcttttcatttggcaaatcccaacaggttttgatatcgtccttaaggtctttgagttcaccaaatggccttaaacccttcacttgttgtggtctcttccgcttttgtttttgtctttttcttgtctttacagttctagttgttggacttgtaatgagtcttgactatatatattgcaaagtcttatgcaactttttttgtgtgtttgtaaaaaaaaaaaaaaaa

SEQ ID NO: 4199 - DNA, 457 bp, Glycine max
  Peptide Sequence Number=SeqID_7627
  Probeset Number=SeqID_13978
gacggaaggtggcttcattgagacctggaaccctaacaacaagccattccagtgtgccggtgttgccctctctcgctgcacccttaaccgcaatgcccttcgtagaccttactacaccaacggtcctcaggaaatctacatacaacaaggtaatggtctttttggcatgatattccccgtatgccctatcacttatcaagagccgcatgactctcaacaacgaggacgaagacagtggccccaagaccgttaccaataagtacatcgcttcacagagcgagagttgatcgcactgcctactggtgttgcatggttgatgtacaacaacgacaacacctctcttgttagcgtttctattattgacaccaacagctcgcactaccagctcgaccagatgcgtatgacattctatcttgctgcgatccaagtacatcatctgctaactactcaactgcac

SEQ ID NO: 4200 - DNA, 560 bp, Glycine max
  misc_feature (457)..(457): n is a, c, g, or t
  misc_feature (483)..(483): n is a, c, g, or t
  misc_feature (542)..(542): n is a, c, g, or t
  Peptide Sequence Number=SeqID_7628
  Probeset Number=SeqID_13979
aagaagatggcaagccatgcagtgtgcattcaacgtgtggcactaccgtgtttcgaagcctcgctagcgaataagagcaaaacaattagccccttttctgtgaatattgctagaaggaagagaagaagcagtggcgtgaggtgcagcctcgttgacttcatcggaggagacctggtgaagccagacatcggtcgttggcttgaggatgttgaaaagcacaaggctattgccatctacactcctcatgaaggtggatacgaaggtaggtatcttaaccgtcttaaagaacaaggctactactttcttgacatctctgctcgaggacttggtgatccagagaccacactcctcaacccctaccctgtttgccctgctcaccttgggaaacaacctatagcaaggtggtactatccaccagaagttgactacagactctctgctcttcctcctagtgccnagggacttgtggtctggatcatcgangcgaaggtcctatcaaagtctgaactccagtttctagctttgctttccttctctccgtnctagtgtcagagttattg

SEQ ID NO: 4201 - DNA, 452 bp, Glycine max
  misc_feature (379)..(381): n is a, c, g, or t
  Peptide Sequence Number=SeqID_7629
  Probeset Number=SeqID_13980
accgtcggtctctctctgtgacgctgattggtccacgataggaggctgcctctcctctccctatcccctcgctgccgctcgctcttctctgctcttccagacgccgccgccgccgcctcctcctcctcctcctgctgtagctcccacccgacgccgtcctcccagcggatccccgtcgctggcttcctgcgcccctacccctacccctaccagccgccggcttccccgaagtgctcacacgcccccctccgctcccggactcgccgtccccgtcgagtcgagcagagtcaggtgcacactggtttcccgatggccggctccgaggacgtgaggggtttggcagcatccctgggagagctacacgtggaggcatcaccannngcgggaggaaggaaccaatgggcatggcaatggtgatgctgctgctgctgctgctgcggatgatgatgttt

SEQ ID NO: 4202 - DNA, 1763 bp, Glycine max
  misc_feature (43)..(43): n is a, c, g, or t
  misc_feature (50)..(50): n is a, c, g, or t
  misc_feature (59)..(59): n is a, c, g, or t
  misc_feature (64)..(64): n is a, c, g, or t
  misc_feature (122)..(122): n is a, c, g, or t
  misc_feature (159)..(159): n is a, c, g, or t
  misc_feature (177)..(177): n is a, c, g, or t
  misc_feature (204)..(204): n is a, c, g, or t
  misc_feature (227)..(227): n is a, c, g, or t
  misc_feature (236)..(236): n is a, c, g, or t
  misc_feature (445)..(445): n is a, c, g, or t
  misc_feature (482)..(482): n is a, c, g, or t
  misc_feature (486)..(486): n is a, c, g, or t
  misc_feature (535)..(535): n is a, c, g, or t
  misc_feature (549)..(549): n is a, c, g, or t
  misc_feature (567)..(567): n is a, c, g, or t
  misc_feature (655)..(655): n is a, c, g, or t
  misc_feature (815)..(815): n is a, c, g, or t
  misc_feature (858)..(858): n is a, c, g, or t
  misc_feature (874)..(874): n is a, c, g, or t
  misc_feature (898)..(898): n is a, c, g, or t
  misc_feature (907)..(907): n is a, c, g, or t
  misc_feature (950)..(950): n is a, c, g, or t
  misc_feature (978)..(979): n is a, c, g, or t
  misc_feature (990)..(990): n is a, c, g, or t
  misc_feature (995)..(995): n is a, c, g, or t
  misc_feature (1004)..(1004): n is a, c, g, or t
  misc_feature (1023)..(1023): n is a, c, g, or t
  misc_feature (1029)..(1029): n is a, c, g, or t
  misc_feature (1042)..(1042): n is a, c, g, or t
  misc_feature (1100)..(1100): n is a, c, g, or t
  misc_feature (1156)..(1156): n is a, c, g, or t
  misc_feature (1213)..(1213): n is a, c, g, or t
  misc_feature (1247)..(1247): n is a, c, g, or t
  misc_feature (1267)..(1267): n is a, c, g, or t
  misc_feature (1289)..(1289): n is a, c, g, or t
  misc_feature (1321)..(1321): n is a, c, g, or t
  misc_feature (1325)..(1325): n is a, c, g, or t
  misc_feature (1366)..(1366): n is a, c, g, or t
  misc_feature (1371)..(1371): n is a, c, g, or t
  misc_feature (1390)..(1390): n is a, c, g, or t
  misc_feature (1433)..(1433): n is a, c, g, or t
  misc_feature (1436)..(1436): n is a, c, g, or t
  misc_feature (1449)..(1449): n is a, c, g, or t
  misc_feature (1453)..(1453): n is a, c, g, or t
  misc_feature (1456)..(1456): n is a, c, g, or t
  misc_feature (1484)..(1484): n is a, c, g, or t
  misc_feature (1488)..(1488): n is a, c, g, or t
  misc_feature (1505)..(1505): n is a, c, g, or t
  misc_feature (1510)..(1512): n is a, c, g, or t
  misc_feature (1514)..(1514): n is a, c, g, or t
  misc_feature (1517)..(1517): n is a, c, g, or t
  misc_feature (1519)..(1519): n is a, c, g, or t
  misc_feature (1534)..(1534): n is a, c, g, or t
  misc_feature (1559)..(1559): n is a, c, g, or t
  misc_feature (1568)..(1568): n is a, c, g, or t
  misc_feature (1575)..(1575): n is a, c, g, or t
  misc_feature (1578)..(1578): n is a, c, g, or t
  misc_feature (1591)..(1591): n is a, c, g, or t
  misc_feature (1597)..(1598): n is a, c, g, or t
  misc_feature (1600)..(1602): n is a, c, g, or t
  misc_feature (1624)..(1624): n is a, c, g, or t
  misc_feature (1661)..(1661): n is a, c, g, or t
  misc_feature (1663)..(1664): n is a, c, g, or t
  misc_feature (1670)..(1670): n is a, c, g, or t
  misc_feature (1690)..(1691): n is a, c, g, or t
  misc_feature (1693)..(1697): n is a, c, g, or t
  misc_feature (1699)..(1699): n is a, c, g, or t
  misc_feature (1710)..(1710): n is a, c, g, or t
  misc_feature (1712)..(1712): n is a, c, g, or t
  misc_feature (1727)..(1727): n is a, c, g, or t
  misc_feature (1742)..(1742): n is a, c, g, or t
  misc_feature (1744)..(1744): n is a, c, g, or t
  Probeset Number=SeqID_13981
ccggaaggtttgttggctccgtattatccttctcattcatgcngagatgngatcgtcantactnctacagtgtaggtatcgctacgatgctagtcgcagtctgagcggtgtcacgtatgacncttatctctgtgtcgcgtgagtgcggatgtagctctncaatatacatatagtgcntgctcgtgtgtgatgcttcgctagagncgtcatagtgcctctctcatgantgtcacatnacattcgcatcacgtcgactcgcgttcgctaccagtgtactcagtcttgttcgcgtcgcgtcagtgtgcaccacgcgcgtgtgtcgccgacatcagtgctggtcgacgcgtgtgtgtagcaggttagtgtttgagatggtcgcttgcgacgcaacatgacgtgcggtgagggcggcgcgctatcggtctgtgtcgtctcgagcaatacncactagtacatgtgtgtgtgttgccatttgtctgtantcgngttcgacgatcgccgttcttgcgtgtcagtgtgcgtgcatgtgtgcacncgagcgcacgtcgntcgactcttctacgcctnacgctgtgcgcatcacccacttacattgttcacgcgctgagtctgtagtgtgctcagtttcgggatgcttgtactgcttcactcatgngtccctccgtcatcattatccgctgtcgcacgtcgtgcgcacgcgctgtgcatgccgatcgagtctgacgtcgcgctgcggtcgctgtgactaccactctagcgtcaaatacttgctacgcgttatcgtgccatctgcctcgctcgctagtcacgctccnctctctccctcggctcgcagcggctgtatgatctcgacgtcgngcgagtgtctgagccntctctcgtcgtcgtccgtcgcgcnctcgcgtgngctgctcggatgacatcagatgcgcgtcgtgtaccacgctcanctgacacactcctcgagacgatgatctnntgtgatgcgtntgtgnctgacgagngcatgtatgagaggcgtgncgctangaatattattagnagacacttctacgcccgccacacctatgctatatagttgcagtcgcactactgcgcgngtcgctgcgccgtctcgtgcatctgtcgctcgtgcctatgctactgcctcgtactntattgacactcgctattacctgatcaatcgggtactctgtcgatgtcggcactcgtncgtgtgtcgtgctctagtgtatcatgaccgcgantcatcatctgactgtctctnggtcgtatcgcatactgcgatntcatactcttgtcggacatactgtgcctgcgnatgnttcgtcgcgtgcggttcgcccacgtgacgacatagagtgangtgcngactctcccgactagatangcgatgcgcacgtcggtgagtgagctatatattctcgcgcgtnggngcgtctcgcgcgncctntcntcgcgccgccgcggtgctgtgtgtatangagnctaagtcttccgcttcnatgtnnntntgntntcactccccccgacntatactaccctcgctagtgccgctngtgtcgtgnggtcgtngtntcgcgctgcggcnatgtgnntnnncggggcgggcggcgcccgtctnctatcgtctgctctagcagatgtcgcgtcgtacacgnannctatantctcggttagtgtgtatgtnntnnnnntntctcccgatcntnttgtgctccacagcncgcagcgcgatccancncactccctacccccggaaa

SEQ ID NO: 4203 - DNA, 1424 bp, Glycine max
  misc_feature (1)..(1): n is a, c, g, or t
  misc_feature (14)..(14): n is a, c, g, or t
  misc_feature (33)..(33): n is a, c, g, or t
  misc_feature (40)..(40): n is a, c, g, or t
  misc_feature (1070)..(1070): n is a, c, g, or t
  misc_feature (1424)..(1424): n is a, c, g, or t
  Peptide Sequence Number=SeqID_7630
  Probeset Number=SeqID_13982
nttttttttttttnttttttttctttttttttnctctttnttgtgtttactttttttctgttatatttgttgccttacatgccatattaggctgtggtgaggggtgcccacctctccgcgagagagggaggagagggggcgcggagctacgctcattctcctccacacttctacgcgcggaaaggtgtcttgctgcgatgctctgcaaaacctcagatatacagagtccgcggcgttaggcggcccatatcgtcggtttgagctgttgtcggaggagcggttgtgtctgagctcacttaatgttgtgtgctccgctgaggtcgacgggcgcgccgtcggttgtctcccacacctgctagccgccgcacagcgcgcccccccgctccctcggggagccgaccgtcaggcgatgtggagtggaagataggggacccagggacagcgaggagacggtgtaggagtggtgcacgtagcgacagttggggacctagatcgctaccagccaactcatacacgcttcccccggtgcacgcgccccggctcgccggccctgtgcttccctccaccctcgtccctttctgccgttcgagtctgccgtcacccgtcgcccacccctcttttataccccgcccttcgcgccgccattctctaatccgtcgtaataaaagctaaagggcaaaacatgatgtattctatccccgatttattcttttgtaggagcgcctcagttcaacttttctgtttacctccgtacccccaccaatgccgcgcccgacctgtacgccccccacgaccgtcgtccacccgtattggtacatcaacctcccatcttatcgccagtcgccgtcggttgcgtttgccgtctctctctccgctcgaatgtttgtgcgcgcagggagcagagggtggcggcgcgccggggggccaccctcattaccaccgccttcgagagagcccgccatctatcaaccaccccgcacacaccacccactccagctcgccgacggtgaacctccaccctccaacgcacccccctccctgcatgaacacgacaatctgtgatctcgatntgtagagatcccgtgaaggcgccgggagtgtcacagtgcagccggatgaagagtgaacatcgccaaaccatattttctccacgactctctgttcatctcaccacaaagaggtgtgttgtcttcacactcaatcacactctcttctctgtctgacgtctatattttagaacaagctggtgggagtgtattgtaagtgtgtgtgttacataagacacgtgcatgtctatatatgttgtacatactttcgtgtctctacttggtgtataccaatatttgatatgtcctacatatatagttcttataacaccacctccacctatctacagatgtgtgctacccatctctgtcttcccn

SEQ ID NO: 4204 - DNA, 1470 bp, Glycine max
  misc_feature (1)..(1): n is a, c, g, or t
  misc_feature (23)..(23): n is a, c, g, or t
  misc_feature (53)..(53): n is a, c, g, or t
  misc_feature (66)..(66): n is a, c, g, or t
  misc_feature (149)..(149): n is a, c, g, or t
  misc_feature (156)..(156): n is a, c, g, or t
  misc_feature (175)..(175): n is a, c, g, or t
  misc_feature (177)..(177): n is a, c, g, or t
  misc_feature (193)..(193): n is a, c, g, or t
  misc_feature (246)..(246): n is a, c, g, or t
  misc_feature (271)..(271): n is a, c, g, or t
  misc_feature (297)..(297): n is a, c, g, or t
  misc_feature (356)..(356): n is a, c, g, or t
  misc_feature (549)..(549): n is a, c, g, or t
  misc_feature (666)..(666): n is a, c, g, or t
  misc_feature (763)..(763): n is a, c, g, or t
  misc_feature (970)..(970): n is a, c, g, or t
  misc_feature (1069)..(1070): n is a, c, g, or t
  misc_feature (1197)..(1197): n is a, c, g, or t
  misc_feature (1241)..(1241): n is a, c, g, or t
  misc_feature (1265)..(1265): n is a, c, g, or t
  misc_feature (1313)..(1313): n is a, c, g, or t
  misc_feature (1327)..(1327): n is a, c, g, or t
  misc_feature (1341)..(1342): n is a, c, g, or t
  misc_feature (1382)..(1385): n is a, c, g, or t
  misc_feature (1387)..(1387): n is a, c, g, or t
  misc_feature (1389)..(1389): n is a, c, g, or t
  misc_feature (1391)..(1394): n is a, c, g, or t
  misc_feature (1408)..(1408): n is a, c, g, or t
  misc_feature (1430)..(1430): n is a, c, g, or t
  misc_feature (1433)..(1433): n is a, c, g, or t
  misc_feature (1438)..(1438): n is a, c, g, or t
  misc_feature (1444)..(1444): n is a, c, g, or t
  misc_feature (1449)..(1449): n is a, c, g, or t
  Probeset Number=SeqID_13983
ncctcgccgtccgctgctctcgnccgcgcctctcttccgcgcctctacgactncgcgcgcgcctgnccgcggctgcggctcgtctcgtgtgcagcgcgatgtatcgcacgcatctgctctctcccactacgtatctcatagagctcgcncctccgncacctctcacatcagtcancnccacctcacctaccgncgccactcgcggccgccgcactctaccacctcccgtgcctgtagctgtcggancataacactacacgaacgaacacancgcgcggtacgcacaacatagcaganccatcacctcccactcgagaggagataacgtggccgtccgcacaccatcgcatcccacnacctaccgtgtcagtcaggagcgagagtggcgtacactctccatgcacacgaggcagcgagcgacacaccgagcggagcgtcttcgccacgacatcactccctttctgtactcggacgcgagacgagccgcggcgctccctctgttccactcggtgagcatcaccttccaccacacccccttctagcgctggnagagaggagctctgctcccgcccctcgtctggccacaacctccttccgctcctccctcatccacaccaccactgcgccacatcgctgcacactcactctcaccacacctccactcgnctcgccggcacccacctcgaccccctctcctgagcgacctcatctctctacaccggtggaacaagagtgctcgccgtgtggttatcaacagcacatnattatgtatccctccatcttctccacccacactgctagtagtgtcccacacaccacaatccccccgcgccggccgcatgcgcgcggggcggatcaggagggcaccgcggggtgcgggcaccgcgcccagtcgtgcggccgcccccccgcgcgcatcaggcccacccgaacgatcgcattccacaccaacatcctctatcttcccagncagtctttcgtcgcgccgccggttggtctctcttcttgtgatatccactcacgctcacgtttctcacccactcattctgttcctctctccactctccgnnccgccgcttcccctcgcgatctgtgcgacgagccagtggtggggagaccgcgcgagattcgcttggtctattatggcgtgcgccggagcgggcgacagcctcacacgattatgtgtgagacgccgcncgacgcggggtgatgacgacgtaacgtgtgtgacacccgtaacnacgcccgccacccgccccgccgantgtctgcctgcttcggcacgccgtccgctgttccgccgcttctcttcntcccgcgcgccctntccctgcccgctgnngttgcgctctcggctgtccgtctaccgtgccgcgcgcccnnnnancncnnnnccccggcgcgcggngggccgcggcgcccccgctccntgngcctnccccgnaacanacacccccacccaaaaaaaac

SEQ ID NO: 4205 - DNA, 1862 bp, Glycine max
  misc_feature (1)..(1): n is a, c, g, or t
  misc_feature (10)..(10): n is a, c, g, or t
  misc_feature (24)..(24): n is a, c, g, or t
  misc_feature (67)..(67): n is a, c, g, or t
  misc_feature (99)..(99): n is a, c, g, or t
  misc_feature (103)..(104): n is a, c, g, or t
  misc_feature (119)..(119): n is a, c, g, or t
  misc_feature (150)..(151): n is a, c, g, or t
  misc_feature (155)..(155): n is a, c, g, or t
  misc_feature (160)..(160): n is a, c, g, or t
  misc_feature (163)..(163): n is a, c, g, or t
  misc_feature (165)..(165): n is a, c, g, or t
  misc_feature (168)..(168): n is a, c, g, or t
  misc_feature (174)..(174): n is a, c, g, or t
  misc_feature (177)..(177): n is a, c, g, or t
  misc_feature (185)..(185): n is a, c, g, or t
  misc_feature (276)..(276): n is a, c, g, or t
  misc_feature (304)..(304): n is a, c, g, or t
  misc_feature (317)..(317): n is a, c, g, or t
  misc_feature (374)..(374): n is a, c, g, or t
  misc_feature (385)..(385): n is a, c, g, or t
  misc_feature (400)..(400): n is a, c, g, or t
  misc_feature (444)..(444): n is a, c, g, or t
  misc_feature (493)..(493): n is a, c, g, or t
  misc_feature (523)..(523): n is a, c, g, or t
  misc_feature (536)..(536): n is a, c, g, or t
  misc_feature (585)..(585): n is a, c, g, or t
  misc_feature (649)..(649): n is a, c, g, or t
  misc_feature (651)..(651): n is a, c, g, or t
  misc_feature (658)..(658): n is a, c, g, or t
  misc_feature (691)..(691): n is a, c, g, or t
  misc_feature (740)..(740): n is a, c, g, or t
  misc_feature (784)..(784): n is a, c, g, or t
  misc_feature (992)..(992): n is a, c, g, or t
  misc_feature (1185)..(1185): n is a, c, g, or t
  misc_feature (1294)..(1294): n is a, c, g, or t
  misc_feature (1603)..(1603): n is a, c, g, or t
  misc_feature (1612)..(1612): n is a, c, g, or t
  misc_feature (1687)..(1687): n is a, c, g, or t
  misc_feature (1708)..(1708): n is a, c, g, or t
  misc_feature (1754)..(1754): n is a, c, g, or t
  misc_feature (1756)..(1756): n is a, c, g, or t
  Peptide Sequence Number=SeqID_7631
  Probeset Number=SeqID_13984
ntgatgtcgntgcctatgacagcngcagtcggctcgcatgtcgctcagtcgcacgagcctcagtaangatcacacgtctgcgtgcattcgccatcttcncgtnnacatcactcacacgnagacgtcctcgcacgcagcacgcatccgatnnacgnaccgncgnancanttactnacntatgtccngcgtgctctatatagctgccgactcatcagccagtgtgcactgctgtctgttcatgatagctcgtcatgatagctagcagcagtcgaccgnggcagtaaatacgcatgcacgtgagtgnatcacgcctgctncatgtacatgtctagtcgatgcgctcgcacggtgacgagacgtcacgatatatgagnagatcagttantatcatcccgacacnacttcagctccacgactactcgagtccaccttccgctgcgctcntcactcatcctctccgcgacgtgcagttctagctcactatgactgcgtnggcgcgcggcagctcagctagccgactcanagctagtacatanttcataatagtgagatagcgtgcgcgcggcacgcgccagcgcagagatnatacgcgcgcgtggtggagctactgcatgtccgccggcgcgacctgaatccgtgtgctgtgtcntnatgcatnatatcgtactatttcagcgcacctatgctcgantcagcgcctaccacgcacactataccgcgcgctctccgcactctacttnaccaatccgtacggcgcgcgacatcactcctagcgtgcgtcatnatgttgaagctggtgcacatgagtgcgagatcgtagcaatcatgacggatcacgacagcgagtgaacactcgcgcgatcaaactacatagactactaagattgtagccgttctgtacatctactcgtcaggcgcttattcttcgatcagagcggttctcgcgtgatcctcactactcgcgcgcatcaatctaatagattccggcgggnactctcttctatatcatcctctaccgctctctgtctttcatctctctctctcgtccgtgctgggactcacggacgatcgccatcactcatacattatagctggccgcaggattatcacacacacagacacaaccatcacactagcatcgcaggcgaagcatcagcgtgagagcggcgctcggtccgtctgtantgtcgctctcgacgttcgttcgcatatcacgcacgtcgcgtgagtgttcttcgtcgccgatccaatcgataataactatactccacgcccttcgcgcgctcctcacctncgcgcgtcgccactcccactgctcctcctcgccgactccagcgcctcttccacgcacgcgcgccccgcgccgctgctatatactgcgctgcgcgccgtctcatcctgcacagcgtatccgtaagcgcgatgcacacacagctctcctacgacgctctagcagcgcgctccccctgctctctcctcctatctctctcatcgccgctcatctcacttccaacagtcgatctcacaagcgcgtcggacagacagagatgtcgactatattttgccgcgtagcgcaagagaacaacgcatcacacataagctntactattantatacacatagctgagtttatgcgtatacgcatcgtcgtcggtcatcgacactcgcggtgagcaacacagcgctncccactctgcgctcctctccncgtctttctgttgtgcaagccagctcgcgtctgcgcggcgccgccngngcagagagcgcgcgcggcgcgtgcgctgtcatcattggtgtgttctctatgcgcccgctgcgccactcacagctctcagtgccggcgagcatactcgttcctctct

SEQ ID NO: 4206 - DNA, 1095 bp, Glycine max
  misc_feature (1)..(1): n is a, c, g, or t
  Probeset Number=SeqID_13985
ncattatcgcgttctcgttttccatagcaactgttcaccaaccagcatagcctgcgggctggttgcgcaatggcggcgggtcccttcgcgctccgcctagggccgcgcctcgcggcgccggccgtggcgagtgcgactaggggaggaggacggggaagtgaccgccctacggccagccgagcgctggtgtcaaagaagtcaaacaaggaccaccgtttgtggattaggaaagattcggctgggtcagggaagaaggctctttgtcttgttaatactgtttcaaaactaccgaatgaaagagaaactgtttatggtgcattggataggtggactgcttttgagtctgaatttccaattatagcagcggctaaagctttggagatgttgaaaaagcaaagaaaatggctacagattatccaggtaaccaagtggctgatgagtaaaggtcaggtgctgacatggacaacgtacgatacactgctgttggctctttctatggatggaagagtagaggagggtgagtcaatttggaatactatctttcacacttatacacgctcagtgtgcacgaggtggttctctcggatgatccagagtttcaccacgcgccatatttcagacaaagtgttggagatatatgctgacacggaggaattgggcgtgcgtccacacgaggatacaccacgaggagtcgggcgagcacttgcaccttcagagcaggaagataagcagaagcctgtcctcgaaaaacactcgaagaagtggaagtgcatacacttcaatggtgagcgtgttcgtgtgcggagggcagagcctttggcctagcaaacgtcttctggataggttcggatgaacaaagagagtctcctctcctggacatatgtgatagctatagttcttccgaggtcctatgcgagcatgtcaggtagaacaaggtgtggaaattgtaatgctctctagacaaatggataatatcatagtgcagggtgagagctggcattactaatgatgttggtatccaacacatgtgtaagttgtgatgtttcagacaggttgctgtcgtcttcggcaccatgtacaaaaaaaaaaaaaaaa

SEQ ID NO: 4207 - DNA, 1412 bp, Glycine max
  misc_feature (35)..(35): n is a, c, g, or t
  misc_feature (39)..(39): n is a, c, g, or t
  misc_feature (52)..(52): n is a, c, g, or t
  misc_feature (86)..(86): n is a, c, g, or t
  Peptide Sequence Number=SeqID_7632
  Probeset Number=SeqID_13986
ccgacaggcatagccgtacatagttccggcctganagtntaatcatccgacnaagcatcatcttgaatctgttgacgagagtgcantatactatactaatctactcgtagagcttgcacatgtactgcgatgtctatagccagtacagtcatctacatcactcgatgacaagtctgtgtagcagtaagcgtcacgtcatatgccaccgaagcggctgcgacagcaagagaccagtcaactcgacactaaccgccatgatcgagtgactcatgcgtcgcgcgtccagccgtactttaccacactcatcaggcgtacatataatacacagtgttagtacgatgagtacaaccagagagtgcattgtacaataaccacgtctcctagtcgtataagtatatattaagtactcagaataaacgccataagtaagcgccatagtgagaaagattcgtcgaaggaggagaatagacagattagactcacgtcagtctatccagcgctgactctagcagacgtgagctgatatatagtccactccgcaggagccaggtgcatagttgacagcttcaagtgtgcgccggacgcgcggctccgactttgtctgatcctcacgctcacgtcgagtaccggcgtcaggaagcgtcaggtatgcccgtacatatcgtacctgctaccccctcgcgtccgcgacaccatagacaagatcgattgtcatatgggcgcccgatctcgcgcgcagtgtcggtttcctgagcatcctgtagacgtatcgggtcgtttgtacaacatgtgtctgacgcccgagagccgccaggccgcgggctagcggtccgtccaatatatattaatctcatcgcatcttagaaatgctagcgttttcactgactaaacgtgtgctcgcagaacatgctgacgcccgccgcactcgtaccagacatccacgctaacaacaaaaccatctagacgcgtatgtgtagtcgaatcactgtctcgcgagacttcgtgcgcgagtgcattcgatacttacacgcgcttgtttaggacggccagaagtggatactccactatatacctcatcaagtacggtaccggcagtcggtggactgtgtgcctatacgattgtccgatgtatcctcactcttcttatcgccacctatatctggcgggtagaaaacatgctagatcactcatagatgcgagcgcggcgaaaaccaaaaagaatagacatagttgagagcatcatatttagtggggaaaagaatctagtgaaagaaaccactcctccgttgggggaaaaatctttgtgaggtgctcccggcgccgaactctccacgctatacacctgcgcagcgttgtggtcggagggatgagagtgtttatagtacgtaacataccatgtggggttgcgacaa

SEQ ID NO: 4208 - DNA, 1404 bp, Glycine max
  misc_feature (83)..(83): n is a, c, g, or t
  misc_feature (98)..(98): n is a, c, g, or t
  misc_feature (104)..(104): n is a, c, g, or t
  misc_feature (449)..(449): n is a, c, g, or t
  misc_feature (637)..(637): n is a, c, g, or t
  misc_feature (870)..(870): n is a, c, g, or t
  misc_feature (1035)..(1035): n is a, c, g, or t
  misc_feature (1229)..(1229): n is a, c, g, or t
  Probeset Number=SeqID_13987
gagcatcatgctcactactaaggctcattggtgccaaacatcaattacatacaacggtcgtctcctacttacatttttccagnattaggcgaacaaanttaccnttctgtatcttggtccccccccacagcccatcacctcctcggtctcaatatatcgtctccaacctacatcccgacccatcaattccatcactcattcattgcacgattaattatacataagtatccacattgctccgagtactcctcagctacctgaaataagaacccactgcgattaccaacataactatgtttatcccacctcacacaccacccccccctcttatcttcccgcgaccaccaccctcttctctctcgtaaggtacatctctataccacataataccacatgacaatctcacctggcctccaccctcgacatctaccccattcctctgtacacanctccttctatcaccacataccctgtctgcccacatttactcatactaccacatttctcattgatcatcttcttctccttcattgtacggttctaccatcacccgactcgcccgatatactgcactctatcatctaccattcagctattagctctccatcgtttatcgcttcattactctccaacttanacatactataatcatctcctctcactaagcactcgactattctttgcttctaaataatcttatacactatgactactccatctccttccatccgtgactcaatcttcactcccgacttatctataatcctatcttcaggacacctccctcctcatcacttactcactcttctccattagtcatcgccactgctcttatcctttccaatactccgccatctcgtgagccttgcntctgatatgccaacatccgacatctatcaactacacatcgtatcctatcacctcacttcactgctcattactccaccgctccgtccaacatatacccccctctactcccacctcacacattacctatatcactagtacgattacacaacctatcactcatacttnacctccacctccactagctcctacctataatacctcgactcactacttgcgcgccctgatttgcagacaataactcatataccactccacatccacctatcctctcagattatctatccgacctcccctcacccgcctatctcaactccagcttccgactcattcacctccacatcttagacaccctctgtatnctcatcctctcttatctaccataccatataatcttgctcacctatcagccaatatcatcaatatatttcacaagtcatatctcgccataatatttatctcatgcactatctcaggtactcacacactcatcctatatataatgtgctactcgctacgcactctcgtctatctatt

SEQ ID NO: 4209 - DNA, 1563 bp, Glycine max
  misc_feature (33)..(33): n is a, c, g, or t
  misc_feature (109)..(109): n is a, c, g, or t
  misc_feature (140)..(140): n is a, c, g, or t
  misc_feature (147)..(147): n is a, c, g, or t
  misc_feature (156)..(156): n is a, c, g, or t
  misc_feature (161)..(161): n is a, c, g, or t
  misc_feature (223)..(223): n is a, c, g, or t
  misc_feature (351)..(351): n is a, c, g, or t
  misc_feature (398)..(398): n is a, c, g, or t
  misc_feature (589)..(589): n is a, c, g, or t
  misc_feature (646)..(646): n is a, c, g, or t
  misc_feature (679)..(679): n is a, c, g, or t
  misc_feature (936)..(936): n is a, c, g, or t
  misc_feature (1097)..(1097): n is a, c, g, or t
  misc_feature (1363)..(1363): n is a, c, g, or t
  Peptide Sequence Number=SeqID_7633
  Probeset Number=SeqID_13988
ctcgatccgtgcgatgcgtcgtgccatgacgtncataacagcatcgatgagtgatcgcaataagtgactgagttactacgcgtcctcagccagcgcatgtagatcacgngagagcgtagatgtcatagcgatacacgcantcctctntcgcatcantacgnctgcggcgatagtccgcagctgcacgcactagatcaccgcgatgtgactgtctcactgtagncaggaggcatagcgtcggattgacgtgacagatgcattcatctacatacatgactgtgactgttcgcagagccagaagaaaagatcacagtcgtgacagttcactagtatcatcagcaagataaaacncgtaggtttatgcgggtgcacgcgacgagactctctcgtgcatatantcacgctcatgcgccgagaacacgcgccgcttcctccgtagtgagtacgcatgaatgtgcggcggcgtgcgcgtgccgccgtgctcgcgagcgagctatattgcgcgagtccgggtcgtgacggaaatagagagagggtacgcgcgtatatagcactatacataggcagacgcagctcatcacgtgattgngccgtgtcgcgttaggcattataatgcgttaggattatgcgctgtcgtctaattaantcgcgctgtgagcggcatctgccgttaggaacntatatcgagcatcgagaatggggaggtcttgcgtaatcacacgtgtatcgagcgctaccgcgcttcctcgacgctcgtgcgtgctctcaaacgcgcaacgctgagattcggatgcgccgagcttctggtgcaggtgggatttggtggcgccgatctcctacataaataaagccgacgtgttattaaattatttggaccgtttagcaccaatggcgccgccgacgttctcgcgccgctcgtgataatcatttccattnatacgcccatagatatagtagacgcctgtcacagtatctctgatctttcgccagaaatacgagacggcaccatggcaccgtacgtatacggcaccgcacttggcgatcatggcaacaggccagtgtgatgagctacctgcgacccgaactatacataaaangcggacatactacggaccttagtgctgctgtgctgcagacgcattgatgcgcgtccttagtctagccgaccacgtctggcgacccttgccaactacgcaaatgtgtacagcaattgagcttctccatttgattggcatattgcacccccgaattaatatttctcagctatattctgcacatagtgctccgctgcgtagcatatcgaatttcatcgcaatcgggtcggcggaacaagcatcaagtttgggtggccggtggagcaagncctagagaggatttaccgaggatccctctccgttctggcgaaaaaacattttccaataggccgcggcccccttcttcttgggaaaacacccttcctatcggggcgcccccctatacccccatttcagcaaatactatggcgggagtatctagcgtgcatatattatatcagtttcaaaataacgcgcggcgcggtctatc

SEQ ID NO: 4210 - DNA, 510 bp, Glycine max
  Probeset Number=SeqID_13989
atgagctgccgccagctgtttcaatgaaaaacggtaggaaagtcgaatgcggatcacaaactggaatcattctattgtcttcatggggacgcttcaaggattgcactgatcaattcactgatctttcttcaaactctattgatgcaaagttgaagcttactgaagataggattattactggatcaaagaatacgattatcaacctggatgcgatattacctaactgacttatccagccaatagctgaacactcatattatcctgctgaaggacttgcatttgctcatgatatgaagttcctcggaagcattgcttatgatcaaatgctaaagctatgggactaggataatatactgctagggtcaatgaacaaaaacaaattcaagtggagtgacctgatactgacgattatgagataggatcttgatcggaacaagataaataatgggcctgctgttaggagttcgaacaacttcttgtgatatttatatgacggaagagatttggagg

SEQ ID NO: 4211 - DNA, 769 bp, Glycine max
  Peptide Sequence Number=SeqID_7634
  Probeset Number=SeqID_13990
aggttagattcagaatctgttaggttcagcagctttttctcctctttgtggtttttgagctacttgtcttgcgtatatagttttagctgtatataaatgaagaagcagattatggatgagtctgagaatttgtgtttcaagaagtcactgatgtcgcctcctcctcctccaccgcttcctccatctccaggatatggatcaagaaagatcgatggagacagcataaccaatatacagatcaagaagttctggaggcagaagcagatcattgaagaggagcatctctttgctgctattaaggctgcagctcgtgtcagagcccgcaatctctctgatgaggactacaaacgctttgaagaaagcttagacatccaggaccctgaaatcgaagctcatgaggggattaaagactggtggatgaagagcaagttcgcatacttgaaccagcctgctcttggatcttctgattcactgaagagaaaaaggttttcgtctgatgtaccaaactatttctccttcaagccttgcattcctctctatgcaacgtcgctcaatgtcttttagatatgagcaaaatctctttcaagatcaattgtcttgtgtatatatgtctgtctacatatatgtgtgtttgtgtctatgtacattcatgtgttactgttcccatgttaatggatatggactttattgtgtgattgtcgatttgtaactattgaataaaattcaatattagtatggaacattaatttcttcttgttccatagatgat

SEQ ID NO: 4212 - DNA, 1369 bp, Glycine max
  misc_feature (1)..(1): n is a, c, g, or t
  misc_feature (115)..(115): n is a, c, g, or t
  misc_feature (611)..(611): n is a, c, g, or t
  misc_feature (946)..(946): n is a, c, g, or t
  misc_feature (987)..(987): n is a, c, g, or t
  misc_feature (1009)..(1009): n is a, c, g, or t
  misc_feature (1091)..(1091): n is a, c, g, or t
  misc_feature (1097)..(1097): n is a, c, g, or t
  misc_feature (1190)..(1190): n is a, c, g, or t
  misc_feature (1220)..(1220): n is a, c, g, or t
  misc_feature (1264)..(1264): n is a, c, g, or t
  misc_feature (1285)..(1285): n is a, c, g, or t
  misc_feature (1354)..(1354): n is a, c, g, or t
  misc_feature (1356)..(1356): n is a, c, g, or t
  misc_feature (1369)..(1369): n is a, c, g, or t
  Peptide Sequence Number=SeqID_7635
  Probeset Number=SeqID_13991
ngcggaatggcaacacatgtatagtacgcttatgacgagacgagactgtgatagtgaccaatggtcactatcagagtctcatcttctgttctaagacagacagtatacagggatnccacatatatgcgtcttataaattattgtttatattgtattctaatcttatatctttcttgttatgttcttctcataaccatatgccatgagtatggaactacaattattacttttcttgctttgtcttcatttctattatgtgttattctatatatatttcattatttctctctctctttctcttctcttctcttctctttatatccttgccttgtattgtctcttgctatgtatatatgtcttgtccttcgcttgtcgtgaagtgctctttcacttgctgtgatcctaatgcacagcaccgcgctttgcgagagtcacgaccaatcaccgccacccaccaccctctcccaacaccggcgggcttactggcaggcgagcgaagcgtgccacgaacgaatccgggccaaggacaaaaacgacaggcgcctcccaccacacacattccgatcccgctcccaccccccccacccacgcaccccaacacgaaggcggantaaccacaaccacaggactacgcacccccgccagcaccgcagagagcccacaccccaacacacctgggccccgcaaaaacaaaaccacaagcaacccacaccgcgccctcgcgccagaggcacagcgggcattcccaggcagaggagaagggcgccacaacacggcaccctcaccaccaaaacgcaccagaacccaaggcccaccgccctcgacaacaatcgccttgaagacaaggccaggcacgcccaccacacggtccacaacagcgaacaccagcacgcgaaactcgaagtacggagaacgccacgcacccacacacacaccacgcggacgnggatgagaagagatagccagccactattccaccactacgancacgcacacgcagacaccaacncacacggcaccaaaagaagaagtaggacacacaacccacacacacggcgcgaagagcgagctacggcgcgctccgcgcacgnagctgncgacgacgacgcgacccgcgccgcgcctgtatatccacagttgtacgacaaccgacggccacagcacgagcacaacgacatagaggtcagcanacacgcgaacgccgcccatcacagagcggnacacagatctcagccacgcgactcgcccgatggcacagccgagngacgcgcgagcacccacatgncgacagcacacgctacacgacgcgcgcacttgcacgcgagccactatgacgcacgcgccagacccccgncnacagcacacgacn

SEQ ID NO: 4213 - DNA, 512 bp, Glycine max
  Peptide Sequence Number=SeqID_7636
  Probeset Number=SeqID_13992
aagaaagaagcggaacacgcacagaaggggaaggggaagagaggggcacaccacaccacaccaccaaagccagaccgccagaccgagcccgcgcctgcctccgacgaggcgagccaagccaagcccagatcgaatcccccccctcccgaatccatggacggatcccactcccacgcggccggaggcggcgaggggacgcagaggacgctgaacccctatgtgaccggtaactcggtgattgcaatgaaatacaaggatggtgtgatcatggcatgtgacactggagcctcctatgggtcaactctgcgatacaagagcgtggagcgtatcaaggaggttggtaagcatagtcttattggaggggagtgggggagttcagtgatttccaggagattctgcgctatctggatgaactgactctgaatgatcatatgtgggatgatggcaactcattgggccccaaggaaatccatgcatacctgacaagggtgatgtacaaccggcgcaataag

SEQ ID NO: 4214 - DNA, 464 bp, Glycine max
  misc_feature (454)..(454): n is a, c, g, or t
  misc_feature (457)..(457): n is a, c, g, or t
  Peptide Sequence Number=SeqID_7637
  Probeset Number=SeqID_13993
ctgctgcagccgtattcgtcttttgagataacaaggacttactgtttattttccggtctttaaagtcattttaaaagagacaccatgtcaggtgaagaggctgctcccgttgttgttcctcccgttgctgagccagcggccatcatccctgaggacatggacttgttgaccgcattggagttgactcttaggaaagctcgtgctcacggtggtgttgttcgtggtctccatgagagcgctaagcttattgagaagcgtgtggctcagctctgtgtcttggctgaagattgcaaccagcctgattacgtgaagcttgttaaggctctctgcgctgatcacaacatcaacttgcttacggttccaagtgccaagaccctcggcgaatgggctggtctctgtaagattgactctgagggtaatgccaggaaggttgttggatgctcatgtcttgtantcnaggacta

SEQ ID NO: 4215 - DNA, 748 bp, Glycine max
  misc_feature (689)..(689): n is a, c, g, or t
  Peptide Sequence Number=SeqID_7638
  Probeset Number=SeqID_13994
taaaattaccacggcgccctgtccgttttatatatgctgcactaacctcaacttaaatcgcgatgtggtttgaagataataatcaaatgactttttctaatgagattttaaagcagggcaatccatgaaggcaacacttcgatacttagcaggccttgctgggcgaagtggtttcggctcaaattcaacagctgagcaagtcagtgaagattgcttttccttgctcccttcaaatctaaccgatctcatcactggtgcgacttctggtaatggagctgaaccagttagagtgttagcaaagagaggagtgagggtagtgattggtgccagggacttgagaaaggcaaaggaagtgagagagaaaatccaaaaggggagtcctcatgctgaggttgatctgttggagattgatcttagctcttttgcttctgtacagagattttgttgcttatttatagctttggaactgccccttaatattctcataaacaacgcatgaatgtactctcaaagcatggagttctccgaagagaaaattgaaatgacatttgctaccaattacctctaacatactttgctatcgaaaatgctactagctactataatagatacagcccagtagacaggcattcaaatagtggagtatcgacggttcttctgtgattcatagctgggtgaaaagatcttgntttttctttcaacgacatgctctgtggaaaaaaatacaatggcacacgcgcatatgctc

SEQ ID NO: 4216 - DNA, 1695 bp, Glycine max
  misc_feature (27)..(27): n is a, c, g, or t
  misc_feature (117)..(117): n is a, c, g, or t
  misc_feature (122)..(122): n is a, c, g, or t
  misc_feature (126)..(126): n is a, c, g, or t
  misc_feature (154)..(154): n is a, c, g, or t
  misc_feature (185)..(185): n is a, c, g, or t
  misc_feature (199)..(199): n is a, c, g, or t
  misc_feature (277)..(277): n is a, c, g, or t
  misc_feature (300)..(300): n is a, c, g, or t
  misc_feature (345)..(345): n is a, c, g, or t
  misc_feature (364)..(364): n is a, c, g, or t
  misc_feature (418)..(418): n is a, c, g, or t
  misc_feature (438)..(438): n is a, c, g, or t
  misc_feature (521)..(521): n is a, c, g, or t
  misc_feature (523)..(523): n is a, c, g, or t
  misc_feature (569)..(569): n is a, c, g, or t
  misc_feature (632)..(632): n is a, c, g, or t
  misc_feature (663)..(663): n is a, c, g, or t
  misc_feature (821)..(821): n is a, c, g, or t
  misc_feature (988)..(988): n is a, c, g, or t
  misc_feature (1059)..(1059): n is a, c, g, or t
  misc_feature (1103)..(1103): n is a, c, g, or t
  misc_feature (1117)..(1117): n is a, c, g, or t
  misc_feature (1154)..(1154): n is a, c, g, or t
  misc_feature (1505)..(1505): n is a, c, g, or t
  Peptide Sequence Number=SeqID_7639
  Probeset Number=SeqID_13995
catcgagcgagagggcataatacgatntgagcagcctgtctacgcagtgactacgagatagcatatacacatattcagacaccgtacatgtgcgcgcggtgcgacaatacgtcagcnggcgnatantatgacgtgtgtgcagtagggtcagcgnctatccgacgacgcgacgagacgcgtgcagncgcacgtatcaagnttagatcacgtggctattatatataatacagatcacgcgtaactagatatcgcaccgcgcgcgccgcgcgcgatatantcatgacataacatcgacttcgngctacgtgagtaatacggagtatgaatagtcagtctagagatcantatgatggttatacgagtngcgctcggtcgtgaacgctgcgcaatgtgaattatatctggggcatagtcgcantggaagaagctcgctacggntgagatacgtgtcgcgtgcgcgattcacagagaatgatcaagggtatcgtacatctaccacgtatttgccaggcactatcctntntctgtctttatcacagcgcgaatataactatctattcatgtgcacncacgcagacaatcgtaacgtcggatagaaatgaagagcgacacgcaggagcgccacacgcggnctgtgattatagaacgtgtccagactaagtntgtgtgcgcgtgtggtggggggtatataaagatgtagaaaaacgtacacgagaagacaagtcgcacgagtgcgtagcacacatactaccactccaaggcgtcaacacatctattagccaacgcgccgtcgcgatcgcacttttcaccaatagacatanggcgttattggtggttgcaaggagtgtctaacattcgctcagcccacgcgggggtgtcagtggaatcagtgtcgcacctggcgtcgcgccgcaaccgcgtcacagccgtccgaacgccacatcaccaattcactatcgcattcggtgagtgtatgttcgaatgcggnggactcatgatgacgaagaagcatgagcatcatatatagcatcataccgattgagatcgcggttcagactntattactcgttgcatactgagagcgacgatagtcacgtttatanttatgcatacagtngaccagcgaccgcgagtgttgttatagatatataatnctaccaccgccatcactaacgcaagcagcgacgctgcttcggcgtgtggacatgtcacacgtatccacacaagcgcagacgacgccgctcttcagtatgacagactccgattccattaagcgtcggcgctacagttagacgcgcatcaggtcatgcatcgatgacaagcgcgactagccaaccgatgcgtcgcgccgtgatggtcatcgcagcgcgcgaccgtcctcataccgtgagtatgccgaatgtgtgcgtcgtgagtggggttgttgtttttatgtaatatatatataaataacgctatgagctatactgcagcagtagacgaccaagtgcatatccgcttcttcncatcataatcgcgagcctattactatggagttatatgtaaatactacactaataaatatctttctccgtgccagcgctgcaccgaatcgagcaggtggagcacagtcaatctttcacttgcacatgatctagtattagtcgattacatatctggtaataatatgtagtattcgtgtgggtatgcctcctc

SEQ ID NO: 4217 - DNA, 1416 bp, Glycine max
  misc_feature (38)..(38): n is a, c, g, or t
  misc_feature (40)..(40): n is a, c, g, or t
  misc_feature (104)..(104): n is a, c, g, or t
  misc_feature (398)..(398): n is a, c, g, or t
  misc_feature (443)..(443): n is a, c, g, or t
  misc_feature (837)..(837): n is a, c, g, or t
  misc_feature (843)..(843): n is a, c, g, or t
  misc_feature (885)..(885): n is a, c, g, or t
  misc_feature (1076)..(1076): n is a, c, g, or t
  misc_feature (1126)..(1126): n is a, c, g, or t
  misc_feature (1310)..(1310): n is a, c, g, or t
  misc_feature (1321)..(1321): n is a, c, g, or t
  Probeset Number=SeqID_13996
ccgcatctcgtgcgtgttgtcgatgagagacgacgcgngnggcactacagcgtgccacgtgtcgtaggacagcgcgcgcgtagtgttatatatatagcgcagcngacatagatagaggacagctgtgcgagtgtgtgtgagttgtattatgcgttctccacagatatagtagaggtcttctctttcataagtagattactatgtctatgcttaataagctgcgtgcgagtgtgtagcgagtaacgcgtgcgagaagctactgagtgagtaagtgtgcgtgcgctgtgcttcatcgatggttcgtggcgtggagaggatagcgcgtgaggcagagacgcgagatagggtgagttcggagagccgactcagcgttagcgatcagcatcgatagtagcgtncgatagaataggtaatggtagcacatagccatcctgagaatatgnatgcgagagtagagagatgagcgtgcatgcacccactggcatctgtctcgaggcgagcctagagtgtagtacagaggcagcgacggacacagagcgccggagatatagtgagaagtataagacgagagcatcgcagctcatgatactctctccctcattaccatctcgtgcgcgtgggtggtgtgcgcgcgagcacatatctcgagccatcttacttactaccatcatctcgctcggctcgcacgcggagtagcgcacctatatgaagcaatgaggtcaacgtccattgacgtgacacacgctcgcgctatgagacaacgagcgccacgcgaacaccctcacgcttacgcgggggcggccgagcaggaccgacgaccgcccacccgaccatcancttatnaaggtatattgtcaatctcgaactgacacgatctttgaggtngcggcgtatctgtagacatccggttgtatcaggcgcgcgccgcaaggtgcgtcggaacaacaccgggcggtgcggggccccagcctgccgctgccccgatcgaggcacgacgctcgcccacacgcggcgatctttgttcgagcggtgggcagtagagggcggcggctagtacacagaggacaaggggaaanaagatagaatatcaaaggcacacacacacaaaaaagacattgcaatctanatatgggtatttaccaacaacagaatatgatatggataagatacaaatacaagttggatagtcgattacagaacataagagatggataggaaggagtaaatagatccatacttcacccagtctcaccctccaccacctcggcaggcgagcgccgcttcagattctcaacgcacgacaccacacntaacccaccanaacacacgcacagagagaggagagagacacagcgacacccccacatatcgccaaccacctccgccacatcatccaaacagagtggggggcgcacc

SEQ ID NO: 4218 - DNA, 1368 bp, Glycine max
  misc_feature (1359)..(1368): n is a, c, g, or t
  Peptide Sequence Number=SeqID_7640
  Probeset Number=SeqID_13997
ccacgcgtccgataagattgggataacatttgagaaaaaacagcagcagagaagtcaatttgataaagaagatgtagcaaattagcacacgtgatatggtggcatgaaaagctaacattaactggtaactgcacccaaagacagtggacacaacccaacatttctgttgtgtgcgccaatcatggagacgccaagtgcatgctgggacaactgggtcggagaggcgctcgagaccctttactctctcaaagtccttcgatctctcagacccatttgcctccgcagtagccagcctcgagaattcggggcggacgatgatgcgttccaagtgttcgacgaaatgcagcactgggaccggtcttctgtcgaagtggaaattgctgaaaccacgtttagtagatggatgcatgacacccctagttctggtgatgagattgtttgtagtgcaacaggtggtgatggtgaagcaggggcatcttatgagaagtttaaaaaattaattttgttttctggaaatgattatctaggcctgagttcccatccaactattggaaaggctgttgcaaaggctgcccaagaacatggtatgggaccaaggggttctgctcttatttgtggatataccaattatcataggttacttgagtcaagcctggcagatttgaaaaagttaaaagagggtttgctgccaatatggccttgatgacagcaataggaagtatcggtactctcttagctgggaatagcataccttcagaggatgaaaagattgctgtcttttctgatgcattaaatcatgcatcaataattgatggcattcgtctcactgagcggcagaaaagtgttaaggtgtatgtgtatagacattgtgacatgtcccacctcaatatgctggtatctaatggcggattggggaagaaagttgtggggactgacagcctttgtagcatggatggagattatgcacctatggttgagctagcagaccttcgcaagaggcatggctttttgttagtcattgatgatgcccatggaacatttgtttgtggcaaaaatggtggtggtgttgctgaggaattcaactgtgagaaggatgtagacatatgcattgggtcactaactaaaagctgctggctgtcatggaagatttatagcatgcacggtaagtatttgagtgcacttgctcctggaaatagtttctgcgcaacattggtacaaaacattaatgtcggaatgaattacccaagaatttcgctattctgatgaatctttatgcccaaaagggggaactattaattacagtcaagaggtcgggcattcatatttttgcacggctgccactttatccagttgcctgcnnnnnnnnnn

SEQ ID NO: 4219 - DNA, 1408 bp, Glycine max
  misc_feature (42)..(42): n is a, c, g, or t
  misc_feature (227)..(227): n is a, c, g, or t
  misc_feature (341)..(342): n is a, c, g, or t
  misc_feature (954)..(954): n is a, c, g, or t
  misc_feature (1105)..(1105): n is a, c, g, or t
  misc_feature (1336)..(1336): n is a, c, g, or t
  misc_feature (1346)..(1346): n is a, c, g, or t
  misc_feature (1355)..(1355): n is a, c, g, or t
  misc_feature (1358)..(1358): n is a, c, g, or t
  misc_feature (1368)..(1368): n is a, c, g, or t
  misc_feature (1374)..(1374): n is a, c, g, or t
  misc_feature (1377)..(1381): n is a, c, g, or t
  misc_feature (1391)..(1396): n is a, c, g, or t
  Peptide Sequence Number=SeqID_7641
  Probeset Number=SeqID_13998
ctatcacgtcttctcgcgcacgctctcgtgctatatatgctnctgcgtacttttgatgcattccgtcagtacgttgtactgcgcatcgtaccgtgcgattattgcagctgatatatcgtagaagtcacgtcaccatactcgtatatcacatgttatgcagttctattcacgtgcgtactcactcgttatctattggatcttctcatcgtgtaccgtgtcccgcagantatgtctcgccgggtcgtgcggcgcgcgcggcaggcaaggatggcgatcagtgtgtcatacagtgacacgcacaaagcgcccatgctggtatcgtctatctcgctcacactgannctacaccagccatcgctgtctcgtattgtccgatagatatcgtctgagcccgcactaccaaggtgactactgcgagagtctatatgtcctcagccatgcccgcgatcgatcttggtgacgaaattcgaacatatcagagagagcatcacgacaccacaactcatctcatagctagatactcacactacagcgagcatcaacatatcatagaccatatgcgtcgcatgcacgtggcgctgctgcaccgtgtccctctgccggcaccatccctctctcattattccggatcgtctatactaattatcgtatatcggcaattatagtatgtagctgtgctcattattgtctgctttctctattcatagacgggtcagtagctatacatacacctgtcaactcctgaacggcgacaacgacatatgaggggtggcgccagcgacggggctggtgcgttcgcgagcatgttctcatacacacaccacactcccacacactcatctgtcccctgtcctcttccgtgtcacagttgtactatatgtagaggtgtgcgtgtggttgttgtggtgtgttgcgtatctattcggggggacgacagtgtatgatggtgtgtcnacgtgtggttgcgtttctcctttgtccccttctcgttatgcgtggccggccacttccccgtcgcgccttgtcggtcgccctgcgttctcacacctcatcttcgcccagtctctctccgctgcaactttgcgcgatccactgcatgaacatntatacagcaacacggcgagtcagcacaaaagatcgtcgaacgacgtatccagacaccagacacataattattatacatcaatacacgaacataagagcaggagaaaaagatcacacactcgctactaccactatctaactcgcctcctcgggcgtccgcccgcgcctcagcaccgccatcctctgtagcgtgtgttggtgtgttaagcgttatagagtgaatcgttttctnttcgttgtantttctcttnttnacttcccctncatccnttnnnnnaaaaaaaaannnnnnaaaaaactacca

SEQ ID NO: 4220 - DNA, 574 bp, Glycine max
  misc_feature (341)..(341): n is a, c, g, or t
  misc_feature (439)..(439): n is a, c, g, or t
  misc_feature (500)..(500): n is a, c, g, or t
  Probeset Number=SeqID_13999
tttcccagcgtcaacaagccctgctggcagaacgacaacatctttcagaccttttggtcaatattcttgcgataggaaaaatttactggagagaaaatggcccctaagcaacgtatgaggctagccaacgagaaggcatcgaagaatgtcaccctccgcggcaatgtgccaaaatcaacgaaaccccaggacgacaagtaccctgtaggtccatggctccttgctctcttcatttttgtcgctgtggatcagcaatcttccaaattattcaagagtatcagagcagcggcagtagtctaataacagatctatcttcatgccacaacaatctaatgaattgnattattgactgatgcttatttatagaccactgagtgggttgaattgtacatacaaacgttacatattgggcacagcaggggttttaggatttcattgnattccttctatgaccattccaatcaaagaaaagaaatgaaattatttcaatcaccatctgnatttgacaaatgaaactttttaatgaattaataaaaaatgatgatttttggttcaaaaaaaaaaaaaaaaaaaa

SEQ ID NO: 4221 - DNA, 1369 bp, Glycine max
  misc_feature (55)..(55): n is a, c, g, or t
  misc_feature (65)..(65): n is a, c, g, or t
  misc_feature (1131)..(1131): n is a, c, g, or t
  misc_feature (1232)..(1232): n is a, c, g, or t
  Peptide Sequence Number=SeqID_7642
  Probeset Number=SeqID_14000
tgatggtcgccccctcctgtcgcgcgtgtacgcgcccgatgctttatcctatctntatcgccganctgcgccccacatgcgcggtgcgggggcgcctctccctttttgttttttctcctctataatcgcctccctcctcctctacccctcgccgtttcctcggccttgttttcatgcgttctctccttacccctgctgctgtcaccctatgctccactcatattatgtagccgcgcccgtcgcgtgatgtacacgtctctctgctttttaggtggttagtgcgtagctcgccgtttgcagtacgcgtcgttgacgtcgctgcctctgcccgccctctttcttttgtgattttcgctagcgtccgcgcctttcctctctctctgctttatctctccccgccgcgcccccctctcccctctatcgtttttttgctacgcgactgtgccgggagcgcgcctgggtgatgtgccacccattatacgcggcgttcgtcccgctttatttatatatttggtagcgtggtcggcggctggggtactcttctccctcttatatttctttcttcgtttctctccctccctcgcgtccccgcgtaatcgttatttcgttcagacgtgttgtatgtctcacgagtagacggcgcgcgcaccacgtccgctttatacttacttgatcctaacccacctcattattttctcgcacgtctaccttcgtgttgcggcatcgcgtgctgtcttccgccgctctttttttattatctcctctcgccggcgccgcgcagctattcgtcccatccacgcgctctctccgccctgttatttcgccgtctgtcccggctccgtgcctccccctgttcgcctctctcctctccgtcaccggttgttttcccgatcgtgtgttttgttgtgttctcgtgtcacgtcgtctcggtcctcgctctgccgcggtaatatatacgtagtccgctactactataacgtcctatgtggttcgctgagccttgcacatctatattcacgtgtttagttgaagtgacgctgcctcacttctctgcgctgctgactcgctacttttatgttgtcgcacgcctgtgcgcgcctgacgctgtaatcgttttgtgtacgcgtgcgngcgatgcactctccttcttatttgcctcgccgcgatgtatcagaccccgctttcgtcgcatgcgtgccgcggttgtggtcgtctcattctttctttttgcnttgtcttctcgccttcctgcagccgcagccttgctttcgtgcttctctttccacctataccctaccattattcgctcgttacatgcgtcgcgccgccttcgtggtgctgttggcggcgccgaacgacgctctcatag

SEQ ID NO: 4222 - DNA, 876 bp, Glycine max
  misc_feature (862)..(876): n is a, c, g, or t
  Probeset Number=SeqID_14001
ttttttttttttttttgcgtctaaatcagctgttttttcgaaggaattccgtgttcaaatgccaaatagtactagacaggtaggataaatagctaagctgagctcaaccattccaaactactcgcgcagtacaaacggaagaaacaaaggaattggttggatgggtctctttccaggtctgaccaggtgggcagcaagcaacataaagaaaggaaagggaacatgcttgccctggaagccctccctcccctccccggttatgtcagtctctgctatctttgggtacatcttcttgcttggttggtagagtgatgatcagtagcagaatagcagtcaatggatcaaatctgctagcttagaggaatgagtcttgacgactggaccaatcaccaatgtaagcagagaatggcaatggcggggtggttcagatgcccatcgacagcatcgcctgggactcccagtattctttggattgcttcaccatctccgtccgctcctcgcgcaggctgcatctccagtaatctttgcaccttgttttgatgagcaagtcgagctcgttcatatgcacggcatgaagcaaacataccaacctctcggcatacaggaaacttgccctctggaggcgcgcctccctacccccctggaaaatgtacacggacgcaccaccccatgcccagccttttgcaaaaaaggtgacccccacttagccgcatatggattgaaccaggcgccccacccaaattggaaaagttagactggaggcccctactttgcatagttctaaaacggcgccaatggcctactggtgcggggggtccttgcctcaggtcacaaaaaaaatccttggaaagaacccctggcnnnnnnnnnnnnnnn

SEQ ID NO: 4223 - DNA, 1516 bp, Glycine max
  Peptide Sequence Number=SeqID_7643
  Probeset Number=SeqID_14002
aaaaattttaattatcaaaaggaagagagataatcatggaaagtgattataggattggtgatctgcaaaaactctttgaattcatggtttcattcttcaataatgaattacaaaagggcaaagagcttgacattctagagcaggacaagttaattgattgcttaagaggaaaaattccacgtcactcttttcgattcttggagcctgttgtgggcaaagaagatgagagctcaaaaactcgcattcattacagaaactttatgcgatcaaattttgaagcaagtaatccggatcattctgatagaagagaacaattcgatgatcggtttaaagtttctgacaaagaaggagtagaccttgtcaagaaacaagtatacaacctcgacttaaaaatagagaaatcactttatagaaaactccatctaaaaaataatcatttccctttcagctttaaaaattatagggaatatttagaaacaagacaaaatctcaacgccgaaaatctcaatcttcctactcatttgcagggagagcaagttggatatttgtcttcttacaaaggggacattttgctttctacaacctgtaagatatcaagaaatagtggaaaaatctcagacttggttggtatttctctcaacctttctgtggggttaagctacaaagcaatccaagaattctttagatcaaatccaacatgtttcgaagaatttatcaaaatcttcccagctattctaagaggtatgtggcattttgatgctcttgtcgaccaaaggaataaccatctatttgcacagcttgctgaacttcttttttacactgaaggcgctcgttatttgacatcaatagctcacataattatgtggctaatcactgaatattacagtgaaaggaccccacagaatagaactcttctgaatctgccattttccttagaagaaataatgcctgtattacgatatgtccgtggtcagcatacttatacaaatgaaaatatccattacttctatgattacaatttggggttggacatgaagagtgaactgttgagtgaatacctaaagaaatgctcaaatcttcaaaacctctattttcgaataattaaggagaaatttaattttcacgaagatgataattacacctttttaaaacttttattaatacatttgttcttttcaaaagcccctttctttgaaaacattactcctgaacctaaaaaataaacagattacacgaactgctcactcaccaataaatattaaggtatctctctatggagaaagcaaatcagaaaagaagtgagacctcagaattgtcatccaaaagcctattaaaaagacaagaacaaagtaagtttctacttgatagcaaggaagttgttcaagtacttgagtatatttttgaagaggatatgtttgagcgagacagatttcacgaaaattggtggtcgcttgtgcggaaaccaaaaaattttgaaatgggactggctttagtcgaaggttgcttaaaaaaactt

SEQ ID NO: 4224 - DNA, 1410 bp, Glycine max
  misc_feature (639)..(639): n is a, c, g, or t
  misc_feature (1273)..(1273): n is a, c, g, or t
  misc_feature (1279)..(1279): n is a, c, g, or t
  misc_feature (1335)..(1335): n is a, c, g, or t
  Probeset Number=SeqID_14003
gctctcctgctcctgcccccccctgccccctccacccctccctcctaccatggcattgctttgtggtgaccatcttaactattagcgaacctctcccttcttttttgttaatattcaataatttatttttttacatacgagcagcactcaacttacgaattgcatagagcacaccagtccatcgctccaccaccgccaccagccagactcactatacagatgagaaagaataaatagtatagttacatataccttcttatcttcacataaaagctaaagtaatcaattatagagataacacatagaaatgagtaagaggggacttgagctacaacacatctattacgatatcccaactctcgcgccgcttccacctgccactgaagcaccactgatcaagatcaaaatgatgaaataatctcgacagacagatgaaaataattatcttactataattagctgaactgaataagtataatcgtacgcaccacaccaccattctacacaagtatcaatcatgactccatacgaatatgtaccgtatcctcatatcccatactctctacttatcccacctccgctctcagcgctcggtctcctatcgtcggtcatgatggtggctcgagaggtagaggattnttacgtggagtcatacatggtcacctccaaatcttgattacctcactattgcagactgaatatgtcgctgcactcttaggagagcgctggaatttatatgtactgcttaagtatacgcttgacttttcctgcatcgacacaagatgtgtataacaaactcatcggcacaggactgtgcgttctcgttagtgtgctatttatctgtgctcactatctaaatgctaacttgtcacctctcccgcgtcgtcgatcagcttctatagaatcacgtgttgcctcagtacttctgtctcagatatgcttgtatctctccgtcatctttattctctctcatcactgactataatctacttatacgatactatatctctcagcttcgtggtggtatgtacgatcacagatcgactgcgttacctctaacattcaactcttgatctgtatataatatcataaatatacacatcaatagatatgataataatgatagatcacgtctgtgatacgctgtgtaagtagtgctaggtgcctcaatatactctcgtcatcactactgtctcatcgactatgcgattataagaaaacactaaacgttaataatatatatactatcattatagtcgtatatgtaatacanccacgntgtatctgtaacctcttctctgtgagttactcaatacgtattgatgtgatattctnatattcagtgattgagcattactcatatattacataacatacactgtcatatcgttcttagtatactacctcatg

SEQ ID NO: 4225 - DNA, 1751 bp, Glycine max
  misc_feature (26)..(26): n is a, c, g, or t
  misc_feature (74)..(74): n is a, c, g, or t
  misc_feature (80)..(80): n is a, c, g, or t
  misc_feature (93)..(93): n is a, c, g, or t
  misc_feature (144)..(144): n is a, c, g, or t
  misc_feature (205)..(205): n is a, c, g, or t
  misc_feature (210)..(210): n is a, c, g, or t
  misc_feature (242)..(242): n is a, c, g, or t
  misc_feature (251)..(251): n is a, c, g, or t
  misc_feature (284)..(284): n is a, c, g, or t
  misc_feature (319)..(319): n is a, c, g, or t
  misc_feature (339)..(339): n is a, c, g, or t
  misc_feature (383)..(383): n is a, c, g, or t
  misc_feature (394)..(394): n is a, c, g, or t
  misc_feature (404)..(404): n is a, c, g, or t
  misc_feature (535)..(535): n is a, c, g, or t
  misc_feature (773)..(773): n is a, c, g, or t
  misc_feature (781)..(781): n is a, c, g, or t
  misc_feature (916)..(916): n is a, c, g, or t
  misc_feature (1072)..(1072): n is a, c, g, or t
  misc_feature (1109)..(1109): n is a, c, g, or t
  misc_feature (1160)..(1160): n is a, c, g, or t
  misc_feature (1468)..(1468): n is a, c, g, or t
  misc_feature (1541)..(1541): n is a, c, g, or t
  misc_feature (1543)..(1543): n is a, c, g, or t
  misc_feature (1553)..(1553): n is a, c, g, or t
  Peptide Sequence Number=SeqID_7652
  Probeset Number=SeqID_14004
ccgcagctcacgcagtcttcgtgctngtatcagctcttctattccatacttgtgtgtcgtgttgtatacttcanttcgancactatcgtctcngttctactctagtgtgttatatcactcacgtaacatagcgcgctcacgcantctgttgttcatatactgcgacgtatcaatgctcgacacgctatgttgatcagacactatnatganctatgcggttcactgtctacgtagtcacacangcatctcanatacatctccattactcatgccacagtctgttntctgtacgtttttcacatgcgacatagctcgcgcngcgtcgcctcagatacatgngtagtaccgtgagcgaactatataactatttgctgtctataatnatgctcacganaggtttcgcngcacgctcgcacgtcttgtaatctgtatgcacatagtagcttttgcacaagacacaacataactgctatacgagtagtgcggatataaatactgctgagcacgtgctgtagaacgtgagtgtagagtacancactacttcttccacgcactattccgcaccgcaggcgaacacgatacatgtatgtgtctagagcgtgctattatatatatcggtggttcgatatatatcacgcgccttcatctacggtgtacacgactgatcgtacgtatcggattcgatcgtgtgtcgcggtgatgtgttattgaggatatgctataggtcgatatgatcaatacgacgcgcgctcgtactcgcgcctgccatatantgctgaantatcgatgtggagtagtataggagtgggtattgatttaccgtcacatcttgtgccgatgtcgtctcgagtagacaacagttagagattcgataactgtgtgtgtggtcgtgtgcgttttttattattaaccgcancgctaatattactcatacatcatgataatcgacccttccacgcacgatacgtactcgcacccgactaagcgcgcgagatacacgcgcgtataagtatggtggtgtgtattagtcatgatatatagatgagttcgttatcgtacattctcagtcgcntcttacctcacaacccgcggcactcctgcgaataacnggtgggtggagcgaagtgttgcgttgtgtgatatagacttacagtgtgcanatatagttgagtctacctagtatatttattatctattcgacatttgcagcgcgactcatatcattcaatcgtgcgccgtatatgtatatccaccgcttgtatgccaccgcgcggctatgtggtgtgtattacgcgcgccgcggcgcgcggagcgcgcgaagttacgcggctatttgttcccgcaatataatggtgggtcaccgcggaagtgaggtgataataagtcggcggccatcaaatatcggcggtgcggtcggggtagagagtatactatataatcgttgtgcgagcgctcaccgcggtttgtnagtactgtaagtgttgactcggtctttctacacaggcgtcgaggtagtgctaggataatgcggagtagtcgtntnatacgggctncatcgcggtggcccctctttcgtattaatcatataacgcgcgactggcggcgttccacaatgagacagtgctgtgccgtcgcgcagaggggagggtaatcatatgcgccggccgacgtcggatgaagatcgtaggtgtgagtgtgtatgaatatctatactatatcacactgccggaatgttagatatgattatatta

SEQ ID NO: 4226 - DNA, 1358 bp, Glycine max
  misc_feature (1)..(1): n is a, c, g, or t
  misc_feature (39)..(39): n is a, c, g, or t
  misc_feature (103)..(103): n is a, c, g, or t
  misc_feature (347)..(347): n is a, c, g, or t
  misc_feature (683)..(683): n is a, c, g, or t
  misc_feature (1126)..(1126): n is a, c, g, or t
  misc_feature (1289)..(1289): n is a, c, g, or t
  Probeset Number=SeqID_14005
nggcgcgcgtctgctgtgtctggctgttcgcgtgcgtcnatcgcgtaactgcagcgtgtgtgtgataatacatagactgttagtctctgtcgatggaagatgntggcgagatcgacacactataggagcaggcgcgagcgtaggaagagaggccgacgtgcagctcaagtaccgtcctgtcgcgaataacagctggcactacgaacttattaggatcatcgtaatgagtcacctcgacatacgtggagacagcgtggtgcgaggtcttctcgctccgcctacatcacgagtagttagcatgaactcatatatcgagttcgccgcgcggccagctcgaaccggagtgngttgttctgcttatcatcgtccgtatcgtctatctcgttcagtgtagcgatgtatagcactattagtaagtatatagtggctcctcttatcaatctcactccacagatctacgaggtgcagtaggcgcgttgtggtcgcttcgagtggtgaatagataggtcgtattcattgtattagcacgcggcgtgggtcacagagcgacgtcggggcagtgcttattgcggtgctaattactcgaagtaaatgttcataagcacgcagctcatgcgcttgtgtgatcgccggcggctggccgtgtacaagtcttgtatgatgatagatctgaccgcagaganacgtataaggataggaaatgattgccgactgggtcagacatgcggcaccacacaggcatagcagctacgcggggggaggtgtaacacgtgtgcggagccgtgggcgacgcgctgcacttaccctgacgccccattactgagctctatccgcacgtgagtacgcagacgctaatggcttaggagattgttaggtgtgtagtagtgaagtgtgcggacgcgggtgcgtcggttgactagtcgtgcgtgagggtagcggtagggctggattgacagtgtcatttggttattgttgggagtgtgagtgttttgtaccgtcctggcgggtcgcgggggtggtggttgtgtgtgttagtttcgttctttatatagatataaaatagcaattcctacaatctgatcacattctcctatgtatatattggtttgcatgagctatattattnttgtctgtgatggtgtgttttgtgtgtggtcttccttattttgtgtgtggtgggtagtgtttgcctcaaatcaccagcatcacggcggtcgtccttcttgttgtctatgtcggtggctgcacctccgcggccgtcgagataaagagagacggacgggcagagnggtgcatagtaatgggagaggcaacgagcaggtaatcgtgtaaagaaaagcacacgcaactgttctact

SEQ ID NO: 4227 - DNA, 654 bp, Glycine max
  misc_feature (223)..(224): n is a, c, g, or t
  misc_feature (312)..(312): n is a, c, g, or t
  misc_feature (319)..(319): n is a, c, g, or t
  misc_feature (368)..(368): n is a, c, g, or t
  misc_feature (384)..(384): n is a, c, g, or t
  misc_feature (388)..(388): n is a, c, g, or t
  misc_feature (556)..(563): n is a, c, g, or t
  misc_feature (585)..(585): n is a, c, g, or t
  misc_feature (587)..(587): n is a, c, g, or t
  Peptide Sequence Number=SeqID_7653
  Probeset Number=SeqID_14006
ggttttttcgattctcccctttcgtcaccatgccaccgacactctcactctcactagtgttggtggtgctgtttttcgccgccgtggacgcgcattttccggcgaccggcgagcttccaacgttccgcgaggcgccggcattccgcaacggaagagaatgccgcaaccgcccgcgaagcgactccgtgatccacatcgcgatgacgcttgacgcgacctaccnntccgaggctccgtcggcggagggttctccgtgtggcagcaacgcgtcgtgtccggaagaaacgtccgtgttccactttatttgccgancacgcancgggcggaagggaggtcccgcgcatcattcaccgcggacgttcccgtanctcttccttttcactnctancacattcgatgggggaactccgtccggcgggaagatcttcgttaactctcatccggggggcgggctgggatcaaccgctaaactacgcgcgcatgtagaccctcgcggatctttcttttcgggggacacggggggggaaatattttacttcgactccgaaccctcatnnnnnnnnctgatgaaacgggcgagcctcngntgaacatcgatatcctccaccccgcgcgggctttgtggcccccccccgatactggcccacccaactt

SEQ ID NO: 4228 - DNA, 1532 bp, Glycine max
  misc_feature (1)..(1): n is a, c, g, or t
  misc_feature (115)..(115): n is a, c, g, or t
  misc_feature (122)..(122): n is a, c, g, or t
  misc_feature (181)..(181): n is a, c, g, or t
  misc_feature (376)..(376): n is a, c, g, or t
  misc_feature (516)..(518): n is a, c, g, or t
  misc_feature (520)..(520): n is a, c, g, or t
  misc_feature (588)..(588): n is a, c, g, or t
  misc_feature (651)..(651): n is a, c, g, or t
  misc_feature (746)..(746): n is a, c, g, or t
  misc_feature (847)..(847): n is a, c, g, or t
  misc_feature (1071)..(1071): n is a, c, g, or t
  misc_feature (1168)..(1168): n is a, c, g, or t
  misc_feature (1170)..(1170): n is a, c, g, or t
  misc_feature (1229)..(1229): n is a, c, g, or t
  misc_feature (1244)..(1244): n is a, c, g, or t
  misc_feature (1268)..(1268): n is a, c, g, or t
  misc_feature (1288)..(1288): n is a, c, g, or t
  misc_feature (1324)..(1324): n is a, c, g, or t
  misc_feature (1329)..(1329): n is a, c, g, or t
  misc_feature (1332)..(1332): n is a, c, g, or t
  misc_feature (1342)..(1342): n is a, c, g, or t
  misc_feature (1374)..(1376): n is a, c, g, or t
  misc_feature (1380)..(1380): n is a, c, g, or t
  misc_feature (1392)..(1392): n is a, c, g, or t
  misc_feature (1414)..(1414): n is a, c, g, or t
  misc_feature (1449)..(1449): n is a, c, g, or t
  misc_feature (1480)..(1480): n is a, c, g, or t
  misc_feature (1485)..(1487): n is a, c, g, or t
  misc_feature (1489)..(1489): n is a, c, g, or t
  misc_feature (1491)..(1491): n is a, c, g, or t
  misc_feature (1493)..(1494): n is a, c, g, or t
  misc_feature (1496)..(1496): n is a, c, g, or t
  misc_feature (1500)..(1500): n is a, c, g, or t
  misc_feature (1502)..(1503): n is a, c, g, or t
  misc_feature (1506)..(1506): n is a, c, g, or t
  misc_feature (1509)..(1509): n is a, c, g, or t
  misc_feature (1517)..(1517): n is a, c, g, or t
  misc_feature (1522)..(1522): n is a, c, g, or t
  Peptide Sequence Number=SeqID_7654
  Probeset Number=SeqID_14007
nggtgtagtgatggtatattagagtagcgacgcagttcgctcgatatcatgtctgttattgtgtcgttgactcgtgctatagagtgcgattaggttcaatacgaggttccgcagncgtatcnactacacccaaactctagaacgtgcgcagtacgtgatcgagtcgtgtgggatcaccgancaggcaagatgaatgccatgttcgcgtcactgtctgtaattctattcaatgaatcgtgatctacatgctctcatgacgcacttctatattcactatatgcgggtgtggaattccttcactcgcggcatctaatgtgcgtgtgtttgtgcggctgaactcctatcactcacaggagaatggaacacaccaccaccnctgtcgtgctaacaactaatacgcacccaaccttggcctgacgtgagcgcgttgatgacagatgcgtctctctgcggatgtgctgggtgatgtgttagtagcttattacataagtatgccgctgctcgtgtactgtgttnnnantccgcggggtcgtgtggatggatatggttgctgtgtaactggtgatggtgtgagctgtcctagacgcnatctcctcagtattctactatacattctaaatataacatgtgcagacgtgtgtaggatatgtngttctggcgggtggccaccactgcccgccagtgaagaagagagattcatcggagccactagtgtggtgtgaatgggacggcgggcgcacccttcnccgagcgcaccgcgcgccgcggcgcacacggcttatgataaggggagtagccacatacataaaacaacacacacagccagacagtcgctcacgacgtcgtnccgtctgacacgcgcgggcatgaaggtcaacgacacggaagactgtgctcttcgagcaagcgccattctgtaacatgactcaccgcgctccatcgagcgcgcaggagaaaccgcggatacaaggctctatctgcttactgcactgattgcaggatagccgactggttcgtgagaaacgtcatacgtagttcgtgtcgcttgtctcgtcctctatctctagttanttttactattcccgacttctttatgtgaagatagtagacgttcccgatagatgtgagatcggctgatatacatgtacgaggttgcggtgtgctcagngnctctctccggcgagatgcatacccagtggagcatcaccctagcaccctcccggtcagtncagcgtgcgatacgngtgtactatctctattatacaacnctgctctctatgtgcgtctncattcgagattgtgagagttgggggggtgggttgtnccctnacngtcgttgatngcttgcgtgtcctccctcatggagtgatgtgnnncctnctcctctcatcncttgcggtatttgttgtgtgtntacacgtctcataacgcgcgcagaccacactaacnactcacacccacgcctaggggggggtgaganggggnnngngngnncngcgngnncgnggncgccccanccaanaccaaaaccc

SEQ ID NO: 4229 - DNA, 258 bp, Glycine max
  Probeset Number=SeqID_14008
gggaagctttacattcccttccctgtggagttcccagattccctaaaccctgaccaggttaaggccttggaaattgttttgcccccaaagccttttttccaatttacaaacatggagctggatgaatgttaggaaacaaccctccattatgtccccatgggggggggggttaggaggaagcccccccaagctccggaggcatattattaggattattccatgcctggtggtgcccaaagggtacagtgtgcccaccag

SEQ ID NO: 4230 - DNA, 600 bp, Glycine max
  misc_feature (7)..(7): n is a, c, g, or t
  Peptide Sequence Number=SeqID_7655
  Probeset Number=SeqID_14009
ttttacnatcactgttacacttcgtgcgaataatgcatgtaatgaaaaacttaacttaccaaacaaacacatcgcatcataagatgaaccgatctatctatatatctatctagcgccattgatcatcacgtactgcatctgcacaaaatttactagcttctcctcatgccggtccaccacctatattcgctggcccactccttcttgatctgggccggggaggggttgcggtcctggtcgaggccctcgtccatgcggtggagatactcgtgcttgaacatgacggggttgccggcgaagcactcgcgcagtgccgccgtggccttgacgcacgcgtccttgtcgacgggggtggccttgcgttgctgcttcttgtaaaactgggggtgccgctgcttcatgtaatcggggttgcacacgtccatggcgatcacgaactcttggaggcacccgccgttggcgacgtgatgccagaccatcttggtgtcgacgaggtgcatggtttcgtccagggcgtccttcatggacgcacgtccgggcaaaaagttccccatggaccggccttgatttctggatcaatcaatcgactagctagaggat

SEQ ID NO: 4231 - DNA, 538 bp, Glycine max
  misc_feature (277)..(277): n is a, c, g, or t
  misc_feature (336)..(336): n is a, c, g, or t
  misc_feature (467)..(467): n is a, c, g, or t
  misc_feature (471)..(471): n is a, c, g, or t
  misc_feature (526)..(526): n is a, c, g, or t
  Probeset Number=SeqID_14010
ggcacgaggggcgttctatatattattgaattgacaatgaggcctgctcttgctttgcttcctcttctatttgctttcttgttagctgccactacggaatcaagaaaagatccaggggaatattggaaaatgatcatgaaagatcaggaaatgccagaagggacttcagggtctggttcattcaatctggaaaatacccctagactcagagcacttggtaaaggttccaaaaccatgtgaagaagcttagttccaatacccagttacagtgacttcnacccatccaagtgttccaaattgatgatttggaattcaagtcaagcattatcaagaacnatgattttgaatcgagaccaagtggtactaagtatgatgattttgaactcaagtcaagcgttccaagaacaatgattttgaaccgagaccaagtgctcccaatatgatgaatttgactcaagtcaagccgntccnagaatgatgaatttgacccagacccaatattaccaggatgatgactttgactcangtcaaacgttcc

SEQ ID NO: 4232 - DNA, 1692 bp, Glycine max
  misc_feature (10)..(10): n is a, c, g, or t
  misc_feature (19)..(20): n is a, c, g, or t
  misc_feature (28)..(30): n is a, c, g, or t
  misc_feature (32)..(32): n is a, c, g, or t
  misc_feature (40)..(41): n is a, c, g, or t
  misc_feature (44)..(44): n is a, c, g, or t
  misc_feature (94)..(95): n is a, c, g, or t
  misc_feature (111)..(111): n is a, c, g, or t
  misc_feature (121)..(121): n is a, c, g, or t
  misc_feature (161)..(161): n is a, c, g, or t
  misc_feature (163)..(163): n is a, c, g, or t
  misc_feature (169)..(169): n is a, c, g, or t
  misc_feature (211)..(212): n is a, c, g, or t
  misc_feature (257)..(257): n is a, c, g, or t
  misc_feature (262)..(262): n is a, c, g, or t
  misc_feature (266)..(267): n is a, c, g, or t
  misc_feature (282)..(282): n is a, c, g, or t
  misc_feature (285)..(285): n is a, c, g, or t
  misc_feature (290)..(290): n is a, c, g, or t
  misc_feature (329)..(329): n is a, c, g, or t
  misc_feature (340)..(340): n is a, c, g, or t
  misc_feature (409)..(409): n is a, c, g, or t
  misc_feature (612)..(612): n is a, c, g, or t
  misc_feature (677)..(677): n is a, c, g, or t
  misc_feature (916)..(916): n is a, c, g, or t
  misc_feature (921)..(921): n is a, c, g, or t
  misc_feature (923)..(924): n is a, c, g, or t
  misc_feature (937)..(938): n is a, c, g, or t
  misc_feature (947)..(947): n is a, c, g, or t
  misc_feature (993)..(993): n is a, c, g, or t
  misc_feature (1062)..(1062): n is a, c, g, or t
  misc_feature (1184)..(1184): n is a, c, g, or t
  misc_feature (1243)..(1243): n is a, c, g, or t
  misc_feature (1358)..(1358): n is a, c, g, or t
  misc_feature (1454)..(1454): n is a, c, g, or t
  misc_feature (1517)..(1517): n is a, c, g, or t
  Peptide Sequence Number=SeqID_7656
  Probeset Number=SeqID_14011
ggtgttgtgngttgtgggnncccccccnnntntttttttnncanggcgcttccaccaccacctcccacacacaacccccccccgcgcgcaaaannaataaggtgtaaaatnaaaaacaaanaataaggcatagatgaaacaaaacatatcaagcgtccatngnaaagancagataggagcgtgcacctctctctctcctctctcctctcannccaaagacagaggaagagaaaacaatagacaagatagaaggaagnactcncagnntaacacacaacacgnctnttganataatgtatagcctatcctccccatcatacctctccacnacagcggcgtncaccatcgctttctcaataatctgcgttatcgatacacgcagacaccccaccctaccaaaatacagatnaatatataaggaatgagagaggagatatacacgcggctccaccacgatatacaatataaacacttccacttatgataatagttatgagggctatcagtacaatatctaaaacaatcaaccgtagttcaactgatccttgcgccctaatagtcagatactataacctcacatgatgagtttttacttggcgggagccgtgagtntgttaagaggaagtctatctcgtactgcgcgtaactgcgctgaagagttataggctaacaaccanaaaggagaagctgtgtatgagacgaagaacgatcatctgtagttttctcgtcgtatacatattattggtgagctcctatatatacgcactagtaaaatattaaacacaccctagcctcactctatctcttctacaccagccactaccccgccctagaggcatcggtacactgcatcaccgcgcccagaatcgctcgagcgtagacgacttgtttgcgctcatattaatggtaaacaccnaatgnannaacaaaaataaannaaaacaacnacataacaacaacgctgcacaaacatatataataaaataagagaanacaaataccacacaccacacgctgcgtgtggcctctgacgagaggatgtgagtagccacctcccgcagnataatactccgccattatccttgcgaaccaacaatggtataattccggtgacgctgtccgttgctgtatcctggtacgtctacacacactcattccataatcaacgcactgttaccatgcanccctcgtgcacacggtacatgactccatcgcgtcttgacttgttcaccgcactcgtgcnaggacatgttagcactatcacttcgcactataccataccatgtgtatatagtcttgataccgctaggataggacacgaagctagatattatacgactgtggactctgatcacgtntgtcccgaaccttgcgagcgcagtgacaccgtgctcgactgactgctcaccacatcatctgatatgcagcgttgctcacagctatatggctaggtntaactgtgagcactgaccgctacactacattgtctcatctcacgacaccgagatcctgtaatntcccacggctcctcgagcatcgcgatgatctgaccggcgaccttgcacgtgctgacgctattacgcccgcgttccgtctctcgacttcgaaactctatcgcacccctcttggcatagctcgctactctggcggactgctcctcttagacactctccgtaccacgtgtcccccgtg

SEQ ID NO: 4233 - DNA, 628 bp, Glycine max
  misc_feature (601)..(628): n is a, c, g, or t
  Probeset Number=SeqID_14012
aacttttggcctaatccaatcatctttgtgatggggttatctacttactcaaatcattggtggcatatgggcagacaaacttggtgggaagctagtactaggttttggagttgtctggtggtcaattgcaacaggtttaacacctattgctgcaaaacttgggttgccatgtcttcttattatgcgtgccttcatgggaattggggagggtgttgcgatgcctgcaatgaataatatactttccaaatggattccagtgtcagagagaagcagatcactagcgctagtgtatagtgacatgtaccttggttctgtgactggcttggcattctcgcctatcctaatccagaaatttgggtggccatcggtgttctattcatatggatcccttggaagtatctggtttgtagtatggttgggttaagcatacagctcaccaaaccaagacccggatcttggtgcttaagaggagatatctatacttcgaagcaatgtttcaaaatgacctgcgtgagatatttctgtggaatggaatccatcaactgcatcctgatggggcttaataatgtctaacatagtgctatagtgtggggacacttannnnnnnnnnnnnnnnnnnnnnnnnnnn

SEQ ID NO: 4234 - DNA, 673 bp, Glycine max
  Peptide Sequence Number=SeqID_7657
  Probeset Number=SeqID_14013
acactgccatggccgctgccagcctggtgtccctttgggtcctcttctccggcgttgctttgtttcctggaagttgctcgccgcagcatcataacattcttaaacttaaaatgatctcccccccttcactcataacctttcaacctccaaaatcattgactcccatctccatatctgggcttcctcctcaagaaggttccgaaatccccttatgctccccgaacaaaaacccccctggacccagaaaaccttattttttttgcctcccaaaattggagggggcaaggaataaatggccttttcccttttgggaacccaaattttccaaaaatttgaaacccaagcaaccgccccaaagggctttttaaataaaaacccccccccaaatttttggggggggtggcccccttgcataacccccaccttgttagttggagagggcgccctaaaaaaccctttaaaaaaatttctttcataaaaagagaggggttattggggcgttctaaaaaaaaaaacacaaaaaatttttcgcccacccgtgggaaaaaaaaacacaacaacaaaaagtggggggagaaattatttctccccaagaggtgggaaaaaaaaaatagatagccccccggtgttattttttgggggaaaaggagaggggtgtcttattaattttttg

SEQ ID NO: 4235 - DNA, 1360 bp, Glycine max
  misc_feature (1)..(1): n is a, c, g, or t
  misc_feature (64)..(64): n is a, c, g, or t
  misc_feature (200)..(200): n is a, c, g, or t
  misc_feature (321)..(321): n is a, c, g, or t
  misc_feature (431)..(431): n is a, c, g, or t
  misc_feature (515)..(515): n is a, c, g, or t
  Probeset Number=SeqID_14014
nacgaagctgacgtgtgcgatcgaaatcatatgcagcgatgacggaggtagtgatgtgagacancgtactgatcagtactagcggcgtgagcgagtggtgtgtcagcgcggagcatagtggtgtgtcgatgaagagagcgaataatatatgatagtggagtgagctgagactagggtacatgtacagtagtggagagcgnactgcgtatcatcactcgcgatacgtacgtagcgtcgcgagtcggacgcagaagacgttcttcgccgttgcacagtatagactgagacggtcatacgtcagagagagccgctggcgtgggncatacctcgagcgacagggacgtgatgcagagtgattacacgacgcgtgcgtatataaataatattcgatgtagacacggggtatgtgagagtgtgcgtatgatgatagnagatatcacgatatgtctaagagcaacttatgttgtgcgtgttcttatccagaagtcagtatattatataatacgacgctcgtnatgcggaagcgccgcgcagcacaatatcgagtagagtggttcatcagactagaatatgggccgtacacggacagtacttcatattacagggacgtgcagcgtctatactagggatcgtggtcagacgcacaatatattgtcggtggaggtactagaggagtatctcgtgggaacgccgagccatacggagagagtacagccatcgatgtgcgtggcggtagtttggccttcgtcaattatacatgatatcgatcattaaatcgccggagatgcaatcgatggatgtactaagtctataggaagtaatcgggtatccttagattaacggttgggtacgtgatcagaacgaacttatataagagatactctgcgctgagtctgactcccgtttcttacgcagatctctctgttatgtaatagggtggcgcgtggcggcacgtgcgggacgaggtgaaagacacgtgtctgagtggaggtgagaatgtttgtaagagaagaagagctatgcagggatagaagagtggtatggatgtcgaactgaagaggagagatcaggcgtcgtgtgtcgggtagaattgtcagagcctatgacacggttcagaatatccgacactatgtcatcgagtatatacttagtgtaggtaatgattaaaaatagcgacgtggtcgtgtgaaggaacaggacaatgagcgtgtgtttaacagaatagacataccattagatatgagcgtcgtgagtctgttggactgggccgtagcaagagaagaagtatatatcgtgaaggtgggtgtgagggtgcgacgcatattcacgtatagagcccattacaaacacacaccacaca

SEQ ID NO: 4236 - DNA, 485 bp, Glycine max
  misc_feature (20)..(20): n is a, c, g, or t
  misc_feature (25)..(25): n is a, c, g, or t
  misc_feature (28)..(28): n is a, c, g, or t
  misc_feature (30)..(30): n is a, c, g, or t
  misc_feature (32)..(32): n is a, c, g, or t
  misc_feature (37)..(38): n is a, c, g, or t
  misc_feature (40)..(40): n is a, c, g, or t
  misc_feature (177)..(177): n is a, c, g, or t
  misc_feature (188)..(188): n is a, c, g, or t
  misc_feature (193)..(193): n is a, c, g, or t
  misc_feature (221)..(221): n is a, c, g, or t
  misc_feature (233)..(235): n is a, c, g, or t
  misc_feature (237)..(237): n is a, c, g, or t
  misc_feature (239)..(239): n is a, c, g, or t
  misc_feature (269)..(269): n is a, c, g, or t
  misc_feature (282)..(282): n is a, c, g, or t
  misc_feature (298)..(299): n is a, c, g, or t
  misc_feature (301)..(302): n is a, c, g, or t
  misc_feature (306)..(306): n is a, c, g, or t
  misc_feature (325)..(325): n is a, c, g, or t
  misc_feature (346)..(346): n is a, c, g, or t
  misc_feature (350)..(350): n is a, c, g, or t
  misc_feature (354)..(354): n is a, c, g, or t
  misc_feature (360)..(360): n is a, c, g, or t
  misc_feature (373)..(373): n is a, c, g, or t
  misc_feature (384)..(384): n is a, c, g, or t
  misc_feature (387)..(387): n is a, c, g, or t
  misc_feature (398)..(398): n is a, c, g, or t
  misc_feature (401)..(401): n is a, c, g, or t
  misc_feature (418)..(420): n is a, c, g, or t
  misc_feature (429)..(429): n is a, c, g, or t
  misc_feature (432)..(432): n is a, c, g, or t
  misc_feature (434)..(434): n is a, c, g, or t
  misc_feature (441)..(441): n is a, c, g, or t
  misc_feature (448)..(448): n is a, c, g, or t
  misc_feature (452)..(452): n is a, c, g, or t
  misc_feature (459)..(460): n is a, c, g, or t
  misc_feature (469)..(469): n is a, c, g, or t
  misc_feature (471)..(471): n is a, c, g, or t
  misc_feature (473)..(473): n is a, c, g, or t
  misc_feature (482)..(483): n is a, c, g, or t
  misc_feature (485)..(485): n is a, c, g, or t
  Peptide Sequence Number=SeqID_7658
  Probeset Number=SeqID_14015
atacttacagcatctcttantttcnccncnanaatanngnaaaaactagactatgaatctctacttccatctggatctcttgaagatcatgagggatagagagaggagatttacgtaccgatctgatgagatcgaggttgagttcatcgggacggagcaacatatcggagctatgantccggtaaaanataanttcccgatcaccgtgcggccttcaacgncacgaacgccannntntnttctgggtccggaatcgaagttgatccccngattttttttttncgcccccccccccggnncnnaggncaacatgtgtccgaactcntcgatcgccgaggtttacgangaangagngatcgnccacgcgaggggngaaatggtganggngatgatagctnggngcgccgccgggagattnnnggaaacctnggngnctcgganagggganacgngggattnnggtggtgangnantcgatgagnntn

SEQ ID NO: 4237 - DNA, 410 bp, Glycine max
  misc_feature (197)..(197): n is a, c, g, or t
  misc_feature (327)..(327): n is a, c, g, or t
  misc_feature (331)..(331): n is a, c, g, or t
  misc_feature (351)..(351): n is a, c, g, or t
  misc_feature (354)..(354): n is a, c, g, or t
  misc_feature (379)..(380): n is a, c, g, or t
  misc_feature (398)..(398): n is a, c, g, or t
  misc_feature (405)..(405): n is a, c, g, or t
  Peptide Sequence Number=SeqID_7659
  Probeset Number=SeqID_14016
ttgttactaaactatgctgtgctattgattgaaacaaaggatcaagaaggtcaatctcaagttctatcggcagctcttgagattggcgaggatgaaaatgttgaagtcgaccccaaatttcgtgctttagttgctgttggatcactgatgcttgaaggtcttgtcagaaaaacaccactggattttgatgctgtgancattgcaatagccgccatgggtactagggagggtaaaattgctgaaatcgacccgacattgagctgttaacatagtcgggctgatacctgttgggtgatatagttataccgtccctctggagtatggagnttcnacaagatgatcattgcattntantgaccttagttaaaccgtgcacctnngctctcgttatactgtcnctggtgntttgg

SEQ ID NO: 4238 - DNA, 1508 bp, Glycine max
  misc_feature (12)..(12): n is a, c, g, or t
  misc_feature (26)..(27): n is a, c, g, or t
  misc_feature (38)..(38): n is a, c, g, or t
  misc_feature (40)..(41): n is a, c, g, or t
  misc_feature (46)..(48): n is a, c, g, or t
  misc_feature (78)..(80): n is a, c, g, or t
  misc_feature (82)..(82): n is a, c, g, or t
  misc_feature (137)..(139): n is a, c, g, or t
  misc_feature (143)..(143): n is a, c, g, or t
  misc_feature (148)..(148): n is a, c, g, or t
  misc_feature (152)..(152): n is a, c, g, or t
  misc_feature (211)..(211): n is a, c, g, or t
  misc_feature (548)..(548): n is a, c, g, or t
  misc_feature (552)..(552): n is a, c, g, or t
  misc_feature (586)..(586): n is a, c, g, or t
  misc_feature (679)..(679): n is a, c, g, or t
  misc_feature (790)..(790): n is a, c, g, or t
  misc_feature (795)..(795): n is a, c, g, or t
  misc_feature (968)..(968): n is a, c, g, or t
  misc_feature (1240)..(1240): n is a, c, g, or t
  misc_feature (1260)..(1260): n is a, c, g, or t
  misc_feature (1508)..(1508): n is a, c, g, or t
  Peptide Sequence Number=SeqID_7660
  Probeset Number=SeqID_14017
gttttgtgtggnggtgcgcggggccnncccccccgccncnnccccnnnccccctccccacctacttatttgttttgannngnacgccgagagggggaccactatctaatataaactaataactgtaaatctaaagtnnnaaanataanacgncttccttcgtttactatatacacaacacaacatcatcactatcatgagagagtgagagngtggtgggttgagccccaccgctctctcactctcaccacctccctcaggagaaagtcacctactattataggatccgaccacccaccccgttataataaataaataacaaggttatatatactagatgctcactaggtttctgtttctctactacgcttagcacgcgcgcctcatcgctttgaggtccggtaacgcgcggcgggagacggtagttatctaagtaaatagtactgctatttatacactattgacgctcacagagcttgtgatgatacctcaagtggctccgtcggtgcggtttattcaattgtgtgttctgtgtttctcctccacatntaantaaatgtggcctggaatgtgtggtcacgcgggcnctgctgtctcgtgtcggcgaggtgtgggatggctagcctgctttggctgagtattgatttcttaccgtagtgataagaatatataaatacagnctgcgactgatagtacacaccccttcatgtctctaattaggttctagcacaacctacgggagttgaggagatgaggtgaggatgttgatttgagtggagatggatgattcnggagngtatcgtgtagacatgtctgtgaatgtataacccgaggtgtggagacacacccccaccccaaccctcgctacttagtgttatctgtcgctgagagtctgagatgtgtagtcagtgaattttaggtgtggtgggcccacgcaccgacttgtctaccgcctccgacacattattnactctgaataggcccctgctcatatcagtataagtacacgatccgtgtcgcgagcttgttctcttgcgtgcgcgacatcttcctctctcctcaccgtctgtcgcttgctgccgtgcagggtgaggtgaggtgcttacggactgttgtgcccgtctccttgtcttatgttatgtgcatgtaccgtggcacgactcctaagtcactgtgctagagtattacctctcgtctttcatactatgtaacagtgtagatatgactgctcctgatcacantcacctgtctgggctctatntctgagcttcctcgtaatcatctagttttcttgtctgtatgactggacttatgacggtacagagtgcacgcgcacactataccagaaccaatgacagtaccatcaaacaagacacagctgacgagtgctggctggcgatctatcagagctcgagggcgtggtcagtgcgactacggacccctatcgagtagcaatgtgtatctgcgcttgattcttacttattgtcctcgcacgtactgcgtctctcn

SEQ ID NO: 4239 - DNA, 1472 bp, Glycine max
  misc_feature (14)..(14): n is a, c, g, or t
  misc_feature (37)..(37): n is a, c, g, or t
  misc_feature (83)..(83): n is a, c, g, or t
  misc_feature (298)..(298): n is a, c, g, or t
  misc_feature (300)..(300): n is a, c, g, or t
  misc_feature (302)..(302): n is a, c, g, or t
  misc_feature (306)..(306): n is a, c, g, or t
  misc_feature (480)..(480): n is a, c, g, or t
  misc_feature (554)..(554): n is a, c, g, or t
  misc_feature (580)..(580): n is a, c, g, or t
  misc_feature (767)..(767): n is a, c, g, or t
  misc_feature (871)..(871): n is a, c, g, or t
  misc_feature (990)..(990): n is a, c, g, or t
  misc_feature (1075)..(1075): n is a, c, g, or t
  misc_feature (1282)..(1282): n is a, c, g, or t
  misc_feature (1368)..(1368): n is a, c, g, or t
  misc_feature (1416)..(1416): n is a, c, g, or t
  misc_feature (1472)..(1472): n is a, c, g, or t
  Probeset Number=SeqID_14018
cctttgaatagaantagtcactatacgacgcggtatncacgtgtgtggcggcgtatctgtctgtgtatatctatgtgtcacantaggatataaatgtatatctatatatctatctatgtaatagatatgtatatatgtatgtatctatgtgtatctatgtgtgtctatatctatgtctctgtaactgtaacactgtgtgtatgtctatatatatatctatctctataagtctatgtctatgtctgtatctgtgtatagccatctcagctgtgtcactgtgtatacgtgtatatgtatntngntatntctgtgtgtgtagagatctatcgatgtgtgtacttgtctaagtgtgtctgtgtctgtgtatatatgtgtatgtctatatgtaagtctgtctctgtctggctctctctacgtgtatgtatctgtatatctctctctatggctatatctctatgtatactcttctctctgtgtacntgtgtctgcgtctgtgtcggtgtctccatccctctgtggtactgcctatcgctgtctatctccgcatctgtgcncctctctccatctatcgatctatggntcggtgtaaccgtcgctcagtctatacacgtatcaccatctcagcgtgtgggtgtcatcggagtcggtggatatgtcgatgtctcactcccgtctgtcagcctcctacctatctgagtgtatgtctctcgagactgtgactctggcgagtctgcgtcgcgcgatagacgctcacgccggctccgcgntgtagcgatacactacccccgctctgtgacagtcatctgactccgcgcacggacgaaggctgtaatagctacctacgcgcccctcgcgtgcgtaacagagacgnaaaccacacgtcgcaatagcctgcagattgtagatgtgtggagtgtatctagagtatctccgctcacgtcccgccctccacgcgctctctctcaacatcaatctatacatcgtctcttntgtgtaggcacgacacaacctcagccactaccaccacggacacacagacgagaacgagactactcactccgacacgatggcgtanaggcacaaccgctcccatcatctaacacagaaggcttagcgcgacgctacccacgccgcgcctgccgctcatgacacgtcgctgcagcactctagtgcccactccagccatcgctcacacaacacgccgcagcacacacgcagactcgcgtacgatggatgagtgagcgcggtctccgcgactcgtgcggaggtgagggagagcttncacggccaatcgatatctactctgacgtcacatatcagatgacattctatcgacgcgagacgcgtcagaccgagctccgatacagntggatgttataacaaccgatagagatcggcactagctgtatgatctantcattatacttatcgtctacggtgtctatccatacgatcactcacacacccacccn

SEQ ID NO: 4240 - DNA, 257 bp, Glycine max
  Peptide Sequence Number=SeqID_7661
  Probeset Number=SeqID_14019
gcaaggacatctcagcctctgctatgtagcgggatcaaatgctcccctctctcattttgttctcttgtctccaaaccttccttatgagtccctgcaatcccattagcgagtttcattgaccatagtgaatacaatagcatttgccaatgcacagatcaaagagaggacgaggtttaagtaactctaacaaaaagcctacgagagatgccgcactgctcccatggaaggtgtttccttcaccctaaatgcttcggtgc

SEQ ID NO: 4241 - DNA, 307 bp, Glycine max
  Peptide Sequence Number=SeqID_7662
  Probeset Number=SeqID_14020
ggctgaagcacaaatacgaaaccaacatggaaaccctgacccacacacagataaatacggaaatacggatatataaactgacgagcgcggtaatcccgaccaactcactgatgtcgctaccaccgataccgacacagcaagttatgggtgtggatcctatggtaccggtgattacagtggtggtgcaagtgcaaacaccgatgcagatatattggcaacccaaccaaagagtggcagggaggctagagagcttgatcgatcctccagatcaagctctagctcgcctgaggaagatggacaaggtggg

SEQ ID NO: 4242 - DNA, 1667 bp, Glycine max
  misc_feature (27)..(27): n is a, c, g, or t
  misc_feature (34)..(34): n is a, c, g, or t
  misc_feature (157)..(157): n is a, c, g, or t
  misc_feature (576)..(576): n is a, c, g, or t
  misc_feature (703)..(703): n is a, c, g, or t
  misc_feature (1151)..(1151): n is a, c, g, or t
  misc_feature (1217)..(1217): n is a, c, g, or t
  misc_feature (1430)..(1430): n is a, c, g, or t
  misc_feature (1453)..(1453): n is a, c, g, or t
  misc_feature (1473)..(1473): n is a, c, g, or t
  misc_feature (1551)..(1551): n is a, c, g, or t
  misc_feature (1598)..(1598): n is a, c, g, or t
  Peptide Sequence Number=SeqID_7663
  Probeset Number=SeqID_14021
gttgtctccctccctcagtgctactcncctcttncccacctactcacacctcgtcacaacaaaacaaatacacaaattcccctatatctaacacatacgcttgcttatcttgtatgatcggtatcacatcactttatccttaacagtcttactaatncacatctgtttgatgtttatccctcgctgcgctctcctccctctcctcgccgcttctctcgtatagagtttcatcattcttttcgacttcgctcccacatattccgactctccttgtgttcgcctcgcttgctgtctctacacgtcataatcctcattctctccatctcccgctacttattagtatattctatctctgaactctcaacaactcttactatgttctccttctcactgtccgcccatactctcgaatctttctctacatccaccctaagcaaccacacaacatccctctctccccctacttacgtcctcatcgcctccgcgcatcccacacatccattcgcatcttcccttagcctgcgacgctctatgataaggcatccgtaccacgagacgcttgatatcgatgacctngttccgccacctgcgtacaacctacctatctactctgttgctcgactctcgtcgtctatatgcctgtgcttatcgtagtaactcacactctcttaacactactatcgatataatgccagatcacttncgccttcatctgctgatcatctcatgtacgtcacactatcacaaacacaccaccacctgctacacatgacgtctcttctgcatcatactctatccgaatacgcatgcgctatcacagacacgtaatagtaccccacaaccaaagcagcatcttctcactccacactaactatcacttaaactgatgttctactaactgactctgcaatcgacattagttatatgtgttacgactgtattattcttcttctactcttctttgttcgtcgtgcaacgtgagtagtgattgacatatccacacctcttaacatcctatggatatgctttaccgctgtgcatcgtgtccctatgcccgtactctcacatgctattactttatattcgacttactacatacgacctcattatatattatacgatctgattgcctcatcgtgctgctttcacanacgacactccgcatactcatgtatacgctacctcatctgatcctccgtagcgcgcactttatcatncctatgacacgataacactaccaacagtcgacatcgatctgtaagtactactactcgtaacaactactctatgacacacgtctacttctactcttacatcttcttgtgacgacatatactctaactgtgcgcacacatctacgcacctcactgacacgtcacatcactgtctctactccgaatcacacgctctcaccgtacacacagtctaangcgcgctgtcgtacgctaatcgntgcttgatacttcattctcntgacctctcacactctatagagagtgacagcttatgacacctccgcacacctattactcttctgtctctccacagcgntcgcggtatgctctgtatctgtctacgtatctatctctactatcgtnctatgacatatatactctcgcttatctgtctatgatctagcatgtgcacgtctgcgcgcgtaagtcgcg

SEQ ID NO: 4243 - DNA, 2268 bp, Glycine max
  misc_feature (24)..(24): n is a, c, g, or t
  misc_feature (29)..(29): n is a, c, g, or t
  misc_feature (31)..(31): n is a, c, g, or t
  misc_feature (38)..(38): n is a, c, g, or t
  misc_feature (45)..(45): n is a, c, g, or t
  misc_feature (129)..(129): n is a, c, g, or t
  misc_feature (133)..(133): n is a, c, g, or t
  misc_feature (200)..(200): n is a, c, g, or t
  misc_feature (207)..(207): n is a, c, g, or t
  misc_feature (227)..(227): n is a, c, g, or t
  misc_feature (247)..(247): n is a, c, g, or t
  misc_feature (302)..(302): n is a, c, g, or t
  misc_feature (304)..(304): n is a, c, g, or t
  misc_feature (309)..(310): n is a, c, g, or t
  misc_feature (344)..(344): n is a, c, g, or t
  misc_feature (346)..(346): n is a, c, g, or t
  misc_feature (367)..(367): n is a, c, g, or t
  misc_feature (382)..(382): n is a, c, g, or t
  misc_feature (398)..(398): n is a, c, g, or t
  misc_feature (430)..(430): n is a, c, g, or t
  misc_feature (485)..(485): n is a, c, g, or t
  misc_feature (496)..(496): n is a, c, g, or t
  misc_feature (573)..(573): n is a, c, g, or t
  misc_feature (610)..(610): n is a, c, g, or t
  misc_feature (620)..(621): n is a, c, g, or t
  misc_feature (685)..(685): n is a, c, g, or t
  misc_feature (687)..(687): n is a, c, g, or t
  misc_feature (751)..(751): n is a, c, g, or t
  misc_feature (791)..(791): n is a, c, g, or t
  misc_feature (816)..(816): n is a, c, g, or t
  misc_feature (822)..(822): n is a, c, g, or t
  misc_feature (863)..(863): n is a, c, g, or t
  misc_feature (892)..(892): n is a, c, g, or t
  misc_feature (894)..(894): n is a, c, g, or t
  misc_feature (905)..(905): n is a, c, g, or t
  misc_feature (950)..(950): n is a, c, g, or t
  misc_feature (960)..(960): n is a, c, g, or t
  misc_feature (976)..(976): n is a, c, g, or t
  misc_feature (1006)..(1006): n is a, c, g, or t
  misc_feature (1019)..(1019): n is a, c, g, or t
  misc_feature (1023)..(1023): n is a, c, g, or t
  misc_feature (1048)..(1048): n is a, c, g, or t
  misc_feature (1099)..(1099): n is a, c, g, or t
  misc_feature (1150)..(1150): n is a, c, g, or t
  misc_feature (1156)..(1156): n is a, c, g, or t
  misc_feature (1158)..(1158): n is a, c, g, or t
  misc_feature (1179)..(1179): n is a, c, g, or t
  misc_feature (1217)..(1223): n is a, c, g, or t
  misc_feature (1225)..(1225): n is a, c, g, or t
  misc_feature (1227)..(1227): n is a, c, g, or t
  misc_feature (1238)..(1238): n is a, c, g, or t
  misc_feature (1240)..(1240): n is a, c, g, or t
  misc_feature (1245)..(1245): n is a, c, g, or t
  misc_feature (1263)..(1263): n is a, c, g, or t
  misc_feature (1277)..(1277): n is a, c, g, or t
  misc_feature (1283)..(1283): n is a, c, g, or t
  misc_feature (1292)..(1292): n is a, c, g, or t
  misc_feature (1313)..(1313): n is a, c, g, or t
  misc_feature (1329)..(1329): n is a, c, g, or t
  misc_feature (1350)..(1351): n is a, c, g, or t
  misc_feature (1365)..(1365): n is a, c, g, or t
  misc_feature (1416)..(1416): n is a, c, g, or t
  misc_feature (1436)..(1436): n is a, c, g, or t
  misc_feature (1446)..(1446): n is a, c, g, or t
  misc_feature (1449)..(1449): n is a, c, g, or t
  misc_feature (1454)..(1454): n is a, c, g, or t
  misc_feature (1470)..(1471): n is a, c, g, or t
  misc_feature (1473)..(1473): n is a, c, g, or t
  misc_feature (1477)..(1477): n is a, c, g, or t
  misc_feature (1479)..(1479): n is a, c, g, or t
  misc_feature (1496)..(1496): n is a, c, g, or t
  misc_feature (1504)..(1504): n is a, c, g, or t
  misc_feature (1536)..(1536): n is a, c, g, or t
  misc_feature (1538)..(1538): n is a, c, g, or t
  misc_feature (1543)..(1543): n is a, c, g, or t
  misc_feature (1564)..(1564): n is a, c, g, or t
  misc_feature (1593)..(1593): n is a, c, g, or t
  misc_feature (1611)..(1611): n is a, c, g, or t
  misc_feature (1613)..(1613): n is a, c, g, or t
  misc_feature (1616)..(1616): n is a, c, g, or t
  misc_feature (1653)..(1653): n is a, c, g, or t
  misc_feature (1671)..(1671): n is a, c, g, or t
  misc_feature (1680)..(1680): n is a, c, g, or t
  misc_feature (1682)..(1682): n is a, c, g, or t
  misc_feature (1694)..(1694): n is a, c, g, or t
  misc_feature (1706)..(1706): n is a, c, g, or t
  misc_feature (1708)..(1708): n is a, c, g, or t
  misc_feature (1734)..(1734): n is a, c, g, or t
  misc_feature (1757)..(1757): n is a, c, g, or t
  misc_feature (1785)..(1785): n is a, c, g, or t
  misc_feature (1787)..(1787): n is a, c, g, or t
  misc_feature (1804)..(1804): n is a, c, g, or t
  misc_feature (1815)..(1815): n is a, c, g, or t
  misc_feature (1867)..(1867): n is a, c, g, or t
  misc_feature (1871)..(1871): n is a, c, g, or t
  misc_feature (1876)..(1876): n is a, c, g, or t
  misc_feature (1892)..(1892): n is a, c, g, or t
  misc_feature (1898)..(1898): n is a, c, g, or t
  misc_feature (1929)..(1929): n is a, c, g, or t
  misc_feature (1935)..(1935): n is a, c, g, or t
  misc_feature (1944)..(1944): n is a, c, g, or t
  misc_feature (1947)..(1947): n is a, c, g, or t
  misc_feature (1952)..(1952): n is a, c, g, or t
  misc_feature (1973)..(1973): n is a, c, g, or t
  misc_feature (1975)..(1976): n is a, c, g, or t
  misc_feature (1985)..(1985): n is a, c, g, or t
  misc_feature (2008)..(2008): n is a, c, g, or t
  misc_feature (2020)..(2020): n is a, c, g, or t
  misc_feature (2030)..(2030): n is a, c, g, or t
  misc_feature (2042)..(2042): n is a, c, g, or t
  misc_feature (2046)..(2046): n is a, c, g, or t
  misc_feature (2060)..(2060): n is a, c, g, or t
  misc_feature (2063)..(2063): n is a, c, g, or t
  misc_feature (2089)..(2089): n is a, c, g, or t
  misc_feature (2093)..(2093): n is a, c, g, or t
  misc_feature (2101)..(2101): n is a, c, g, or t
  misc_feature (2107)..(2107): n is a, c, g, or t
  misc_feature (2119)..(2119): n is a, c, g, or t
  misc_feature (2132)..(2132): n is a, c, g, or t
  misc_feature (2134)..(2134): n is a, c, g, or t
  misc_feature (2142)..(2142): n is a, c, g, or t
  misc_feature (2157)..(2157): n is a, c, g, or t
  misc_feature (2167)..(2167): n is a, c, g, or t
  misc_feature (2175)..(2175): n is a, c, g, or t
  misc_feature (2192)..(2192): n is a, c, g, or t
  misc_feature (2210)..(2210): n is a, c, g, or t
  misc_feature (2216)..(2216): n is a, c, g, or t
  misc_feature (2268)..(2268): n is a, c, g, or t
  Probeset Number=SeqID_14022
cattatataatttatctagattanacgangngacacancgatcgnactctaacagtatcacatacttctcattacactatcacgacgcaggtacatactacagcgcatgcgctctctctgctacgcgcnctcnactgacgcagacgcagcgtagtgtgtcgcgctcgctatcgctgtactgcatctgctgtctgcgtctncgtcacnatgcacatacttcgcatcgnagcacacaatcaggacacanctctacacccaacaccaccaccacacgcgactaccgttactcaactacaggacgncnctgtnntcgcttcgtcacgtacgctctcactacatcgcgncnacgcactggagcatcatagangtctagactatgcancgagtgcgtatgcgantaatcgtctgtatacgatgtaacgacacgcgncagactcactctcatcgtcgactacatcgcacgtctcgatcgctcacgactgagnatagatgagcnaagtagtagatcatattcgaatcgatttgcacacgagcgtcgatgccatatggttgcatcgtcgcagtgctgtgctntatatctgtagcattacgtaggaagacgcgtgtttgnatatctgtgnngagcgctgacggaggctggtctagatcgctgatcggcgctatcgagtcacgcgtcgcgactgtncntgactcgctcgtcactgtctcgatgtctgttgacattacgtctcatactgatactggcgaatantgtactagtgtacgatgtgctagtatcgtactatatccgnccattacactactagcatagtcgtnatgatngacgatttatctgatagcgctcgcgtcgcgctgactccgtnacatctcactgacgcacactgtagcgacngncagtcgccgcncgtccgtgtcggtcgtctgtcgtgttcgtgcgctttgctcgtgcncgctgctgcncgctgcgcctgcctgngctgcgtcgtctctgtagtctcgacggatnatcgagtattganagtnagcgactacagaaaaaggatcgagngaagcagtgcagggagacgggtatgtgtgagtgtttggacgacgagtagantgagtatatgcttactgtgtgctacactcgtgtgtatgactcgctcgacgnatgacngngcgtgtctctcatgatgagtntgtgacatgtgtagtgtggtttgttggtagtatgtatnnnnnnnananaaatttggtgnantagcntagcatggtactgactangattatactctgcnacatancaactggtnctccattcgtagatgcgactngacactcaagagtgancgaagcacacccacatcaccnnaccacctcctccanacccttcatcttgcatcactatgatagtaggaatatatagagtatgatggntactagtagtgtagtatgancatgatgacntgnaaatntaatgtatcacttganntnctanantacagatatgactcggnatagctgntgtgtctagactatgtaattagtttatttcancnatcancagtcagatcgtaatctgacntcgcactcagtcgtgcatgatgttgtgantttatagtatctagtttncntgncaccatgtcatggtgatcgtacatccacatgcgtctngtaggatgtgtgtcagcntgttcatangntcgatgtatgtnatcagtgctctnanctcgatgcgtcatcgatcgtctcgtncctctctgaatctatgccgcacntcagtactgtgacttgtcgcatcgctcncnacagtcgctgctgatantagtttctacntactagtagggtactgaccatgcgcatgcagtaatacgtatcatagtagtcntggncttgnctgcgtgcgtacttgntgtagntgatcagtgctagctcttgctgtccgcatcntgctgnctagacttntantgcancgtctgatccgatgtcatcgntnnatgcatgtnactctaatgtgtattaactactncagtacgaccgnactagctacntgaattatcatnagtngtagtccgtctagnacnatagtactgcagacatgtcatggacntgcntctgagancgcacnacgtctgagtgnactataagatcancnatactctnactgtactaccacgncatacttgtngcctaganccgagggatctgtcgtngactgtaccatgagtcgnattatnatgtagcatgaccagcctgtactgactgcatcactcagtagtcctgcgcagn

SEQ ID NO: 4244 - DNA, 1527 bp, Glycine max
  misc_feature (14)..(14): n is a, c, g, or t
  misc_feature (88)..(88): n is a, c, g, or t
  misc_feature (261)..(261): n is a, c, g, or t
  misc_feature (339)..(339): n is a, c, g, or t
  misc_feature (449)..(449): n is a, c, g, or t
  misc_feature (491)..(491): n is a, c, g, or t
  misc_feature (822)..(822): n is a, c, g, or t
  misc_feature (1398)..(1398): n is a, c, g, or t
  misc_feature (1400)..(1400): n is a, c, g, or t
  misc_feature (1418)..(1419): n is a, c, g, or t
  misc_feature (1458)..(1458): n is a, c, g, or t
  misc_feature (1497)..(1497): n is a, c, g, or t
  Peptide Sequence Number=SeqID_7664
  Probeset Number=SeqID_14023
gcgggtggacgtgngctcgcttacacaccagtctccgcatgtgcgctagcctcacggccacctcagcgctcgcaaaggggctcacagntcgcagctgtgctgtcgagagccgatagtcaccagtgccgctgagtccgtgcacccgacactccacgtgagcggaacctactccgtgtgcattcatctcgaccggatctcgatctctctagtcgcttccgtcatagttctcacacgcactggcgctcgcgcctcgcctgctcnacacgtgccgagagagccacgcacgaccgcctcgacaagtacactgtacatttatggacgtccagtaaccagctctgntgctgtgtagtgcgtgcactgccaacggtggggagtacatcctagtggtgagtcagctctgcgcgtgtccatcctgcgatgtagctcatgcgctaggtagagtcagacgntgcgcggctagttactatcttatcatcgtgatcagctcgcgnaatgatgaggggatccgctgcgcggtgtgtgtgtgctacaacaccacatcgcagaagactcgtaagtgcctgcaccgtatattcctatgcactattgtcaccgcctagtgtagttctacacttcattcgtttctagtcttgtgtaagcagcgcaagagtcgaacatatattacgaatgatagtgagtatgatgtgagtgtgcgcgtgtcacaacgttacacaatattgatatcattatcagagattatcacgctatgctgtcatatcgtgagtgtacgcgacgcaccatcctctcacatccagcacatgcacatgtcttgtatgtccgcgngcggatgcgtagcgcctttcgagtcgcatgtgctttgaggttagtgaagtagtgcagttcagaggtaataaagtcaaaagagcacatccacactaccacgcgcgcctgcggtccgttcatgttttcatttcactatataattgtggcatatattaattagtagtgtgtcagtatatcaaagaggtattgttattgtgtagatatatggagtagcgtgcgtgtttatgcttgattctaacagcttgtattctctgtgcgttcctcgtggattgtatctttatccccgtttattgggtattatacaagcatatattgtatataatggtatacatatgtttatgatatttgtgtggttgttgtcatttttatatgtatcatcatctagtacttctatgtggtggccatcgggactctctgtctagtggggtaagataaaattaaacataactctcttcttctctgtggctacgccgtcctccacatactctctcgcgcgccgcgcgttacgtattataattaaaaataatcttattaactattacttcgtgagtgtatgggtcggatgtgtcggtggtntnggagagatggagaggaannatataaaagggtttacataggctcagtgctggttttaanacttttgaattgttttgtttttttcgctttctcgttgtnctcctcttcctttcttaatatattttattt

SEQ ID NO: 4245 - DNA, 1396 bp, Glycine max
  misc_feature (83)..(83): n is a, c, g, or t
  misc_feature (728)..(728): n is a, c, g, or t
  Probeset Number=SeqID_14024
tgcgctcgtgatggcactctgcatcttgcgctctagtgaacatagacagaagcgcgagacgactgtatcttcagacattcgcnacacggtgacgacacgctcgatttattgtacatacatcgcaggtgagtgtgcgtctgtcgcccagcatgacatcgcggcgtctccgtactgtgtgttggccactgagtcagttgctagtagagagagagagtggagctagagtattactgcgggtgtcgtctctgataacgtgcagcggtcacgccgtgggcattcgccgatgcacgagtgaagagcgccgcggtgtgcgtagacgattgaccaccactatatgctgaatcgcccgagcaacgagttttaatctgtttgcaacatatatagaggcactgtcgggggatataatacataagattgtattatagtggtgtcgtgtgcgtggtagagtgtggggcgattgtctccgttcactcatccggccagggacggagagaatcgcgcacttatccaccacacgctccccgcgtcgccctatgaaataagttctcgcgtacctgtcttcacgggtcaggttgccgctttgtaacaacacgcagtacactaatgagcgtcatattgtagtgttatgaagcgtgacgcattcaattctctatcatcagtcgcttgtgctgccgtatacagcgcggtgcgagcaggatagcgttggcacgaaacgggtgtcgtgggtngctccctatccatattgggcagagtaagtctggcagggaagttgagagcttcctacagcttccactcagcacgaggcagccccgcggcgacgacggataacggcgcagacatcccatccgagaataaaggaaataaataattcgtagtgttgttatatgctcgttgtcagctcgttgtgcgcgtgtctgtaatttaaattgaatgcgccttccatacctcgcggaaaggatctaccatcccagcacgccgggcacactacctccgacgaccgcccagcatgagtggtttacggttttgttataatttttactatccttctaggtctgtcatatatggtcgttctctaggcatactcccggtcgccctgcatttcgtctcttacgatgtcagtcgatcacaaagtcttgtaaagcaggggatctgtcggtggcgggccgagttgatttatttcgagttctaccttacatccgtgccatctaatcccacccgcctctttgcttgcgtacgcctttttttcaccatctcccaaaccaaatatcaagacggggagccggggcacttcctaatattcactgcgggggggggggccgcggtaccccattatcgaaattactatattgttcagcgggaggaaaggggtgggtcatgttgaggggtgggtgttgtg

SEQ ID NO: 4246 - DNA, 565 bp, Glycine max
  misc_feature (22)..(22): n is a, c, g, or t
  Peptide Sequence Number=SeqID_7665
  Probeset Number=SeqID_14025
tcgagtcagctacgtaggcccncccccccccgtctttgtgtggacaagacgaaaactagaagagagaagagagagaagagagagaagagagagagagagaaaatggaattaggagagtattcaggatttatttcaaaaatagaagaatatgaaaataaaataaaagaagattatcctctctctcgaaatattcccacacaagaacatgtgaaatcagctgctaaattaatagaacatgaaataacaaaattctctctcgtgatgcaatatgaaaaaggacaagaaattcatttttcttctttattaaattctttggataaattatttgctatgtttactaatttgtgtggatatgctgggcctactatgaaaaagaagataagagcatcctttggggctatattctcaagtgtgaaaaatgtagcactcgaattccgaagattagaattagaaaaagaagaaaaagagatagaagagaaaaaaccaatcgaacaaagagagagagaacaaaaagagagacaacaacaaaaagagaaagagcaaaaagagagagaacagaaagaga

SEQ ID NO: 4247 - DNA, 609 bp, Glycine max
  Probeset Number=SeqID_14026
gcctataaatattgtgttatggttctatctggtgcatacattacatgtaaggatactagacttgcctgtattcgtcatttaaaagacatacataggtcgaaagataattctgaatggaattatgtttataaacctaaacgtgctaaaaaggttattaaattcattgaggcgttacctgatacaaaaggtaatattaacaaactaggattattccaaaagttcattattgctagtgtaagaggttggtttacgaaagatacggatatgttgagatttaaaaaagcttttatatctatggcacgtaaacaaggtaagtccattctagtaagtggcttagtattatatgctttcttatttgataaagagcctaaagaaggtcgacaaatgtttactgcagccaatgacaaatctcaagcaagtatcgtatttaatatggtagcgaaacagttgatgtatttcgtatctaaagtaccagaactcaaaaaagacgttaaaaaggtacgtgaattacttacgcatacaaaagatggctcgtatattcgccctttatctcgtgatactggagcggttgatggttttgatgaactacttgcagtcgaactcgaatca

SEQ ID NO: 4248 - DNA, 2460 bp, Glycine max
  misc_feature (11)..(11): n is a, c, g, or t
  misc_feature (13)..(13): n is a, c, g, or t
  misc_feature (47)..(47): n is a, c, g, or t
  misc_feature (61)..(61): n is a, c, g, or t
  misc_feature (85)..(86): n is a, c, g, or t
  misc_feature (110)..(110): n is a, c, g, or t
  misc_feature (115)..(116): n is a, c, g, or t
  misc_feature (196)..(196): n is a, c, g, or t
  misc_feature (201)..(201): n is a, c, g, or t
  misc_feature (205)..(205): n is a, c, g, or t
  misc_feature (210)..(210): n is a, c, g, or t
  misc_feature (212)..(212): n is a, c, g, or t
  misc_feature (272)..(272): n is a, c, g, or t
  misc_feature (277)..(277): n is a, c, g, or t
  misc_feature (284)..(284): n is a, c, g, or t
  misc_feature (336)..(336): n is a, c, g, or t
  misc_feature (343)..(343): n is a, c, g, or t
  misc_feature (345)..(345): n is a, c, g, or t
  misc_feature (354)..(354): n is a, c, g, or t
  misc_feature (397)..(397): n is a, c, g, or t
  misc_feature (416)..(416): n is a, c, g, or t
  misc_feature (439)..(439): n is a, c, g, or t
  misc_feature (464)..(464): n is a, c, g, or t
  misc_feature (475)..(475): n is a, c, g, or t
  misc_feature (478)..(478): n is a, c, g, or t
  misc_feature (489)..(489): n is a, c, g, or t
  misc_feature (491)..(491): n is a, c, g, or t
  misc_feature (508)..(508): n is a, c, g, or t
  misc_feature (540)..(540): n is a, c, g, or t
  misc_feature (574)..(574): n is a, c, g, or t
  misc_feature (590)..(590): n is a, c, g, or t
  misc_feature (641)..(641): n is a, c, g, or t
  misc_feature (681)..(681): n is a, c, g, or t
  misc_feature (741)..(741): n is a, c, g, or t
  misc_feature (754)..(754): n is a, c, g, or t
  misc_feature (759)..(759): n is a, c, g, or t
  misc_feature (791)..(791): n is a, c, g, or t
  misc_feature (797)..(797): n is a, c, g, or t
  misc_feature (834)..(834): n is a, c, g, or t
  misc_feature (938)..(938): n is a, c, g, or t
  misc_feature (950)..(950): n is a, c, g, or t
  misc_feature (1008)..(1008): n is a, c, g, or t
  misc_feature (1084)..(1084): n is a, c, g, or t
  misc_feature (1147)..(1147): n is a, c, g, or t
  misc_feature (1162)..(1162): n is a, c, g, or t
  misc_feature (1178)..(1178): n is a, c, g, or t
  misc_feature (1180)..(1180): n is a, c, g, or t
  misc_feature (1195)..(1195): n is a, c, g, or t
  misc_feature (1220)..(1220): n is a, c, g, or t
  misc_feature (1243)..(1243): n is a, c, g, or t
  misc_feature (1245)..(1245): n is a, c, g, or t
  misc_feature (1301)..(1301): n is a, c, g, or t
  misc_feature (1315)..(1315): n is a, c, g, or t
  misc_feature (1341)..(1341): n is a, c, g, or t
  misc_feature (1375)..(1375): n is a, c, g, or t
  misc_feature (1468)..(1468): n is a, c, g, or t
  misc_feature (1471)..(1471): n is a, c, g, or t
  misc_feature (1508)..(1508): n is a, c, g, or t
  misc_feature (1701)..(1701): n is a, c, g, or t
  misc_feature (1736)..(1736): n is a, c, g, or t
  misc_feature (1858)..(1858): n is a, c, g, or t
  misc_feature (1927)..(1927): n is a, c, g, or t
  misc_feature (1947)..(1947): n is a, c, g, or t
  misc_feature (1971)..(1971): n is a, c, g, or t
  misc_feature (1981)..(1981): n is a, c, g, or t
  misc_feature (2047)..(2047): n is a, c, g, or t
  misc_feature (2071)..(2071): n is a, c, g, or t
  misc_feature (2092)..(2092): n is a, c, g, or t
  misc_feature (2136)..(2136): n is a, c, g, or t
  misc_feature (2157)..(2157): n is a, c, g, or t
  misc_feature (2161)..(2161): n is a, c, g, or t
  misc_feature (2183)..(2184): n is a, c, g, or t
  misc_feature (2239)..(2239): n is a, c, g, or t
  misc_feature (2260)..(2261): n is a, c, g, or t
  misc_feature (2263)..(2263): n is a, c, g, or t
  misc_feature (2280)..(2280): n is a, c, g, or t
  misc_feature (2309)..(2309): n is a, c, g, or t
  misc_feature (2313)..(2313): n is a, c, g, or t
  misc_feature (2336)..(2337): n is a, c, g, or t
  misc_feature (2341)..(2341): n is a, c, g, or t
  misc_feature (2344)..(2344): n is a, c, g, or t
  misc_feature (2346)..(2346): n is a, c, g, or t
  misc_feature (2349)..(2349): n is a, c, g, or t
  misc_feature (2357)..(2357): n is a, c, g, or t
  misc_feature (2370)..(2370): n is a, c, g, or t
  misc_feature (2372)..(2372): n is a, c, g, or t
  misc_feature (2386)..(2387): n is a, c, g, or t
  misc_feature (2406)..(2406): n is a, c, g, or t
  misc_feature (2409)..(2409): n is a, c, g, or t
  misc_feature (2413)..(2423): n is a, c, g, or t
  misc_feature (2425)..(2425): n is a, c, g, or t
  misc_feature (2429)..(2438): n is a, c, g, or t
  misc_feature (2444)..(2444): n is a, c, g, or t
  misc_feature (2449)..(2449): n is a, c, g, or t
  misc_feature (2459)..(2460): n is a, c, g, or t
  Peptide Sequence Number=SeqID_7666
  Probeset Number=SeqID_14027
cccactaggancngcgcagcccgccgcacgccgccacgacgccgacntcgccctcggtccngagctcgactacacagtcgtaganngcgtgttcatgagcgaacccgtcnggacnnagcgttgttgtaatgcagtttgaggtggtcgttagtagatgattgatgtgttgtagtgtggcacgatgcgcaaatcgggngagtngacntgtantntgtgctatgattcatagcgcgggaaaagtagtcgatcacgagccgctcgttcgtcatgtncatcncgtgtgntcactatgagtaataataaagtattcgagtgacttgatccattcatacctancgtcatnancgtgcaaancaaatagcaaatgtcatatactgttcatagagcagcgtctgantgactcgtcacgcatagantcgatgcgaggacgcgatgatcnaggacgatatcagtatcaatagtanagacactaaantangtagcacagtntncaatatatcatgtagcntacgttagtgatgacgtcactgtatttcactncacgagtctctcatagaattcagtgtatcagtcntctaagcgagttagcntcgatagcagcgacatatgacgtcaatgcgactacgcgctacatgacagcnctcgccatctcgtcagccagctcagtatatacgagatcgnagcagcgacagtaagtcgcaacagtcgcagcctgtctgtcgtatgcgtcgatcactgtgntgctgacagtacnagcangatgtacgtagtacgtatatactgatgtcgtngtatantatcatctcagtagagtagtaatgatcgagcatgatntgatcgatgtcgaatgtcgagcgctgtgagtacactcaccactctacatcgcacatcactcgagtacgcagtacgtctcagtacacagctcggatcacacttancgagccatgctntcactcattaatgtgcgtctcgttatacgtgctcgagcagcgcgtcgcgtgtgtcagntacacgtgtacgtacttctgagcatatcatatctcacactgattactatcgatacactcactatcactatacatcntacgcgatgtatcacatcacatcgatatgtctacacatcagattcgactcttcgtctgtcgtnactatatcagtatanaatagagtactatatnantatcacgtctcacgnacgatatgcatagataagtctctcnactactcttactctcacgtcatncntacgtcgtactagcgataacgtcatcggtgacgctgtcgatcgctgctgtcgcagngagcgtgacgctgngtgagcatgtgcggtcgtgactatgnacaaagacacacagcgaatcgagagtcgcgtcantacatatataacgactcagacgacgctgatgtcgtagtgtggcgccgttatgctagagaacgctactactatacacgacgcgtgacttgcgcngcntagtgcatcagtatatatgtactgtctctctacagtncgcgttgaaaatactgtgcgtgcgcgtcgacgtgcgagactgcgtcgtcacacgtagcatgtgcaaactgtagatagtgtgctacagatcgtcagacgcacggagatacgcagatgcggatcgtgcgagacagcatagagtactcgtatgtacggcgcagtgtgtactggaagacgcagaatcgaataggacnctaacagcggaagatgcaagatctatatcaagtangacatacctgcgcaatgagcacatcaataacaagaagatagaagtcatcgtatgatagacacgctagcaacatccctgtgcttcatattaaccactcatagtatatatgcgagctgtgtaangtcacacgagtgcgacacatcctagtatgcatgatcgattcgaagcaggatagaattatgtaatacatncatatctcgctcctcgtcancgtcgcctctcctgtatcgctcgnctctatcagnacactattgtaccctatatcgtctacattcgacatacagtgtgctctcgtcgctgatctctgctcnctcgtcgtgttgcgtcttagtcancagcgcactctgttacgtagncgtctgtagagacatacacgactagctcgatctatacgacatcntagcgacagatacattaacantagncgataaatctaagttaaagatnnataaatcctaacaaatacacaagtgaacagttaacactgatacaatcacaacgtnacccaatacgtacactactannancccgagagacatgacgnattgagcacatgatagacacacacagagnatgncactgagtgacacgatcagtcgnnggcnctnanggnacgcgcgngcgggggcggcgngngggcgagtgcgcgnnccggggtccgcggcggggnggncggnnnnnnnnnnntngtgnnnnnnnnnnggcggnggggngggggggggnn

SEQ ID NO: 4249 - DNA, 1483 bp, Glycine max
  misc_feature (5)..(5): n is a, c, g, or t
  misc_feature (10)..(12): n is a, c, g, or t
  misc_feature (21)..(27): n is a, c, g, or t
  misc_feature (56)..(56): n is a, c, g, or t
  misc_feature (67)..(67): n is a, c, g, or t
  misc_feature (1179)..(1179): n is a, c, g, or t
  misc_feature (1261)..(1261): n is a, c, g, or t
  misc_feature (1483)..(1483): n is a, c, g, or t
  Peptide Sequence Number=SeqID_7667
  Probeset Number=SeqID_14028
ccccnccccnnnccccccaannnnnnnaaaaataacaccgacccgccgcagcccanccatgtactcntttttccgcatatgttggtactgtgggctcccctctctcgtaggaccgcatgagccatccgaataaagccgaccatactgcactctttcttattctccctacaacaccttcgccctcctggctccgcctctatagctgccaaacgaacaggagtatatatatagtattatatgtgatttgtctgactatatatagaggtggacacaattgatagtgtaataatctggaccacgggcgttgactcctgccgcacctcttcgtacagcattacattctcctcgctccctccggcgcgcgcttgtttgatcggtggacgtacgcgaacggtcgttgcgaactccgctgcgcgaggcggaaagatgtggcgccgcgaatacagtggataacgtgcagagcacacacgcgcgtgcgcgtgcggtgagtcaagcgcaaaacgagctcggtgaggtcttcgcctctgtttgcggacgtctaagtgtgcatgttggtgttattgcaatcttctagtccgcgtcacatactctccgtgactttcgccgattctggattgtgacagacactagtagtgttatacgcatctggtacacatccccacccctcacctcacacggacgcccagtagtcatgacccgcatctaacacatactctccaaacactaatcaaacaaatcatatctaatatactagtctgaatgcattatcttccctccacacttccttacttccgtgtcattgtcgtcggctgacgatatcgtttcggacgtgagctcttatactgatggtatctcgcgactacacagagagagcctcttcagagaacaactgctggtccacctcactatgttactgttatcacaaacaaagaaatatataattactaataccctagaaacacagagctacaaataacttcattacgcacgtcctctaggtgtgcccacacttgtctttcatcactgctctcgcccgtcatatcactcgccactccctacggcagcgacgaggttctatcctctctctcctccgtcacttctctcttcctacacgaactcgcagatctgacgtatgatatatacccataataatgtacaatatcctcagtatggagttanttaagcactataatagaacaatcttctctcttctcgcccacatagactcactgctcctcttcctctctctctcacccatgtntgtgattcgattttatactaaaagacaccacgcgcatgaggtcgcggaagaggggacccgcgaatacactcaactcgacaagaatataccaaatacactctctcccagtgacagtcccattatacactatgagttccgcccgtctcacagtatccctctccctgtccttgcactcctctcactgttctccaccttacttccgtaccctcgcactctaactcn

SEQ ID NO: 4250 - DNA, 587 bp, Glycine max
  Probeset Number=SeqID_14029
acaagttcccccgcgctcccccctccgcttcgactattgtcgttcccgcgccgcccgaggccgggcgggcccaggacctaggatctgctcttgccaagataatttttcgtacggttccctctacttcgctttcaaaactttcataaaacaaaatggcgggtcgtggaaaaactctcggatctggggttgctaagaaggcgacgtctcggagcagcaaggcgggtctccagttccccgtcggccgtatcgcccggttcttgaaaaacggcaagtacgccgaacgtgtcggcgccggagctccggtctacttggccgccgtactcgaatacctcgccgcagaggttttggaattggctgggaacgcggcgagggacaacaagaagacaagaatcgtgccgcgtcacattcaattggcggtgaggaacgacgaggagctgagcaagttgcttggagacgtgacgattgctaatggaggtgtgatgccgaacattcacaatcttcttcttcccaagaaggctggtggtgcttccaaaccttccggtgacgacgaatagatctcagtaatgaagtgtagatttagattagtc

SEQ ID NO: 4251 - DNA, 619 bp, Glycine max
  Peptide Sequence Number=SeqID_7668
  Probeset Number=SeqID_14030
gattacaagcccgtggaaggtataatgattgcccactctgggcattctgtggtaactcttttcaggtttggggagatggccttgagccatactaaaacaagaatggaagaggcctggacaatcgacgaggtgaagttcaatgtgcaaggactttctgtggagtggtacattccgccagctgagggagagaacagcgttgagtcacagaagcttgcgaacgttgctcaggagtagaaatagcggagaacatcactatcagtacataacactaaagttgtggcggtgcagagattacataaatgcagtatttatagcatgatgtggaatatggaaagctatgggatagcggtaagatacaattgatggcaacggataatatcactgagtggttgctgacgactatgctggacagtatatagcaattgcttagctggaacgaatcaaggaggatgttaccaagaagtatgctggatgaaaagactgcacagcggctgctcataggcttaacagagagtatggacctaagttgaatgaggagatgcagtactgtgttggacaaccagaggaaattagcaagcttgctaaagtgaaagctcaagtttagaaggtaaaaggagta

SEQ ID NO: 4252 - DNA, 1576 bp, Glycine max
  misc_feature (12)..(12): n is a, c, g, or t
  misc_feature (14)..(14): n is a, c, g, or t
  misc_feature (50)..(51): n is a, c, g, or t
  misc_feature (53)..(53): n is a, c, g, or t
  misc_feature (58)..(59): n is a, c, g, or t
  misc_feature (97)..(97): n is a, c, g, or t
  misc_feature (484)..(484): n is a, c, g, or t
  misc_feature (527)..(527): n is a, c, g, or t
  misc_feature (539)..(539): n is a, c, g, or t
  misc_feature (575)..(575): n is a, c, g, or t
  misc_feature (705)..(705): n is a, c, g, or t
  misc_feature (777)..(777): n is a, c, g, or t
  misc_feature (832)..(832): n is a, c, g, or t
  misc_feature (874)..(874): n is a, c, g, or t
  misc_feature (933)..(933): n is a, c, g, or t
  misc_feature (960)..(960): n is a, c, g, or t
  misc_feature (988)..(988): n is a, c, g, or t
  misc_feature (1052)..(1052): n is a, c, g, or t
  misc_feature (1054)..(1054): n is a, c, g, or t
  misc_feature (1067)..(1068): n is a, c, g, or t
  misc_feature (1072)..(1072): n is a, c, g, or t
  misc_feature (1213)..(1213): n is a, c, g, or t
  misc_feature (1225)..(1225): n is a, c, g, or t
  misc_feature (1265)..(1265): n is a, c, g, or t
  misc_feature (1318)..(1318): n is a, c, g, or t
  misc_feature (1350)..(1350): n is a, c, g, or t
  misc_feature (1360)..(1360): n is a, c, g, or t
  misc_feature (1389)..(1389): n is a, c, g, or t
  misc_feature (1406)..(1406): n is a, c, g, or t
  misc_feature (1412)..(1412): n is a, c, g, or t
  misc_feature (1447)..(1447): n is a, c, g, or t
  misc_feature (1471)..(1471): n is a, c, g, or t
  misc_feature (1512)..(1512): n is a, c, g, or t
  misc_feature (1550)..(1550): n is a, c, g, or t
  misc_feature (1563)..(1563): n is a, c, g, or t
  Peptide Sequence Number=SeqID_7669
  Probeset Number=SeqID_14031
tggtgttttggngngtgttgtgtggctgctcgtctccccccttctcatcnngngcgcnnacgggaaccatcacacagaagatacgtcgaaaatgtantacacatacacagccgaatacgaagctcgtgttgtctcgctcggagctgtatatgtgagcacacacgtgacgtagaacggcagtaatataatgaaaagacattgatatataagcgcttgtcacgagatactatgagacatatgtagtatgtgtcaacatgataggatgagatgttgatggctatgtctgcgttagtctagatctacacgattctcacagcggagacgcttgccgcggcgaagtgtccgccagacacggcggtgcgatcgctatacgaccaccagagattaatgaataaagatgttaaatatgaaaatatacgagaaccgaggaagatgacacgccgccggccgtgccagcgcatgcgagcgaataatacattgaggngcgaaagcatatactagagacataatagatagtacaatagcanggcgcgcatggntcccatagatatctgcgcaacatatattaacttcancttatgcatcactctacacagcctcccgcttacactaacgtcatctgatatatatcactatgatctcgcacgcactcctgtcgtactcgcctctatgcgtagagtacaggcaagaacatgatgacgagtngaagtctggagacacaatatggacaggcacagatagacgaatactgattatatgttgagttgataataaatnagttagtcattgatatacgtactgtatacatccgccagcgcgctagagcagcacngcatcctctgacatgtctcacactctgtctcatcatgtgtcnttctggtctgtcgctggcgcgagtgcttgtgcgtggtgcgtgcggttcgtatacgtccncgatagagctgctgagactgtgagttnacgaggacgaacgagaaaggacgagcangatgtcagcagatatcatagaagagaacagtaggactgcacttataaatgagagacgtaatatnantacaacacactanncacncatatatagatataactacacccagcccaccacacctgctacgcgtctcgcgtgcacgcactatgttagttgatatagtagcacctactccacccctctcttacatcatcactgactcgttcggatgctcatcagtgctgncacggcttcgcncatatcacacgtgtacgcaatacgatccacgatgtcgacnctgcacatactgcccatagccttagcagcacgatatccggtcactagtacgcnctaggcataagcgtagctgcgatgtgcgtganactgatagancgagcggcgagatagacgagaccctgagnatgtatgtcgtagagcntggatngcagcgtagtgcgcgacaccatatcttatgacggngtgtcgaggcactctgatatcatnctctcaggagctcaaagcagacgaacagagctgatactagnagatcgtagtaggacatgcactgcacaacagcccaatngtcagctacatcncagatgacacatg

SEQ ID NO: 4253 - DNA, 1078 bp, Glycine max
  Probeset Number=SeqID_14032
agactttttttgcttggtttccgacagaaacagatcagagatggattagaggaaaaaggaaaaaaaaaaccaaacaaaaaggaaaggttgagatctgaaggaaggaagaaagaagaagaaaaagaaggtggaagcagataacatgtctgcgattgtttgcggtagcaagagatctctgttcgaggatttgtccgccgcttcttcccctcccgtctccaagaaactccgttacttctcatcctcttctccgcctcgtttcccccctcctcctcctgcctcctcctcgcttctcctcgatcacctcgccgcgattttccccgatatggatcatcagattcttgagagggcaattgaggaatgtggagatgatattgattctgcgattagatgtttgaatcagcttcgtttagagtcaacaaccaataagaactcagaatcatctctaatccaagaagaagcaaaagttgaagctcctcagcaagggaaggaggaagaagtcttgaacatggatggcaccgagtgggttaacctctttgtcagtgagatgatgaatgcttcagacatgaaagacgcgaaagaccgtgctgggagagcgttagaagctttggagaagtcgatcaacgcacgtgctggtgccgatgcggcgatgcagagcagtctccagcaggagaactcgatgctgaggcagcagttggaagctattgttcaggagaacggtttgcttaaaagagcggtggtgatgcagcagaagcggcagaaagagagtgatgatcaaagccaggagttgcagcatctgaggcagatggttactcagtatcaggagcagctgaggactcttgaggtgaataactatgctctcacgcttcatctgaaacaagcgcagcagaacaatagttctatcccgggaaggttccatcctgacgtgttctaatgcgtttgtcatgtcagtgagaggaatgcttatctaatttcagtttccaatgtttgttgtatgttgttcttcgttggtttgtgactatttataaatacatgaattatggaatgatttatagttggggaataacagtttgtccgaagc

SEQ ID NO: 4254 - DNA, 423 bp, Glycine max
  Peptide Sequence Number=SeqID_7670
  Probeset Number=SeqID_14033
ctgacggacccaccgtactcgcttggcccgaccgtcgactacgacgcgcgcagggcccagtggctccgcgacaacccgcggttcccggccttcgtcgcgccggggaggccccgggtgctagtggtcaccgggtcgtcaccgcgccgatgcagcgaccccgacggcgagcacttgctgctccgggcgttcaagaacaaggcggactactgccgcgtccacggcttcgacatcttctacagcaccgcggtgctcgacgccgagctgtcggggttctggtccaagctgccgctgctgcggacgctgatgctcgcgcacccggagacggagctcctgtggtgggtggactccgacgtcatcttcaccgacatgctcttcgagccgccgtgggacaagtacgctgctcacaacctcgtgctcccgggc

SEQ ID NO: 4255 - DNA, 733 bp, Glycine max
  Peptide Sequence Number=SeqID_7671
  Probeset Number=SeqID_14034
ccatccagcaagttacattgttggttactacacagccagccacctagctagccagccatgggtatgggttccaagatgaagcgtagcagcagcggcaaccttgttatgtcatgcgtagtcctttccctagccctgctcgtcgtcagggcagcggcggtggcgaggaacagcccagactcctgctgcaaggagcagtgtagcggccgtcaggactacaaaccatgccacgccgcgtgctggtggggcatgcatctgggagacctgccaaactgccacctgcgctgccgctacgcgaaacactacgacacatgcttcgaacagtgcaaaaaagaacaagaaggaagtgggggaagagttgggctacttgcggcaccggcagagggacaaaaccaaggagaagaagccaaaccaggaggagcagctgggctcctggagatgccaacggagcttgccggatgaggagaagaagagaggaggagggcagaggacttgcgactgagactatgatccctcctccttctgttgccaggactgcatgatctgacgccaaatatactttttttgtttttttcctagctcaccgatcctcttgttctgggtgtgagcctgcaaccctgtgcgtctgccacactcttaagatcgccacgatgtgctgctaaaacaccacgaaccgtggcgactaaggccaccatcattttccctttcagaataaaaggagttttaggttttaccc

SEQ ID NO: 4256 - DNA, 2135 bp, Glycine max
  misc_feature (1)..(1): n is a, c, g, or t
  misc_feature (3)..(3): n is a, c, g, or t
  misc_feature (51)..(52): n is a, c, g, or t
  misc_feature (58)..(58): n is a, c, g, or t
  misc_feature (61)..(61): n is a, c, g, or t
  misc_feature (63)..(64): n is a, c, g, or t
  misc_feature (106)..(106): n is a, c, g, or t
  misc_feature (179)..(179): n is a, c, g, or t
  misc_feature (186)..(186): n is a, c, g, or t
  misc_feature (189)..(189): n is a, c, g, or t
  misc_feature (267)..(267): n is a, c, g, or t
  misc_feature (273)..(273): n is a, c, g, or t
  misc_feature (277)..(277): n is a, c, g, or t
  misc_feature (317)..(317): n is a, c, g, or t
  misc_feature (323)..(323): n is a, c, g, or t
  misc_feature (347)..(348): n is a, c, g, or t
  misc_feature (411)..(411): n is a, c, g, or t
  misc_feature (419)..(419): n is a, c, g, or t
  misc_feature (444)..(444): n is a, c, g, or t
  misc_feature (446)..(446): n is a, c, g, or t
  misc_feature (448)..(448): n is a, c, g, or t
  misc_feature (481)..(482): n is a, c, g, or t
  misc_feature (487)..(487): n is a, c, g, or t
  misc_feature (509)..(509): n is a, c, g, or t
  misc_feature (557)..(557): n is a, c, g, or t
  misc_feature (590)..(590): n is a, c, g, or t
  misc_feature (646)..(646): n is a, c, g, or t
  misc_feature (648)..(648): n is a, c, g, or t
  misc_feature (675)..(675): n is a, c, g, or t
  misc_feature (682)..(682): n is a, c, g, or t
  misc_feature (706)..(706): n is a, c, g, or t
  misc_feature (708)..(708): n is a, c, g, or t
  misc_feature (740)..(740): n is a, c, g, or t
  misc_feature (746)..(746): n is a, c, g, or t
  misc_feature (752)..(752): n is a, c, g, or t
  misc_feature (766)..(766): n is a, c, g, or t
  misc_feature (769)..(769): n is a, c, g, or t
  misc_feature (774)..(774): n is a, c, g, or t
  misc_feature (801)..(801): n is a, c, g, or t
  misc_feature (803)..(803): n is a, c, g, or t
  misc_feature (813)..(813): n is a, c, g, or t
  misc_feature (832)..(832): n is a, c, g, or t
  misc_feature (836)..(836): n is a, c, g, or t
  misc_feature (850)..(850): n is a, c, g, or t
  misc_feature (870)..(870): n is a, c, g, or t
  misc_feature (881)..(881): n is a, c, g, or t
  misc_feature (902)..(902): n is a, c, g, or t
  misc_feature (914)..(914): n is a, c, g, or t
  misc_feature (922)..(922): n is a, c, g, or t
  misc_feature (925)..(926): n is a, c, g, or t
  misc_feature (937)..(937): n is a, c, g, or t
  misc_feature (940)..(941): n is a, c, g, or t
  misc_feature (1017)..(1017): n is a, c, g, or t
  misc_feature (1029)..(1029): n is a, c, g, or t
  misc_feature (1050)..(1050): n is a, c, g, or t
  misc_feature (1052)..(1052): n is a, c, g, or t
  misc_feature (1058)..(1058): n is a, c, g, or t
  misc_feature (1068)..(1068): n is a, c, g, or t
  misc_feature (1088)..(1088): n is a, c, g, or t
  misc_feature (1117)..(1117): n is a, c, g, or t
  misc_feature (1126)..(1127): n is a, c, g, or t
  misc_feature (1133)..(1134): n is a, c, g, or t
  misc_feature (1271)..(1271): n is a, c, g, or t
  misc_feature (1288)..(1289): n is a, c, g, or t
  misc_feature (1297)..(1297): n is a, c, g, or t
  misc_feature (1303)..(1303): n is a, c, g, or t
  misc_feature (1306)..(1306): n is a, c, g, or t
  misc_feature (1314)..(1314): n is a, c, g, or t
  misc_feature (1316)..(1316): n is a, c, g, or t
  misc_feature (1319)..(1320): n is a, c, g, or t
  misc_feature (1327)..(1327): n is a, c, g, or t
  misc_feature (1351)..(1351): n is a, c, g, or t
  misc_feature (1354)..(1354): n is a, c, g, or t
  misc_feature (1368)..(1369): n is a, c, g, or t
  misc_feature (1372)..(1372): n is a, c, g, or t
  misc_feature (1374)..(1375): n is a, c, g, or t
  misc_feature (1385)..(1385): n is a, c, g, or t
  misc_feature (1387)..(1387): n is a, c, g, or t
  misc_feature (1422)..(1422): n is a, c, g, or t
  misc_feature (1457)..(1457): n is a, c, g, or t
  misc_feature (1463)..(1463): n is a, c, g, or t
  misc_feature (1465)..(1465): n is a, c, g, or t
  misc_feature (1479)..(1479): n is a, c, g, or t
  misc_feature (1481)..(1484): n is a, c, g, or t
  misc_feature (1487)..(1490): n is a, c, g, or t
  misc_feature (1553)..(1554): n is a, c, g, or t
  misc_feature (1557)..(1558): n is a, c, g, or t
  misc_feature (1597)..(1598): n is a, c, g, or t
  misc_feature (1600)..(1601): n is a, c, g, or t
  misc_feature (1603)..(1603): n is a, c, g, or t
  misc_feature (1614)..(1614): n is a, c, g, or t
  misc_feature (1652)..(1652): n is a, c, g, or t
  misc_feature (1674)..(1674): n is a, c, g, or t
  misc_feature (1689)..(1689): n is a, c, g, or t
  misc_feature (1721)..(1721): n is a, c, g, or t
  misc_feature (1727)..(1727): n is a, c, g, or t
  misc_feature (1746)..(1746): n is a, c, g, or t
  misc_feature (1776)..(1776): n is a, c, g, or t
  misc_feature (1779)..(1779): n is a, c, g, or t
  misc_feature (1796)..(1796): n is a, c, g, or t
  misc_feature (1830)..(1832): n is a, c, g, or t
  misc_feature (1835)..(1836): n is a, c, g, or t
  misc_feature (1839)..(1842): n is a, c, g, or t
  misc_feature (1844)..(1844): n is a, c, g, or t
  misc_feature (1849)..(1850): n is a, c, g, or t
  misc_feature (1852)..(1853): n is a, c, g, or t
  misc_feature (1859)..(1859): n is a, c, g, or t
  misc_feature (1866)..(1866): n is a, c, g, or t
  misc_feature (1883)..(1883): n is a, c, g, or t
  misc_feature (1885)..(1886): n is a, c, g, or t
  misc_feature (1899)..(1899): n is a, c, g, or t
  misc_feature (1902)..(1904): n is a, c, g, or t
  misc_feature (1947)..(1947): n is a, c, g, or t
  misc_feature (1968)..(1968): n is a, c, g, or t
  misc_feature (1999)..(2001): n is a, c, g, or t
  misc_feature (2028)..(2029): n is a, c, g, or t
  misc_feature (2051)..(2052): n is a, c, g, or t
  misc_feature (2093)..(2093): n is a, c, g, or t
  misc_feature (2100)..(2101): n is a, c, g, or t
  misc_feature (2110)..(2110): n is a, c, g, or t
  misc_feature (2112)..(2113): n is a, c, g, or t
  misc_feature (2132)..(2135): n is a, c, g, or t
  Probeset Number=SeqID_14035
nangcacagcgactgcacgagtcgctgactgacgccgtgtgtacgtgtgtnngtgcanacnanncgacgtcgcgaccgtcccgatgtgtggtgcatgcagcagtgnagtcgctgcgtgagcagagttgtcggtcgtgtgcgcccgtcatgtcagctaccgtgcgctgtgcgtgatagtntccgtanatngcgagtcgtgatgtcgttagtagcgatcgtctgtgagtatgatcgcgtacgactgacgactacgtgaggatccatgcngtagcntgtntattctgcatcaagctcggcatgagcgcgtgtgcacgtantgccanctgacgctgcgacgcagcgtaagnntcccgcccgcgcgcgtcatctgcgtctggtaagacactgtctgcgcagcgagccgcgatgtgncgctcgcngcgctcgtcgagagaagtagagatngngncgccgtgcgcggcgtgtatacgtctctctcacnncgtcngttgtagtagctgacgtgatanttgatccctcagctacgacacacgtcgtgatcgtgcgtatggtgtgtncaggatgcctgatcgcgattgtgtgtggcggcncgctgatgagcgcgcgtgtcatcgttgcgtaggtgcaatgttcggtgctgtacgtntntctcctgcagcgtgtatgttgtgcgtnctgacgnccgcgcgctgccgaccgtcacacntncgtctagtacgttgagatgtgagtcacatgangcgcgnggttgngtgtgtgtgtgtcntcnctcangctacatctactgacgatcatgcccancntctcccacantatgtctgtgcatcggtanttangatcgtatgtgcanttatgagtattgatgtatantgacggacatnatatgatagtggatagatggnatatgtatctcnctcacacnccnntgtcgtcatcnccnnctgcgcgtatgctcgtgtgtgtgtctacgacgcacgtgagttactagcgagtccgcatacatctaataatgtgtantaggtaagtgangggtagctgttcgtgtgcacngntcactncagctgcatngtgtagcgtctagtcactanactcatcacacatgcgcgcagtgctgtcngcgtgtgtnntacgtnngtcgtgtcaggagtatatctgtagtatacgactgtcgcggtcgaggcgtgtgtcatctgtgggcggtgtgtagtcgcgctgcgtgagtttatgacatccatctcaatatgcgtctgcatgagcacgtgtagtgcgcntcagctgtccgctcgtnntcctcttntgtgtngtngcgcgacncncgnngcaccgncacgcgacgtcgtcttagtgaatncgnccggcgcgcgcgannccncnnccgctcgtcngncgtgtcgctcgatcgttggctcggagtgtgcgagnagacggcgcgtgcaagcgtgcggggtacgtgtgangtctgncngacagatgctacancnnnnacnnnnacacgcgcgtctgttcggagacacagtcgacctacgctcgatcgcgcggcaggtgcgcgaganncgnncgacgcggcagtcgacgtcgtccaacgcacatcaccagnntnncntcacgtatgcntgtagaatcatatatctcacacaatcactcgtataganggaaagatgtagagacgcgcanaccctaactcacgcncccagcgccagcgcactctcgcgcgcgtagcngcacgngcgcgcgaatgtacgcggnacatcagacggagacgtaattggtgtattnttngttttctttgggcggtngagagaggcctgatcgcagcgccgcaatgagctnnnaannacnnnngnggggnngnngaggtnggtgtgnagagaacacagctctcnannagtattgcaaagnacnnncgacgacgcaagtatcgtgtgtgtggcagagtaaatacaatanatgtagtgttgtatattttantagtttatatgtatgatagtatttgtttcannnattatcttactctcgcttttttttttnntttcgcgttcgctacccatttnnttaataccttaaacaaaaagagagcggggaggggagcgcgnggggggnncgcgggagngnngcgcgggccggcgaacggnnnn

SEQ ID NO: 4257 - DNA, 1485 bp, Glycine max
  misc_feature (79)..(79): n is a, c, g, or t
  misc_feature (246)..(246): n is a, c, g, or t
  misc_feature (248)..(248): n is a, c, g, or t
  misc_feature (672)..(672): n is a, c, g, or t
  misc_feature (923)..(923): n is a, c, g, or t
  misc_feature (925)..(925): n is a, c, g, or t
  misc_feature (1048)..(1048): n is a, c, g, or t
  misc_feature (1135)..(1136): n is a, c, g, or t
  misc_feature (1153)..(1154): n is a, c, g, or t
  misc_feature (1242)..(1242): n is a, c, g, or t
  misc_feature (1244)..(1247): n is a, c, g, or t
  misc_feature (1250)..(1251): n is a, c, g, or t
  misc_feature (1254)..(1254): n is a, c, g, or t
  misc_feature (1308)..(1309): n is a, c, g, or t
  misc_feature (1332)..(1333): n is a, c, g, or t
  misc_feature (1337)..(1337): n is a, c, g, or t
  misc_feature (1350)..(1350): n is a, c, g, or t
  misc_feature (1355)..(1355): n is a, c, g, or t
  misc_feature (1357)..(1360): n is a, c, g, or t
  misc_feature (1365)..(1366): n is a, c, g, or t
  misc_feature (1372)..(1372): n is a, c, g, or t
  misc_feature (1450)..(1450): n is a, c, g, or t
  misc_feature (1462)..(1462): n is a, c, g, or t
  misc_feature (1471)..(1471): n is a, c, g, or t
  Peptide Sequence Number=SeqID_7672
  Probeset Number=SeqID_14036
ctatagatcgtatgctagtgaatagcgtagagatagtagtgctggacgtagacatacagaattatattgtattgcttcntattgcgtactatactctatgcgttggtcgtgcgaactaacgctgcgagtcaatccgagtaatctcataatctagtctcttctcgctcgtgctgtgcggtgtcactaaagaggcgcgatggaggtgagagcatagaggacgtgggtgtgctatggtggcgtgtggcntngcgcggtgctgtcaacactgtgtattaatatacaagtcaggtagggtgctctatgcgctgtcccgcacactctatgttgcgtatgctctcatgtatcgcattaacgtcacccgataccactcgtcggcggcggaaaacaatgagagtgacagatacataaagagaaataagcgtgtcgcgcgcgtgctacagaatacgctcgcgcgcgcacggcgcccacacacactctaggtcgtaggagaatgatggtatgacatgtgggtgacgtcaagatcaatcgaagtaacagagaaggatgagagtgagtctataacgtacgtcactgagccgtagctttcgtctccgacacccaatacacactctagctaccatagtgatactcactctcttcgtgtctgaggtgcatggcagatgggggtgtatnaattgtgtcgtgcgttaacataagtagtagcgcgcgctgaaattgatataactcgcgcttatcagcacaaatataatccgactctgttgctatcctagtaggtggtgtccttgcgtcaactagcgctgcttcacgcatatatcgagtgattaacactacgaagcgtatatatgacagtgaaagcacaagatcggaataataaaagatagagtgagcggataactcactgtgttgttgcggatatatataantncgagtatttggtgtgtggtggggcgcggtcgtggtatcagtttatcgtcgcgttctgatccgtcgaccctctcattcatgcgtgatccacctatgccgtcttcgcccccgtcgtgtgccctancactatcatgtcgtccggcttcggctccgtgcgacacatcgcggctgggacgaaggtggtgggtggtactcttgtgatgataaacgnnacagacgacgaagattnnatcgtatttaggtagtgcgatgaggatcataccatagtatgtctgggtgatgcgtgtgtattatatgtgtgtgtataccaatggctgngnnnnttnntanacggcgggcgcagacgtgggcgcgcgcctccgtcgcgcgccccctcacgcgccnnccacaccgcagacacaagaacgnngagnggctcgccccggngcgcngnnnnggcannccaccnccgaacaaaacacaagcgcgagaaaagagagagcgcgcgcgcccccgcgcaacccggacaaacacacgggggcaaaanaaaaaaaaaaanaaaaaacanaagaaaaaaaaaaa

SEQ ID NO: 4258 - DNA, 1348 bp, Glycine max
  misc_feature (604)..(604): n is a, c, g, or t
  misc_feature (925)..(925): n is a, c, g, or t
  misc_feature (1265)..(1265): n is a, c, g, or t
  Probeset Number=SeqID_14037
cgttatagtgtggtataaataagattcaattaaagtgaccccctcaccctccatacatagcactttggtcctatgttactacaagttcgaagtgtttcagatcaacctcttttctttctctattggagttctattattcacttaaccacttattcacatgtattctacaagaaaatttgatgttaatagatgccccaaaaaacaactatttgacccacgctctaacctcagtggtaggaaatgttgtatgatgtcgttatctcccccctctcgacgctcaattgcggcatctaggcgttttatctcagatatatactctcgtttaaactctctatatattagtcatcttttgttcttgcgctcgcgccctcctcttcgcactctctgtacatgtaggagagtaatattcagcaccacagaccaccaccctactacagacagtctcactcgtagtagatgtagattagccaagtcgtcgtcagcagacgaagatagccaattcggccgagaggcggtcttgcgttcccggcgcggggtatcatgcgcgtcgcccggtcgcgtacactcccagttccctgctgtctggaccctccgcctgtctccncgacgcgcccccatctaccctataatacaaccaaacatatgatgacactgatttgtactcactacccatcctttcagaaattatgagtgatattgctcgactcgactctgctctctcacttctcttttgtagccccacccaccacaactccgcttttagccacccaacgaacaataagcccgtcaggacgtaccgatcgccacttagtctgtctgtcttcgctacctcttattcgtcgcttcactcctctctactgtaccagcagcgcattatcattccgagccctcctcttagcttacacatccattccccacatcactncgcgacctatgctgtatgactcagtatatgattctcaccgccaccccaattacttatactatctcctaccaataaacctaccaacaggtactctaatctgtactaacatatcttcacacactcccgatatcgcgacgaatgcatgagatagatcaccgtaatctcgcgaacctcagtcatgctcctcgcatccgctcgatgtcgacaactcacaccctcgacactacgagaatatatacgtttgacacattcacttgtctctagtgttttgtgtgcatgaatatatagtgaatccgtcgataattggccacccgacgtgtggatcgcgtgtgcgagtatnatacgatgcgtccgcaccatatgctatccagtcaccgccacatagcataactatcatctcgcacatcgctaccacatcctata

SEQ ID NO: 4259 - DNA, 466 bp, Glycine max
  misc_feature (413)..(413): n is a, c, g, or t
  Peptide Sequence Number=SeqID_7673
  Probeset Number=SeqID_14038
ggtcagagacagagacgcagccatggggcggagacctgcgaggtgttataggcaaattaagaacaagccataccccaagtcacgtttctgccgtggtgttcctgatcccaagatcaggatttatgatgttggtatgaagaagaagggtgttgatgagtttcctttctgtgtccatctggttagttaggagaatgataatgtttcatgtgtggccctggtatctgttctcattgctgtgaacaggatcctggcccaatttgctggataggatgcattacactttgagagtcggttgcacccgattcctttcccttaggtcaacgatgatgctttacggtgctgaactgataggcttcatacttgaatgaaaggtacgtcttgaagagcacaggatacttgtgcgagagggtctngtgagacaggtgtgtgttgctgtcgctgcagggacaagagcagacaatatgct

SEQ ID NO: 4260 - DNA, 2205 bp, Glycine max
  misc_feature (2192)..(2205): n is a, c, g, or t
  Peptide Sequence Number=SeqID_7674
  Probeset Number=SeqID_14039
ggctggaaggattccattgtgactttacaaaccacaaaggcattgcctttgtggtcagaggacttagcaatttcaagcagatgcattgaggcaattgcctcaaaggccttaagccacccctcaaaggtgagtttgtcacacagccattcccggagattgaggaatgatgtgtcttcatacaacgaaaccgaaagcctgagacacaaatcaacaagcaagggatggtgggctgaggatttagcagatttgagcatagacttgtattggagaaccatgatggctatcaaatctggtggcaagacaccctcaaatctcattggtgatgcattgaaaatttatgcatctagatggctaccaaatataaggaagaatgtgcataatgtcaagagggaaaaaactgaatcacactcagattcagattctgcaagtgaagtgaattcaaaacatagactacttttggaatcaatagtgagcttgctttcagcagagaaaggtgctgtttcttgcagcttccttcttaagctattgaaggctgccaatattctcaatgcttcttcttcttcaaaggtggaattggccacaagggtaggacttcagttggaggaagcagcggttaacgatcttctgatacgctcagtgtctaagagtactaatgatatgatctatgaagtggacttggtgatgaccatattggaacagttcatgttgcaaggtcagagtcctccaaccagccctccaagatcaagatttgccgtcgaaagaaggcggtctcgttccgccgagaatattaaccttgagtttcaagagagtaggaggtcctccttagcttctcatagctcaaaacttaaggtggcaaagcttgtggataggtaccttcaggaggttgccagggatgtgaatttgcctctctcaaaattcattgctattgttgaaactataccagattttgcaaggcatgatcatgatgatctgtacagagctattgacatttatctcaaggcacatccagaacgcagcaagagtgaaaggaagaggctatgtagaattctagactgcaaaaagctgtctatggaagcatgcatgcatgcagcacagaatgagcttcttcccctaagagttgttgtgcaagttctcttctttgagcaagtaagagcagcagcagctggtggcaaagtgagtgacatgccaagcaacatcaaggcattgctcactgcaaggattggcattgacccttcaaagcacacagcaccattgagcaccacaactagtattcatgttgatgacaattggagtgtttctggattcaagtcatcaaagtcaacaactaggaaccctactctcagaatgaagctagctgaggatgacttggatgaaaatgttgtgccccgtgatgagattggaagaacttctaggtttaagggtattcttggtcttcccactcagcccaaaaaaatgtttagcaagttgtggtctacaaatagaagtgccactgaaaagaattgagtgaatttttctatttttcatgatggggatatggggaatttagagggtaacatatactatatgtaagttataatgtaatgtaaaatctagggaaaattaatgaatccaaatgtgcattgttcgtgtaacctatataataatgagaaacaagatttttcacaacaataagaaataaaaaaaaaaaacctttaccctactaaccggcccgcaaccactaagttctaaaacccgtccggcaagcccccctaaaattccccgactatgtgctcccttacagacgacgattaaattataaccccccagccctctacccatccctctacaaacgggaagacggccctacaattatcttagcccccccatgtccaatttccccgactgggggggctaacaacgacgcgacacaccccggcggacactaaaaagttgcgccttaacgcacaaaaaaatagaactcccgctcgatttatattaaagcatatcccgaagcccactcaattcaaactgccggcaagctcatgtcgcggccgcgcctcactcatgggccagcacctactcaaccctccaatccttctattcaccccataggatcctgccacatgctacaccccgtcgagtttatgcaccacgtagactacaacgctcggactccccggcatacctcccgacctaattagtacatgtaactnnnnnnnnnnnnnn

SEQ ID NO: 4261 - DNA, 1704 bp, Glycine max
  misc_feature (1)..(1): n is a, c, g, or t
  misc_feature (8)..(8): n is a, c, g, or t
  misc_feature (48)..(48): n is a, c, g, or t
  misc_feature (68)..(68): n is a, c, g, or t
  misc_feature (126)..(126): n is a, c, g, or t
  misc_feature (139)..(139): n is a, c, g, or t
  misc_feature (158)..(158): n is a, c, g, or t
  misc_feature (237)..(237): n is a, c, g, or t
  misc_feature (252)..(252): n is a, c, g, or t
  misc_feature (455)..(455): n is a, c, g, or t
  misc_feature (468)..(468): n is a, c, g, or t
  misc_feature (532)..(532): n is a, c, g, or t
  misc_feature (560)..(560): n is a, c, g, or t
  misc_feature (727)..(727): n is a, c, g, or t
  misc_feature (737)..(737): n is a, c, g, or t
  misc_feature (750)..(750): n is a, c, g, or t
  misc_feature (769)..(769): n is a, c, g, or t
  misc_feature (800)..(800): n is a, c, g, or t
  misc_feature (1038)..(1038): n is a, c, g, or t
  misc_feature (1606)..(1606): n is a, c, g, or t
  misc_feature (1608)..(1609): n is a, c, g, or t
  misc_feature (1612)..(1615): n is a, c, g, or t
  misc_feature (1625)..(1625): n is a, c, g, or t
  misc_feature (1627)..(1627): n is a, c, g, or t
  misc_feature (1672)..(1672): n is a, c, g, or t
  misc_feature (1685)..(1686): n is a, c, g, or t
  misc_feature (1688)..(1688): n is a, c, g, or t
  misc_feature (1692)..(1692): n is a, c, g, or t
  Peptide Sequence Number=SeqID_7675
  Probeset Number=SeqID_14040
ntactatnacgcgcatcatgtcgaatcgtatttcaatctaggacgtantcagacgtcacgcgatcatnatcactagtgtatctcgttcgtcggctctgacgtctatctacagatcgatcgatactntatcgtatctcancgatgagtgcgcgatagtntctcgctgctggtgttgcaccgaccacgacagcgcgcgcagcgccggtagcagcgtgacacacgatcgcatatcagtanctcgcctgaagcganagactgattaacgtataatactacacgatacgttcgatcgtttcgtgaccctcatagcgatatctacagctacactcctccgtccgagacagatctacgcgactatcgcgcttgagcgactctactcagcgcgtactgatcgcacacactagccgtcgtctcgccacgaatacgagagcgtcgcgacggacagctctccgcancaggcgcgtactntcgatatctacatcatgcacatatctagcgcgcacttacaatgatcatctcgcaatatagtcgncgcgttcgtatatctacgtcgtggtacntgtcgctgctttgtatgaagtagcatggcgtacatatagcgagtgagcgatacaatacaatatagcattagagacggtataacagaagatcgcgctgctcactaatcgacatcggtcgcgcataaacgtcttatcgctcactctacatacgagttcatatagtaacntctcgacgtntctatctatgcgngctatcatctaatcgactnctatactagtgacgcgcgtctgacgtctcgntctctctaggcgtactctctcttatcatctactctattttcggcctcccaaatcacgctacataggcgatgctctgctgctggatatctgtgtgttgacatatccgtattcgcaacgtgtcatgagactcgtctactatatagcactccgccacgagcgcaccacgcaccactattatatcatacaaacacatatatagttgatgtgggtgcgtccgattaagatgtgcgcgtcgctnctcacccttctgttagcagagagatcagcagacactcgtactgacgcgcggcggaagagagaataaatgtgtagagcatagagtaacgctacaactgagcaacagacgtcgaccgcccgacgctgatcgcgatacggctcgagactgaggctcggcggacagagaccgagcgccgcgaagacaagaacagtaaacgcatataatcgtagtgcatatataacgcgactggcggataatatgtgagctgcgaatgacacaccacgtcactagttattttaaatctatctaataatatgattcaacctatacacctacgtccttcctaaaacctcttctgtatcacagctaatatcacgaagaaacatcgtggcggtagtagaacagcgttagaagggacgatggcacggtattcaagacaatatcaactactgttatatcatatcgtcaggtgctccacgcttcctatctaccccctcacagcggagcgcaggatacgtttctgatcatatcggggcggcaccactcggcctcggagcgcgtgtggtcgtgtggcgtgtggcagccaaantnnttnnnnaagggggtantntagacaatagaaagtaagacgatattattataaatggcgctcagncagagcgagcgannangcgncaggcagcccac

SEQ ID NO: 4262 - DNA, 433 bp, Glycine max
  Probeset Number=SeqID_14041
gtaagctcggaattcggctcgagctctgctgagacttcattggcgatggctttcaaaatggccactactgggatgtgggtgacggatgagggcaagaactctttcatggaaatgaagtggaagaaggttcatagatacatagtcttcaagatcgatgagaagtcaaggcttgtcaccgttgataaggggggtgggcccggcgagagctatggtgatcttcgccctctgcttgcccgacgatgattgtcgatatgttgtattccactgtgatttcataagcggactttactgactgtggaccaatatcttttgcattgtatggtctgcagctagatcacggatgatacgcagtagtgctcttcgcacattcagagcttgcttgagagcagttgtggagggagtcatctattatcccatagaaccggtctctcct

SEQ ID NO: 4263 - DNA, 271 bp, Glycine max
  Peptide Sequence Number=SeqID_7676
  Probeset Number=SeqID_14042
atggaggagctgagatctgctatggaggagcacttggaccttttggcagatcttgttcagaaattctcttcggatcttcgcgccggttttcgccccgcttaagaaaactttaacggttttttccaatcccttgacctggaaggtagccctccaaatttagtttaaagaattctctggttctttggtggatattaatggggtttttaaatttaaagccccaggtttttgttctttgtttgaaggggctttgaattgtggaattctgggtttt

SEQ ID NO: 4264 - DNA, 1479 bp, Glycine max
  misc_feature (19)..(19): n is a, c, g, or t
  misc_feature (22)..(22): n is a, c, g, or t
  misc_feature (25)..(26): n is a, c, g, or t
  misc_feature (38)..(41): n is a, c, g, or t
  misc_feature (49)..(49): n is a, c, g, or t
  misc_feature (51)..(53): n is a, c, g, or t
  misc_feature (62)..(64): n is a, c, g, or t
  misc_feature (66)..(73): n is a, c, g, or t
  misc_feature (77)..(85): n is a, c, g, or t
  misc_feature (91)..(91): n is a, c, g, or t
  misc_feature (119)..(119): n is a, c, g, or t
  misc_feature (256)..(256): n is a, c, g, or t
  misc_feature (455)..(455): n is a, c, g, or t
  misc_feature (656)..(656): n is a, c, g, or t
  misc_feature (856)..(856): n is a, c, g, or t
  misc_feature (878)..(878): n is a, c, g, or t
  misc_feature (880)..(880): n is a, c, g, or t
  misc_feature (987)..(987): n is a, c, g, or t
  misc_feature (1133)..(1133): n is a, c, g, or t
  misc_feature (1171)..(1171): n is a, c, g, or t
  misc_feature (1186)..(1186): n is a, c, g, or t
  misc_feature (1200)..(1200): n is a, c, g, or t
  misc_feature (1215)..(1215): n is a, c, g, or t
  misc_feature (1243)..(1243): n is a, c, g, or t
  misc_feature (1291)..(1291): n is a, c, g, or t
  misc_feature (1310)..(1310): n is a, c, g, or t
  misc_feature (1321)..(1321): n is a, c, g, or t
  misc_feature (1366)..(1366): n is a, c, g, or t
  misc_feature (1385)..(1385): n is a, c, g, or t
  misc_feature (1472)..(1472): n is a, c, g, or t
  Peptide Sequence Number=SeqID_7677
  Probeset Number=SeqID_14043
tgttgtttttttttttttnggnggnnggggcgggaggnnnnggagggantnnnggggtgggnnnannnnnnnnaacnnnnnnnnnataaanagagaatctgataaatcagtttgatatntgtatgagcgctctcctgccttacacaataatttaaccgctcgggcgcggagctgtgcgcgagggacagcatgctccacctctcctcctaatcgctgtctgccaacaaaacacgatctgacaacaacactagaatangcaatcacatgcctatgtgaatagtatatgcgaaaatatatatagtatatatgaggatatattatgtagttgagtgtgtgagggtggtgtgttgtgtgtgtgttgtatgtgtctgatggttggttgtgcattgaattcatcgtaatactcgactgcaatgaataggagagatatataagagtatataatcacatatggnaaatagcaaaacaaacaggaaaagaatcgcgaagctcgatagatacaaggcagagagtacaacaactgcacgataacaacacacgacaaaagacacacgattctggtctgacaggagccgaacgatgagatgacgctagttgtggtgtgagtagagtggatagtatgtatatgggtgtgtgatcacgatacacataaacantggtggtataagtagacgtgagagaatgagagatcatgacacgctcgcaactactaccgaagagtacacacaacaacacgatacaaaagagacgacacgtaacacatcgaagacaacacaagacacatatgcatagagtgacatatgtgatgactacagagaagcgatctggacacctgcctggtgtgctagattatgtnatatgtgtggagcgatatgacntnacatagatgcgcatctagtctccgacgacgtgccaacatacatcatagctcatgctctcgtcgtatgcacagtcgcgtcacgcacgcgcgctgtcgtgcaacacacntgtgctgcatatgtcgtgacatagcatatcgaagcgactagtacatacacacagcacgatcagacacacgtatgcaactcacataatatacaaatctcacagcatactcaccagctatctactatctagacactacacatcactcntctctcacacaactactatcacgcatgaacaaataagncaggtgacgcgacgngagcacgctgagtnggtaactagtcacanctgaggacagaatggctaaaatcgcatngcgatgacagagacagagagactgacacggagatgtatgacacatganaccacacgacgcgagaccngacgacagagntcgcagcgagctgtagcgacacgacgaccgctctatgatgatctngatgagtatgtgtgcatantatatgtacattcctagagacggacgcaacgacaacgacgccaactgtgaacgcctgtcgcgcacggctacgtaataatgacatagnatctatg

SEQ ID NO: 4265 - DNA, 1424 bp, Glycine max
  misc_feature (1424)..(1424): n is a, c, g, or t
  Probeset Number=SeqID_14044
tcagctacgtaggccccccccccccaaagtgaggaggcaggaggcctgcccgcaagaattatttgactgtgcgtgttgttattttattgaagatttgtgcgttttttgtatgaaattaggcatcgtcgaacagcatcaagatgcagagaagtgcgcttcagagcaagcgagagcagttcttcaagaacgagccgaccacccctaccatgccgggccccacccctggctcgggctctgccccctctgtgccgcctcctaccgcccctgcaccctctgccatcaaagaggctctagccaagcgggcggctgaacgaggcaggctgcagaatggtgattctgtaaacagtgaagacaacaaagaacgttacaataaagaaaataaagcaccagaaagaagaaccaaggaacttgatggttacgtgggatttgccaatttgcccaatcaagtctatagaaaagccgtaaagagaggttttgactttactctaatggttgttggtgaatctggcttggggaagtcgacccttatcaactcaatgttcctttctgatgtatactctaatgaacaccctggaccttctttaagggtgaagaaaacagttgctgttgaaaccagtaaaactcttctcaaagaaaataatgtgaacttatcgttaactgttgtggatacccctggttttggtgacgctgttgacaacagcaattgctgggcgccagttgttgaatacattgagtctaaatatgaagagtatctgaatgctgagtcccgagttaaccgtaaaatcctctcagacagtagagtgcattgttgtctctactttatcgccccatcaggtcatggattgaaacccctcgatgtggagtttatgcagaggctacatgataaagtcaatataatcccaattattgcaaaagctgatacaatgacaccagatgaatgcaatcagttcaagaagcaaattttaaatgaaattgcccaacataaaatcaaaatatatgagttcccagacacagatgaggaggaagaagcgaagcaacacaaggccctgaaggacagagttccatttgctgttgtagggtctaacactgttattgaagttgatggcaagaaattgagaggccgaaaatatccatggggcattgcagaagtggagaaccttgagcattgcgactttattgctctaagaaatatgctgatccggacccaccttcaagatctcaaagaagttaccaatagtgtccactatgaaaactatcggtgcagaaaactggctggacttggaaccgatggaaaaccaggaagaatatcaaacaagaacccattggctcaaatggaagaagaaaaacgggaccatgatgccaagatgaagaagatggaaacagagatggagcaaggatttgaaacaaaaaaaaaaaaaaaaaan

SEQ ID NO: 4266 - DNA, 842 bp, Glycine max
  Peptide Sequence Number=SeqID_7678
  Probeset Number=SeqID_14045
agaacaataaaaacacaaaagagagagagagagtgaaagatggtgagtttcacttattattatttcaatgctagatcagcacatgttctctttttatctactcttttgacactcactgcatatcatcctttctcttctgttatttttctctcttcattggatgctattttgggatatttggaatggaataaacattataaacaagcaactgcacttgaattcacaatagcatgggaacttaaaaaagagtcccctcattataaatggtcttctgtcttcttacatctctttgtcttacttccctatgtagttctttggttgttctcttggtcaacaaacgcaggccaatgcatcggagtttctgtgctagcctatgcattatttgtatttgcagtgaccgtgcagagtatcctcatgtacgatggtgccgtgcacaagggattggatcctaagttggcacccaaaatccacttaaacattgcctcaactgatcgcacagatttcgtcctcagcaacctctatacaatagcctatctcacctacgaagaagagaaagaagaagaagaagaaataatagcaaaattagaagacgacccaaccaaaaatgccaagcaaaaagaaagagagaaagaaagagagagaaagagacacgaaaaatcagcagtagcttatgcagaagatcctaagtatacacatttggcgtggagattagtgaaacatttacatccttcagaaattagacaattgagaacttatcttttattcagtgatgatgataagaaacagtaaaagataatatttaaataaaagcaataatatataaacacttggaaaaaatgtac

SEQ ID NO: 4267 - DNA, 1492 bp, Glycine max
  misc_feature (20)..(21): n is a, c, g, or t
  misc_feature (538)..(538): n is a, c, g, or t
  misc_feature (573)..(573): n is a, c, g, or t
  misc_feature (873)..(873): n is a, c, g, or t
  misc_feature (1093)..(1093): n is a, c, g, or t
  misc_feature (1244)..(1244): n is a, c, g, or t
  misc_feature (1286)..(1286): n is a, c, g, or t
  misc_feature (1415)..(1415): n is a, c, g, or t
  misc_feature (1492)..(1492): n is a, c, g, or t
  Probeset Number=SeqID_14046
cttatctttctctctctatnnccacactcccttccgcccactgcgtgtttaatcatctgtcgtcgacttgagtctctgtcactcgggtgacacgacgacgtactagcagagaggcgtaactacatagatgaatgtggtgtccgcaataatagcgatctagagagagactacaacgtaatataacgtgagtgtttctctcacataaatacctatattatatctcattaacattgcgccactgatctcttccatattaggtctctaactctaatctcacagctcctaactctctctctcatccactcatgtacaagattacggttatgagtagctaggaaatctgctagtataaggggtatacgcattgtggcacgtaactaatatatgcctattactcactccaatacacactagactgtcacacgtagtgtaatgttcatgtataatgtgtactatatcttcgcgtcactatgtcaggattcatacaccgtcttctctctatctctctatgtatgtatatcttattcttgatatacantgtaatgattatacaccaccgcatcgacgacacantattacactatatgacactgccctgctgtaacaggtgacgcacgagcgccacaggaccgtgtgcgattcacaagggtagctgcggagtcgggcacatcacgatcgcagcgatctctgctatgttgttcggttctcactgcgcgcttctgtcgcagtgtcgctctctatccatctagtctgaagcaagtatatatttatgtgctgagcacgttgaatcgatacagtatatagtgagcgcgtcgagacgacacgtcgcatatgtatataggcgtgttattgtcccaccaccaccccgctcgnacccttatcgtatatcttgtaaccgagatgatgtggtgcagaccgtgcttctcgcgcgcgcgacagttatatgtgtgcctgttcgtgattagtacagtgacctcggttctatttccgtcaaacacgtagatccagtaatcgatacatcatgtatctactttctaactaccgtagacgacgacagcgaattatcgtcaacacttcgatggtcagtcactanattatgacagggacgtgaacgtcgacagtgggctgatacgtacgcggaagcagggggtcgtatatacgacattacatcgcagatgaagcaacacagataatacatatgtatagaagggcacgatagtaaataacaccagttacatcagttnaccgaatgagcacagatgatatgtatatatagactgacgtcncatctgtgcggcagctcagtcttcgcgcctccacgtccggagtcgaccagcgttgcagtgtagaccgcttgtcgtgcatgatgcgttgtcggcagcggcatgcttttattactctgtgtcaatttgatnagacatcgttgtcataccatatgcatactatgaatgtagtatattgaatgaagtactgttcgatgtcactcgcgacn

SEQ ID NO: 4268 - DNA, 781 bp, Glycine max
  misc_feature (377)..(377): n is a, c, g, or t
  misc_feature (392)..(392): n is a, c, g, or t
  misc_feature (394)..(394): n is a, c, g, or t
  misc_feature (406)..(406): n is a, c, g, or t
  misc_feature (416)..(416): n is a, c, g, or t
  misc_feature (435)..(435): n is a, c, g, or t
  misc_feature (482)..(482): n is a, c, g, or t
  misc_feature (485)..(485): n is a, c, g, or t
  misc_feature (501)..(501): n is a, c, g, or t
  misc_feature (522)..(522): n is a, c, g, or t
  misc_feature (537)..(537): n is a, c, g, or t
  misc_feature (544)..(544): n is a, c, g, or t
  misc_feature (556)..(556): n is a, c, g, or t
  misc_feature (558)..(558): n is a, c, g, or t
  misc_feature (576)..(576): n is a, c, g, or t
  misc_feature (579)..(579): n is a, c, g, or t
  misc_feature (592)..(592): n is a, c, g, or t
  misc_feature (601)..(601): n is a, c, g, or t
  misc_feature (611)..(611): n is a, c, g, or t
  misc_feature (627)..(627): n is a, c, g, or t
  misc_feature (642)..(642): n is a, c, g, or t
  misc_feature (648)..(648): n is a, c, g, or t
  misc_feature (651)..(651): n is a, c, g, or t
  misc_feature (661)..(661): n is a, c, g, or t
  misc_feature (663)..(663): n is a, c, g, or t
  misc_feature (666)..(666): n is a, c, g, or t
  misc_feature (670)..(671): n is a, c, g, or t
  misc_feature (675)..(675): n is a, c, g, or t
  misc_feature (677)..(677): n is a, c, g, or t
  misc_feature (694)..(694): n is a, c, g, or t
  misc_feature (705)..(705): n is a, c, g, or t
  misc_feature (723)..(781): n is a, c, g, or t
  Peptide Sequence Number=SeqID_7679
  Probeset Number=SeqID_14047
gggccccccctcgagtcagctacgtaggccccccctcatgatgcatgacatcgcccatggacccactattggactcgatccaagaaaagttgaaacagcattacaccttcgttgatttaccggaaatagacgtggcaactctggattctacgaatacgggcacgtattgcgttcgtagcaagttgtccgacttgagactttacttgaggaagccaaacttctgagcgagtaagccggggccataggttctagacataggactcctagccgtagtcaaagtcctcctttgacctaaaagttccaaaattgccgatttccgagtgcagaccgaagctcaaactcctgagacattcgatctacataatgatcagcatgancatccgaactggcancnttgcttcgaggncttgaggccnaacttctactcatcgacangccagaatccctgcttcctactcctgtggcgtgcgagccgacatcgngtnctgccacgcgaatccntagccttactataaaacctcnttcgtccatttgtgngcacaangccttcactttncngtttcttctcctttaccncanccgatggcatcantgctcctantttacctatnagcggacacaccttgncagtggcattgcatntgctcnggnctaaaggctntnaangcgnntgcngnccatgcaggccgactgntgggaaccctnttcctctattttaactgnnnnnnnnnnnnnnnnnnnnnnnnnnnnnnnnnnnnnnnnnnnnnnnnnnnnnnnnnnn

SEQ ID NO: 4269 - DNA, 474 bp, Glycine max
  Probeset Number=SeqID_14048
cttcatctgcaagcacagatattctaatggatcttctatccatgggatcgtctccatcacagaatggtctgccagctccagcccaagagaaaaaaactgtttctgctgcacctcaagttggttctcttgtacctgaacctatggatctactcggcagtttgtcatcaagtgcatctatttctggaactaaatccactattgctgcacctcaagctgtggatctgcttgacggtttgtcaccaagtacatccgtttctggacttgaagatactcgcccgtcaataacggctttccagagtgcaactttgaagatcacctttgatatcagaaaacagcctggaaagccacaagaggctaccatccatgccacttttacaaatttgacatctagcaattatacagatttcatttttcaggcagctgttccaaagttcattcaattgcgactggatccagctagcggtaacattgttc

SEQ ID NO: 4270 - DNA, 1657 bp, Glycine max
  misc_feature (3)..(4): n is a, c, g, or t
  misc_feature (7)..(7): n is a, c, g, or t
  misc_feature (14)..(14): n is a, c, g, or t
  misc_feature (17)..(17): n is a, c, g, or t
  misc_feature (23)..(23): n is a, c, g, or t
  misc_feature (33)..(34): n is a, c, g, or t
  misc_feature (38)..(39): n is a, c, g, or t
  misc_feature (59)..(59): n is a, c, g, or t
  misc_feature (79)..(79): n is a, c, g, or t
  misc_feature (97)..(97): n is a, c, g, or t
  misc_feature (104)..(104): n is a, c, g, or t
  misc_feature (108)..(108): n is a, c, g, or t
  misc_feature (111)..(111): n is a, c, g, or t
  misc_feature (116)..(116): n is a, c, g, or t
  misc_feature (126)..(126): n is a, c, g, or t
  misc_feature (128)..(128): n is a, c, g, or t
  misc_feature (132)..(137): n is a, c, g, or t
  misc_feature (145)..(145): n is a, c, g, or t
  misc_feature (149)..(149): n is a, c, g, or t
  misc_feature (155)..(155): n is a, c, g, or t
  misc_feature (163)..(163): n is a, c, g, or t
  misc_feature (168)..(168): n is a, c, g, or t
  misc_feature (171)..(171): n is a, c, g, or t
  misc_feature (204)..(205): n is a, c, g, or t
  misc_feature (218)..(218): n is a, c, g, or t
  misc_feature (233)..(233): n is a, c, g, or t
  misc_feature (235)..(235): n is a, c, g, or t
  misc_feature (263)..(264): n is a, c, g, or t
  misc_feature (283)..(284): n is a, c, g, or t
  misc_feature (289)..(289): n is a, c, g, or t
  misc_feature (305)..(305): n is a, c, g, or t
  misc_feature (307)..(307): n is a, c, g, or t
  misc_feature (309)..(316): n is a, c, g, or t
  misc_feature (319)..(322): n is a, c, g, or t
  misc_feature (334)..(334): n is a, c, g, or t
  misc_feature (336)..(343): n is a, c, g, or t
  misc_feature (348)..(348): n is a, c, g, or t
  misc_feature (350)..(350): n is a, c, g, or t
  misc_feature (353)..(354): n is a, c, g, or t
  misc_feature (356)..(356): n is a, c, g, or t
  misc_feature (358)..(360): n is a, c, g, or t
  misc_feature (367)..(367): n is a, c, g, or t
  misc_feature (383)..(384): n is a, c, g, or t
  misc_feature (393)..(393): n is a, c, g, or t
  misc_feature (401)..(401): n is a, c, g, or t
  misc_feature (412)..(414): n is a, c, g, or t
  misc_feature (417)..(419): n is a, c, g, or t
  misc_feature (422)..(428): n is a, c, g, or t
  misc_feature (430)..(433): n is a, c, g, or t
  misc_feature (438)..(438): n is a, c, g, or t
  misc_feature (450)..(451): n is a, c, g, or t
  misc_feature (459)..(459): n is a, c, g, or t
  misc_feature (463)..(463): n is a, c, g, or t
  misc_feature (466)..(466): n is a, c, g, or t
  misc_feature (469)..(473): n is a, c, g, or t
  misc_feature (475)..(477): n is a, c, g, or t
  misc_feature (480)..(480): n is a, c, g, or t
  misc_feature (484)..(489): n is a, c, g, or t
  misc_feature (491)..(496): n is a, c, g, or t
  misc_feature (501)..(501): n is a, c, g, or t
  misc_feature (519)..(524): n is a, c, g, or t
  misc_feature (526)..(526): n is a, c, g, or t
  misc_feature (528)..(528): n is a, c, g, or t
  misc_feature (530)..(539): n is a, c, g, or t
  misc_feature (561)..(566): n is a, c, g, or t
  misc_feature (568)..(568): n is a, c, g, or t
  misc_feature (578)..(579): n is a, c, g, or t
  misc_feature (583)..(583): n is a, c, g, or t
  misc_feature (593)..(594): n is a, c, g, or t
  misc_feature (596)..(597): n is a, c, g, or t
  misc_feature (599)..(599): n is a, c, g, or t
  misc_feature (602)..(604): n is a, c, g, or t
  misc_feature (606)..(608): n is a, c, g, or t
  misc_feature (610)..(613): n is a, c, g, or t
  misc_feature (616)..(618): n is a, c, g, or t
  misc_feature (621)..(632): n is a, c, g, or t
  misc_feature (634)..(655): n is a, c, g, or t
  misc_feature (657)..(659): n is a, c, g, or t
  misc_feature (663)..(663): n is a, c, g, or t
  misc_feature (668)..(671): n is a, c, g, or t
  misc_feature (683)..(684): n is a, c, g, or t
  misc_feature (687)..(689): n is a, c, g, or t
  misc_feature (697)..(699): n is a, c, g, or t
  misc_feature (701)..(701): n is a, c, g, or t
  misc_feature (710)..(710): n is a, c, g, or t
  misc_feature (712)..(713): n is a, c, g, or t
  misc_feature (723)..(724): n is a, c, g, or t
  misc_feature (726)..(732): n is a, c, g, or t
  misc_feature (735)..(747): n is a, c, g, or t
  misc_feature (749)..(749): n is a, c, g, or t
  misc_feature (751)..(752): n is a, c, g, or t
  misc_feature (755)..(756): n is a, c, g, or t
  misc_feature (758)..(758): n is a, c, g, or t
  misc_feature (770)..(770): n is a, c, g, or t
  misc_feature (773)..(773): n is a, c, g, or t
  misc_feature (780)..(780): n is a, c, g, or t
  misc_feature (784)..(784): n is a, c, g, or t
  misc_feature (786)..(788): n is a, c, g, or t
  misc_feature (794)..(794): n is a, c, g, or t
  misc_feature (797)..(797): n is a, c, g, or t
  misc_feature (807)..(808): n is a, c, g, or t
  misc_feature (811)..(811): n is a, c, g, or t
  misc_feature (815)..(817): n is a, c, g, or t
  misc_feature (831)..(832): n is a, c, g, or t
  misc_feature (836)..(837): n is a, c, g, or t
  misc_feature (845)..(845): n is a, c, g, or t
  misc_feature (849)..(849): n is a, c, g, or t
  misc_feature (857)..(866): n is a, c, g, or t
  misc_feature (884)..(884): n is a, c, g, or t
  misc_feature (895)..(896): n is a, c, g, or t
  misc_feature (916)..(921): n is a, c, g, or t
  misc_feature (930)..(930): n is a, c, g, or t
  misc_feature (933)..(934): n is a, c, g, or t
  misc_feature (949)..(950): n is a, c, g, or t
  misc_feature (952)..(952): n is a, c, g, or t
  misc_feature (963)..(964): n is a, c, g, or t
  misc_feature (977)..(978): n is a, c, g, or t
  misc_feature (980)..(980): n is a, c, g, or t
  misc_feature (995)..(995): n is a, c, g, or t
  misc_feature (1013)..(1013): n is a, c, g, or t
  misc_feature (1024)..(1025): n is a, c, g, or t
  misc_feature (1048)..(1048): n is a, c, g, or t
  misc_feature (1050)..(1051): n is a, c, g, or t
  misc_feature (1053)..(1053): n is a, c, g, or t
  misc_feature (1114)..(1114): n is a, c, g, or t
  misc_feature (1117)..(1117): n is a, c, g, or t
  misc_feature (1158)..(1158): n is a, c, g, or t
  misc_feature (1179)..(1179): n is a, c, g, or t
  misc_feature (1217)..(1217): n is a, c, g, or t
  misc_feature (1404)..(1404): n is a, c, g, or t
  misc_feature (1473)..(1473): n is a, c, g, or t
  misc_feature (1514)..(1514): n is a, c, g, or t
  misc_feature (1573)..(1573): n is a, c, g, or t
  misc_feature (1625)..(1625): n is a, c, g, or t
  Peptide Sequence Number=SeqID_7688
  Probeset Number=SeqID_14049
agnntgnggtcgtngcnatactntcggaactcnnttgnngtcctagtactctgatcgtncttcagagtgtcaacgcgangcgcgcgagtatgctcgncacgttnggcntangtgcngttggtaatnanatannnnnncctcagtngccngtctgncgattgtnttgtncanccacatacactggtgtgtagtgtatgttactanncttcgctatctgntctcgaagtcgtctntnctgctctatcgtggttgttttggtgcgnnctatatatatagatatgtnngatgnaaaatgataataagtnantnnnnnnnnaannnnaataaattattntnnnnnnnngaaangngcnncncnnngcaatangagtactgtaattgtnnttattatantttatttnataatgtggtnnngannncgnnnnnnntnnnntaatnctactttcaaanncccgtggnattnccngcnnnnncnnnaanaaannnnnncnnnnnntccancatcattatatatacaannnnnnangnannnnnnnnnntggaagagaattaaaaaaaaannnnnncngcggcgggtnngggngtaggaacgnncnngncgnnntnnncnnnnttnnntgnnnnnnnnnnnntnnnnnnnnnnnnnnnnnnnnnncnnnttcncgctnnnngtgtgaggtgcnngcnnngctattgnnntntcccgttcntnnccccatcctnnannnnnnntgnnnnnnnnnnnnncntnntannanaaataaatcaancancacaacntctncnnnccccgnacncacacccagnnctncaannnaaaactttgttccnncggnngtggcgcncgcnagtttatnnnnnnnnnnttgcgggtccgcgccggncgcgtctcggnncgctcggcacacaccacatnnnnnnacatatcanaannaacataccccgcggnncncgcaatacccnncacagagggaatnngngcgcttggtactcgngcgcaccggcattactgnatgatactcanntaagctcgcgtctacagtgcgangnncncagagatgtatctcatattaccacgacgaccgagctacctcgcaacgaatgaatgcggatngcngtactgatgtcgtacttattagatctttacgtctacgatanggagctcttatcactataagnggagtgtgatagcgagatatatctagcatatggcacgntcattatgagtcacacgccgcgtctccggtcgctttatcacggagttactcgcttctagtgtcgagagatgagaagagcgaagtaagatatgcaagcggtatgatgtatagtggttacctcgtattatgtaaggagaggctagcagatgggtaattgtgatatgagaatggcgcgaagcatagacgnaatgacgtgtgagtgagcgcgtgagagagatagagacgtaggaatactagaacgtggcaacctctcatnctcgccaagggcactcgctgagggtgatacacgaaaaaaangatgcatgacgagccgcgggccgcgtccaagccgcgcgtgctccatacactatcaacangattatttctactcgcgagtgtagacatgatagatatataggtagtgagagntagaggggagagaggcgttcgaagttgtagag

SEQ ID NO: 4271 - DNA, 1431 bp, Glycine max
  misc_feature (16)..(17): n is a, c, g, or t
  misc_feature (32)..(32): n is a, c, g, or t
  misc_feature (77)..(77): n is a, c, g, or t
  misc_feature (119)..(119): n is a, c, g, or t
  misc_feature (205)..(205): n is a, c, g, or t
  misc_feature (981)..(981): n is a, c, g, or t
  misc_feature (1083)..(1083): n is a, c, g, or t
  misc_feature (1182)..(1182): n is a, c, g, or t
  misc_feature (1239)..(1239): n is a, c, g, or t
  misc_feature (1277)..(1277): n is a, c, g, or t
  misc_feature (1428)..(1428): n is a, c, g, or t
  Probeset Number=SeqID_14050
gtcggtgtgggtttgnnctttttttcctcttntcacactcataccccccccccattctcgtggacgccagatagccnttaaagagtgtagagcgatttaataatacccccagagcggancgcggccctagtctagtgtgtagatgagaaccaccccccctcccaaatggcgtagctaattgtaggggatagtgttttcctccctncttctggtgctctgcgatcgtgccaaggctgccatttatcctgcacctctgataccgctgaatgcggaccgcgcgagggagtgaccccagtctaccccctcctattaccgcccttgctccctctatgccccttctcctacaccaccacgaaaaaacaacagatgaacgtgttagtctgccactagtcaccactatttagagacacaaatataatatcatagacaacaaaggcagcgcggcttcctctcccattctactggtgaccacgccagcagtattaacccctcctccacgccagcacacccgccaagagtgtgctgtggtcgttgatgcgttgtcccccgtcctttattctcaccccgctcgcttcttgtgccgtgagttctctcctgtggctctcttaccgatcaatgtcctactcccctttaattagtaatacatagaacaaaacctcacaaatgatcgagaaacatggattggttgtgatgcgtcttattatgtccgtcgctaaccacatataagtagttgagcggtagcatagtctaacaggcgtgcagacggaatagccaacttctatcaacactactgaacaacacttagattggatgcggctcggagcactcgagagcacgaacgacgatgagatctctggacgcctggccgcgtcggtcgcgtatatctttacgcactctgtcatggcctaccatcgtgcgtgtgtatagatgtcgtcgtagatctgtcccctacctgcccactcgtaatacggacatacacgntgcactgctcactccactcggacgcagtctacgcctcctccgatactatactccatagtctcatcaccagtgacgctagcgcgctgccgtacgatgtatgtngaccattagacatgctgatagatacagagtcaccatgcattaacagagcgatgcgtacatagactccgctacctcgacacatcatatctcacgtcactnggtgatcgcatacgagtgcgcctgcacaatatacttatacattgtatcgcggcaggnactgtctctacaacgtgcgtacatcacctgtgcatgancaggacgagtgacaagaccgatactcaaacgagatgatactataacaaactgtatcgcgctatagcccacacgtctccatccgagacgaatcaccaatagttctctcgcacagcgtctaccccgaacagctgtgtacgtgatgcatctcgntct

SEQ ID NO: 4272 - DNA, 1753 bp, Glycine max
  misc_feature (27)..(27): n is a, c, g, or t
  misc_feature (148)..(148): n is a, c, g, or t
  misc_feature (199)..(199): n is a, c, g, or t
  misc_feature (322)..(322): n is a, c, g, or t
  misc_feature (495)..(495): n is a, c, g, or t
  misc_feature (634)..(634): n is a, c, g, or t
  misc_feature (788)..(788): n is a, c, g, or t
  misc_feature (864)..(864): n is a, c, g, or t
  misc_feature (978)..(978): n is a, c, g, or t
  misc_feature (1063)..(1063): n is a, c, g, or t
  misc_feature (1069)..(1069): n is a, c, g, or t
  misc_feature (1115)..(1115): n is a, c, g, or t
  misc_feature (1132)..(1132): n is a, c, g, or t
  misc_feature (1162)..(1162): n is a, c, g, or t
  misc_feature (1228)..(1228): n is a, c, g, or t
  misc_feature (1263)..(1263): n is a, c, g, or t
  misc_feature (1284)..(1284): n is a, c, g, or t
  misc_feature (1304)..(1304): n is a, c, g, or t
  misc_feature (1313)..(1313): n is a, c, g, or t
  misc_feature (1326)..(1326): n is a, c, g, or t
  misc_feature (1430)..(1430): n is a, c, g, or t
  misc_feature (1496)..(1496): n is a, c, g, or t
  misc_feature (1498)..(1498): n is a, c, g, or t
  misc_feature (1522)..(1522): n is a, c, g, or t
  misc_feature (1615)..(1615): n is a, c, g, or t
  misc_feature (1617)..(1617): n is a, c, g, or t
  Peptide Sequence Number=SeqID_7689
  Probeset Number=SeqID_14051
gacgagagtgtagagaggaagatctantctctacatacagacagattccatacctaaacgctctcagatggcgccaccaccacactctatagtataccatatagaatataagtgagaatttatttccaacacaatacataatcgcaanatagcacccgaattctttatccacgcaaccacaccaccgaccgccactcgnatgttagaccaggatgcggtattgatagccatagagaagaggacgatgtgatcggaactgtccatgaagtgattgctcactcacacaattaataccacgatcctacgcagacacagatcatanatgtctatctcaccgaggagtgcgacgacggatgacagtagtaggagcgagcaaacctccgcgcacatcgacggcgcagacaaatcgagagcgaggtagaatgtacacaccatcttcgtccgactcaactctgccccacgcggcctaactatcatgtatataaatattcaatnaactaagtgctaaagctacatgacacgttatcgatgctcagccgtatcgcatgactgtcgcaagagatgaaaatacgcgtaccagcgcaccgacgcgctgtttattctttttcgatatgaattatgtgtgagtagaggnacgctcgatgacgtggctggtcacgccaagagactgttttgtttcttgtctttctggtgctgaacgccgagcaacgcgcggcgcacggacgagcgtctcgttttatgcctgctttcaaaatgttttgatagatagtacgagataatgacagtanatgtgcgatcgggtgcatatacactcgtatgtatactaatatctagacatatctgaggtgactctgacggctgcgngtcgtgtctgcgacgatgcggatatactatgcacctcatgaagagcgcgtcgacatgcgcgatgttatggagacagctactacgtcaaccattattaatacgacccacctgcancgacgtcgatccgcattatcatgactgtagactcacgacgacagccgatgatatagagactgttaatgagtgtcgatgctacgtnagaatncgcgatgatctgagtgtctatatctcgcagaagtcgacgcgatccnacgacctctctatgcgngtgctcgcacgcagacatcgatataatcanattcgcacgccgtatcaggatcatagtataacgacaagtaaataatgtatagcactcatcgggtantactactacatagtcatacatagctcatgatgacnatgcacacgctagatatagtntacaatacgtatatgcgagnacgatctantgatacggctctncgcataacagtttatcactgagtacgaagacgatctcagagtatatagagcgggatgtaccgagaacgacacaggtatactagatctgacgtggtacagcatgntcgcgaatgttacgagtatcagtgatgtattgtagcgtccgcgcgccatgtagcgcacgactggangnatagtattacgcgctatgcatatnactgtgtgcaacatacactagactgacacacataagacagcagcacgccaagctgtagcgatcatacgtagtattatgtcgcacgtactagantnagcgctgcgacaacgccggcgtatatcagtaatcttgtaacacgcgtacgatatcgatcacgttatagatgacgagcgtctgtcactgcggcatactagatctgttgtatgcatgtcttacctgtctatccgcctg

SEQ ID NO: 4273 - DNA, 743 bp, Glycine max
  misc_feature (728)..(728): n is a, c, g, or t
  Peptide Sequence Number=SeqID_7690
  Probeset Number=SeqID_14052
acacaagttctaaacaatggtgtcgtcgaagaaaccgaaccaggagaagaagccgaggagcgatggcgtcaacaaagctggtggtggtaacacacgcagctccggttccaaaccgaagaagaagaataccaacgtacaggccaatgcgaagaaggagccggaggttcacgagatctcggagtcttcgagcagcgactccgcaggagaagcgagacgtgatgagccggtgaaaagcaatggcggaggagtggaagacgctaagatgattaggtttccgatgaataggatccggaggataatgagaagcgataactctgctcctcagatcatgcaggacgccgtgtttcttgtcaacaaggccacggaattgttcattgagcggttttctgaagaagcttatgaaagttctgtccaggacaaaaagaaattcatccactacaaacatctctcatctgtagttagcaacgacgagagatacgagttccttgcggattgtgttcgtgagaaactaaaagcagacgtggcgatggaggaatgggaaagaagcatgacagatgcaggctgataaatacaccggttggaagcaacctgaaccgcgtgtcctgtcctggtttattgattccatctgcctggtcttcaccttttttaataacctccataatgagattgcacatatttcattactaaaatgtatcaattgcaataatttttatagtataatctgccanacgatgaactttacg

SEQ ID NO: 4274 - DNA, 643 bp, Glycine max
  Peptide Sequence Number=SeqID_7691
  Probeset Number=SeqID_14053
gcacgagaccattacctagaacatcctaatcgaaaaaccagacggggctggtttcagcttgtattcccactctgtcgcacagcgtcgcccgtcgccgctgagatcctaggaagaaatggagctctctcgcaagctcttcacggccgtcctcctcgccatgctgctgctgctggccgcaggtacgttggtgcgagcgggtagacgtcttacatgccgtctgtgctggggactcatcaggcgctgtaggacgggggcagcctactgatgatgatctgtctgagatgctgctgcgtgctgaatgcagaggacggaccggtggtggctcacaagagggcaaagaagaagacagagcacatggggggcgcggcgcaagaagatgaagtcggtcgccccgcactttgacaacaagacctggacaagcccccaaggcgaaggcgtataaataccatgagaccgggggaaagaggtcagggggggcaaaatcctaacccacaccacagttggcgattcaacaagcagataacacgcctcacgggcattttttaaaaggggaacatggcgcggacagaccggtaccacgcccgcgacccacccccaaatccgcgagtgatggttacgtaccgaatcgccgcgaaacccacca

SEQ ID NO: 4275 - DNA, 1745 bp, Glycine max
  misc_feature (1)..(1126): n is a, c, g, or t
  misc_feature (1727)..(1745): n is a, c, g, or t
  Probeset Number=SeqID_14054
nnnnnnnnnnnnnnnnnnnnnnnnnnnnnnnnnnnnnnnnnnnnnnnnnnnnnnnnnnnnnnnnnnnnnnnnnnnnnnnnnnnnnnnnnnnnnnnnnnnnnnnnnnnnnnnnnnnnnnnnnnnnnnnnnnnnnnnnnnnnnnnnnnnnnnnnnnnnnnnnnnnnnnnnnnnnnnnnnnnnnnnnnnnnnnnnnnnnnnnnnnnnnnnnnnnnnnnnnnnnnnnnnnnnnnnnnnnnnnnnnnnnnnnnnnnnnnnnnnnnnnnnnnnnnnnnnnnnnnnnnnnnnnnnnnnnnnnnnnnnnnnnnnnnnnnnnnnnnnnnnnnnnnnnnnnnnnnnnnnnnnnnnnnnnnnnnnnnnnnnnnnnnnnnnnnnnnnnnnnnnnnnnnnnnnnnnnnnnnnnnnnnnnnnnnnnnnnnnnnnnnnnnnnnnnnnnnnnnnnnnnnnnnnnnnnnnnnnnnnnnnnnnnnnnnnnnnnnnnnnnnnnnnnnnnnnnnnnnnnnnnnnnnnnnnnnnnnnnnnnnnnnnnnnnnnnnnnnnnnnnnnnnnnnnnnnnnnnnnnnnnnnnnnnnnnnnnnnnnnnnnnnnnnnnnnnnnnnnnnnnnnnnnnnnnnnnnnnnnnnnnnnnnnnnnnnnnnnnnnnnnnnnnnnnnnnnnnnnnnnnnnnnnnnnnnnnnnnnnnnnnnnnnnnnnnnnnnnnnnnnnnnnnnnnnnnnnnnnnnnnnnnnnnnnnnnnnnnnnnnnnnnnnnnnnnnnnnnnnnnnnnnnnnnnnnnnnnnnnnnnnnnnnnnnnnnnnnnnnnnnnnnnnnnnnnnnnnnnnnnnnnnnnnnnnnnnnnnnnnnnnnnnnnnnnnnnnnnnnnnnnnnnnnnnnnnnnnnnnnnnnnnnnnnnnnnnnnnnnnnnnnnnnnnnnnnnnnnnnnnnnnnnnnnnnnnnnnnnnnnnnnnnnnnnnnnnnnnnnnnnnnnnnnnnnnnnnnnnnnnnnnnnnnnnnnnnnnnnnnnnnnnnnnnnnnnnnnnnnnnnnnnnnnnnnnnnnnnnnnnnnnnnnnnnnnnnnnnnnnnnnnnnnnnnnnnnnnnnnnnnnnnnnnnnnnnnnnnnnnnnnnnnnnnnnnnnnnnnnnnnnnnnncgttgatcggcagattatgaagcatgaggaggatttaaagaaggagtctcaaaaaattgaaacccttaaagataagggtgagaaatcttcgattatgataccagaacttgaaaacaagagttcaaaatggtcgaggttgttgcttgatgaggagaaggtcttagaagaaatcacagagagttccaaagcaaaatatgatgttgcaatatcaacagcatgccatggacttgattatattgtggtggaaacaactaatgtagctcaagcatgtgttgagttacttcgtacatagaatgtggctgtccctactttcgtgatgctggtaggtgcttctcttgcctttgaagctgctcgtttgcggctctaaagcgctgctgaatcttttgaatcgcaaactgccagcatttctcaaatcaacagtgatatagaaaagaggaagcatgaagcttcagaagctcaccaaattgaagaagaatgtatcaaagagcaagatgaactgattcctcttgaacaaagtgctagacagaaagttgcagaactgaagtctgttctagattctgagaagagtcagggatcagttcttaaagcaatcctgaaagcnnnnnnnnnnnnnnnnnnn

SEQ ID NO: 4276 - DNA, 514 bp, Glycine max
  Peptide Sequence Number=SeqID_7692
  Probeset Number=SeqID_14055
ctagcccagctgcccacccattcccctcaccgccgccgccgcctcctccgccgctgccgccactgagatggggccgcctgcgcggcgcgtagcgtaaggggcccggctccgaagtcaagtcccacccccaccaaggcccgcgccccgcccggttcgggccgctccagttcggggagcgcaaacgtcaccgcaagcgcctcgtaactcatgtccgccacgacccgtggcgtgctgcgcccctggcctaggtcgccgcccgccacccggtccggtccccacacgagaaggtgctcttcctcgcaggcgatgttctgcgccccggccggttcgtccactgcgcagcgccgcgccacccgccgccgaggcaccctctccccgctccgcgccctcccgctgcgctccgtccctgggggaggcgtcctccgcaacgtcgagcaccacgtcggcgcccgggcctccggtgactacgccatcgtcatcagccacaaccccgacaacggcacctcaaggatca

SEQ ID NO: 4277 - DNA, 241 bp, Glycine max
  misc_feature (2)..(3): n is a, c, g, or t
  misc_feature (13)..(13): n is a, c, g, or t
  misc_feature (19)..(19): n is a, c, g, or t
  misc_feature (21)..(21): n is a, c, g, or t
  misc_feature (31)..(31): n is a, c, g, or t
  misc_feature (33)..(33): n is a, c, g, or t
  misc_feature (35)..(35): n is a, c, g, or t
  misc_feature (42)..(42): n is a, c, g, or t
  misc_feature (44)..(44): n is a, c, g, or t
  misc_feature (46)..(46): n is a, c, g, or t
  misc_feature (57)..(57): n is a, c, g, or t
  misc_feature (59)..(60): n is a, c, g, or t
  misc_feature (62)..(62): n is a, c, g, or t
  misc_feature (72)..(72): n is a, c, g, or t
  misc_feature (97)..(97): n is a, c, g, or t
  misc_feature (121)..(121): n is a, c, g, or t
  misc_feature (140)..(140): n is a, c, g, or t
  misc_feature (189)..(189): n is a, c, g, or t
  misc_feature (211)..(211): n is a, c, g, or t
  misc_feature (219)..(220): n is a, c, g, or t
  misc_feature (222)..(222): n is a, c, g, or t
  misc_feature (235)..(236): n is a, c, g, or t
  misc_feature (241)..(241): n is a, c, g, or t
  Peptide Sequence Number=SeqID_7693
  Probeset Number=SeqID_14056
annacttgtcttnttacgncnctggataccnancntggtctncntntctactgctcnannangaggatcctnctcctatggaacctcctatgggatnaccctatggaaccacctatgagancaacagcagcattagcaancctccttcacgccaaagcgcgaaggtcgataactgctgcaactattggnatcacactccttactcctgtcngggttgcnncncccagggaactgnncatan

SEQ ID NO: 4278 - DNA, 695 bp, Glycine max
  Probeset Number=SeqID_14057
aactgttctagggcttgcacagttccattttactgttcatttccgatccataattgtcccgacgcgatacaccaatgcttccttcctttcatctcgtgatatccaaagagttgcgacacggttgcgcatatccagtatgcaggcatcgcgggtaaggctgttcaagggagcacaaagaggtgcagcggaacaaggctgctgatcttgatattcagctagctcgcgatgattcaaacatttttaaatggaccgcctccttactcaagggacccctctgacactcctttatgaagggtggccgcggcccagcgttgcatctctctgggtccggaagcagcatcctcttcagcccaccccgaaggcccggatggctagactaagataatttcccccgaaacgggcagttgttaagaactggacgaaatgttccccgaggaatatctggcaaaaatggcttggcagccccccactttggacaccttggaatcctggccggcaaggaccggatatttggcgggtccttggggccaatgccagaaacctggaccgggcccagtggaatttggaattgcccgtgcaatccctccgggcgttccgaggaaaatgttcaaaagcggccccccacccctgcagcgcaggaagcgaacgaccagacatccccgcgcctatggccaaagaaaagggctggcagggct

SEQ ID NO: 4279 - DNA, 559 bp, Glycine max
  Peptide Sequence Number=SeqID_7694
  Probeset Number=SeqID_14058
ccattttcctttcactttccatcactttctctcgtttccccttcgcaattccccctctcgaaagacacacgcatcgaagaaaatcacatcacggcaatggaggacaaccacgccccacccatcgattccttacacttcgaatctaacggcgtctctcacggcgccgaccacggctggcagaaggtgacctacgctaagaaacagaagaagaagactgttaacgccgctaacggcggccccgattcccgcgccaattccagcaagctcgtgagaatggcacgcaggggcggaacgaggacgagttaccgggagatcgaagcgcaaacggagggacgcgaccggaaagattaggaggcaaataagaggggggatggcggagaacacgagaaaaagccggggtcggagcggagcaagggcatcaaaaatagggggagaaggcgcacgacgaggacggggagggtgaccgtccccgccggaaagcggaagtcgaggaaaggaaaaaggggagaccgaaaaaaaggaccaaagctaagcgggggcggagcgggggcgcccccca

SEQ ID NO: 4280 - DNA, 1436 bp, Glycine max
  misc_feature (167)..(167): n is a, c, g, or t
  misc_feature (258)..(258): n is a, c, g, or t
  misc_feature (278)..(278): n is a, c, g, or t
  misc_feature (459)..(459): n is a, c, g, or t
  misc_feature (518)..(518): n is a, c, g, or t
  misc_feature (1077)..(1077): n is a, c, g, or t
  misc_feature (1418)..(1418): n is a, c, g, or t
  misc_feature (1424)..(1425): n is a, c, g, or t
  Probeset Number=SeqID_14059
ccgtgcgtaacctctgagatgtatagtgacatactagttctcttcactccgatgacacacgcatgctacgcgtgcgaactttatctttgcaggcactcccatccaatcgtcgaccagcctcagatgtccacacatgaaagaagtgatctgcggtcgatcgtacacgngatactccgtgacatgctcggcacatcatatacgccatggttgccggcggcggtgcagagagcaacaatagtctctcacctgtgtcaatanggagcgtcacggcctctccnatatccctccaccatccttcggaacagagattgcctatctcgatccgcacgcacgagtagactgttcacgtcttatacagtatagcgaagcgcggcagaaatcatctcatccacaggagacggcgtgagagaatatacgagattcagtagcgtgttgagctccagcctcttgtgggtgcantgtactctatgttcgcacgtcattcatatcgagagacatatacgtccacacatcacgcngagacggaacagaacacctaacatactcttggctgcggtgtcctcaaatctaatacgcgcgtgccttcctactggaatacaatattggcgtcgttcctgccgcctatgcaaatctagagctactcgcgccaatcctttagatctgtagtcgggctacatccccgacgttcgtacaacataggatagtgtgctatacgaggcgacaacaccagtcgatctcggttccctcgccgcagacacccttctcgcctacgaggaccccgctagacactcatggacctcgcgtcgtacgcgcgctcctccatcgcaatacccccgcctgtcaaaacaaccggtcactctaggtacggagcacagtcccccttccgaagtctggtcccgttagcctcagcagtatgactgatccctggtggctgctgatggagggcgagcgcattaccctactacactgtgcaagtcaatagactagcctctagcaaccgacactgaaggccttcgcagcataacggaccgtgccatgatcaaaagagcacctgttcactgacgatttaatatctgnctgggcgctattacggagggcagctaatagcgatcgtagcgctgcggaaggtttccccctggctgcggcgccactgctagaactggatgtgtcggcggtccgctataaggttccagctgtgactgcagtgtaaacgcggttctctggcctagggagtatataatcaagcgagactggtgctgcgtgttggaatattctctgccagacaccgcgcgggcatcccaccatagtatcctaggaggcgggcacgctcctgccgctcggtggaagcctccccagtcttttaaaaaccacccaccccatcagcgctccgccagggctactgggatcgggccgattgngggcgnngtggctcggcg

SEQ ID NO: 4281 - DNA, 1398 bp, Glycine max
  misc_feature (1)..(1): n is a, c, g, or t
  misc_feature (154)..(154): n is a, c, g, or t
  misc_feature (329)..(329): n is a, c, g, or t
  misc_feature (356)..(356): n is a, c, g, or t
  misc_feature (927)..(928): n is a, c, g, or t
  misc_feature (930)..(930): n is a, c, g, or t
  misc_feature (1257)..(1257): n is a, c, g, or t
  misc_feature (1318)..(1318): n is a, c, g, or t
  misc_feature (1320)..(1320): n is a, c, g, or t
  misc_feature (1325)..(1325): n is a, c, g, or t
  misc_feature (1356)..(1356): n is a, c, g, or t
  Peptide Sequence Number=SeqID_7695
  Probeset Number=SeqID_14060
ntggtcctggtgcacacggacacatgtcatatgagataactgatatatagtcaatagtcagtcaagcatcacacacctcagtacacagcgcgctagtcgctgagcactcatccgactgtgacctgtcactggacacaccttacttgaccgtggnatacatacacactctaccgaagtacaagaacacacagcacgtggagaggtgacccaggcatatgtcgactgtataattcatattactcactctacgtcacatcgctcacgacatcaccaagttcatacgctactgacaacaccacctcacccgcgccccttccactgctagatancagtccacatcctgtgtcgcagtcagngacacggcaggtgagtaggcgacgtatcagacacacgctctggcgcggtttctcacaacgtagagtaagagtcctttataagtcaagagaccgtcatatctctgtgtctagccgagtcactgctatgacgtcgcgcactctcctcaccgtcgcgtcctctgcgtgtcgtgtcacagattggtcgcggatcgcgctctgctccgcctgggcgctcagctcaagggactgactggtttggtgtgtgatttctataaaatatctatccgctgcattaattaacattataaatatgtgtgtgagggtggtgggggtttgcaaggcattccaccacactcccacctcaaccatcatctaccttactgctcttctctgaattcagatgatggtactcaacacacacgctcatctgtctgatataatattgcgtcagcgctacttccttctttctaattttttcatcatctaactcctccacactcacctcatgtcctccatcgcgtcgctgatacttactgttccgtcatatttcctcattactactcatttctctcctataattacagcaggttgnncntcactagccaaacacgtagcccctccgcctcacccgagcgccacccacacgcctcattcgcttttcctgccctcttatatatgagatgcattatactactgttatccctccgtatctccgcctctccaccgtccgccatcggccatttgaactccacccttcacctcgtggccggttccgcgtaggagaatactacacctcccgtcgtgtgtgttgctttctctggtggtatatcattgtgtgttgtgttgttcggctatagtcgggggtgtggggaggaggcacccagcgccccgcgctccgctactgtctcctgcgggtgcgcgnccgacccctacaagtatagattgtgttcttgtactccgcttccttcccagatatgttggantnttgtngggtggccgcccaccccctacccgcaggggngggggtgggcggcgggcccccgggacggggcacaaaaacccc

SEQ ID NO: 4282 - DNA, 488 bp, Glycine max
  Probeset Number=SeqID_14061
aaatattctcactttagaataaatttgggatttaggatcattgattaaagatggttaaaaactatagaaacagctccagaacttccaagactcctcttaaccctttcgaaaaggaaagactcgatgccgaattggaaattgtcggtaaatacggtttgaagaacaagagagaagtctggagagtccaactcgttttggccaagatgagaaaggctgccagagaacttttgacccttgaagaaaaggaccccagaagactcttcgaaggtgaagccctcatgagaagatgcttcagatacggtctcctcaacgaatctgaaaacaagctcgattacgtcttgggtttgacccccgctagattcatggaaagaagactccaaaccgtcatcctcagaaacaacttcgaagccagatctatccaccacgctagagtcctcatcagacaaagacacatcagagtcggcaagcaactcgtcaacattccctct

SEQ ID NO: 4283 - DNA, 2325 bp, Glycine max
  misc_feature (1)..(36): n is a, c, g, or t
  misc_feature (2325)..(2325): n is a, c, g, or t
  Peptide Sequence Number=SeqID_7696
  Probeset Number=SeqID_14062
nnnnnnnnnnnnnnnnnnnnnnnnnnnnnnnnnnnncacgaacccttttgatttgttgggtgacgacgctgaggacccttctcagctcatcgccgccgagcaactcaaggcggcggctgcggcctcggcggccaccgcggctcccaagaaggcgccggctcagcagaacaagccggctcagctccctaccaagccgcctcctccggctcaggctgtgagggatgccagaaacgagccagttcgtggaggccgtggaggtggacgaggtgggggacgtggatttggacgtggtcgtgggtttagtcgtgactcctcgaatgatgagaactcattccctaccagcagagctccttataatcagggtccttttgaagggagatgctgggaagtcttttgaaaggcgtggttatggtggaccacgaggtccttaccgtggtggtggtggtcatcgtggaggtttcagcaatggtgaaattggtgaagctgaagaaggacaacctcagagagcatttgatcgttgtaatgggattggacaaatgaattcaaacgtgaaggttcaggacgtggtaattggggaacccaaactgatgaacttgctcaggtaactgataaggttgcaaatgaaactgaaaagaatttgggtgatgagaagcctacaatcgaagaagatatagttgatgttaaatgtggaaggagagaaatgacacaagtgtgttaatgcaatggaaaaagatgaaaatgacatcttgtgggtctttggagagaacatgtcatgtgccttgtcctaaggtgttgttgttcccttttttctcatctctttctttttctcgtgcttgtattttcactttttacttatatatttaaactaactataatatatacattattattattgtttttatttggaatgctaggaagagttcaaagcttagtgaccagagctcttattgtgttactttgataagaaattgataagttcttatagttctgtgcaatcactactcataattttaattaaatgtagtcttgtagcagctatacttttgctagacttattaatagcctattttgcttattccttcaataatagtgtgctttcattgagattagtgcttgcatttaactgtcaggctcactctttttaggttggagatgtagtgctttttggtatagatcttctactgttttccaaaactttaccttctgattcatgttgctttctacctatgtctccaaattcttagtgatttcaaatttgttttctctaagattttagaagcaggaaaaaccatactttgtcagcaatgttgctgaaattttctgactattctcagttgtaatgtttcattactgatgcaggagggacaaattttgtgagtgctatgtctgcaatattctccttgtttttaattatatctactaccttataattaactatcaggtgcgaacactggatcccaaagctgtcaatgatgaaaattgcactggaaatactagtgatggtggcaacaacacatggtgaagtgcaggctcggagaagaacaagatgaaagtgaggaggaagctaagagagccacggttttgtttccaaacaagaaatgatgtagatgtgcttgatgattgttacaaatgtaagaagtatggttagaaagttgtgaagaatagccttcacccaagcaaaatgaaaagaaagatgactccaatgaagtgccaagtagcaattatacagggattgagacagaaaaggatttttaggttgacacaataagccttagtgaggactcatctatacaataatgtatactagtggaactactggtgaaatgacattatgcaactttggttattcatagtaagtgttgtttttgtaaatagtttctttagtaaaggctaaatgatgacatacttgcaattaactatcctggcacaaaacatccccccacctcgcccctccacccacacccacaaacgcccccactccatccgccgatattctctcccctttgtttcccctaccccgcgggatccccacaacctcaaaacggccccccccccgcgcggacacccaaccctctggtcccctttagagcggcgccaatttctccgtctcttcgggccacccctcgttctccccccgtctcccctgggggacaatccctccccccaccacaatttccaaccacacacctcgacccccaacctcaatcgggaccaatatttcccgccccacaaccacgaaacccatcacccacacccatccgcggcgtctttctccagtccaattttctacgaccgaaccccctgccccgagactacccgctatan

SEQ ID NO: 4284 - DNA, 1733 bp, Glycine max
  misc_feature (1)..(1): n is a, c, g, or t
  misc_feature (54)..(54): n is a, c, g, or t
  misc_feature (122)..(122): n is a, c, g, or t
  misc_feature (151)..(151): n is a, c, g, or t
  misc_feature (359)..(359): n is a, c, g, or t
  misc_feature (399)..(399): n is a, c, g, or t
  misc_feature (406)..(406): n is a, c, g, or t
  misc_feature (468)..(468): n is a, c, g, or t
  misc_feature (471)..(471): n is a, c, g, or t
  misc_feature (574)..(574): n is a, c, g, or t
  misc_feature (611)..(611): n is a, c, g, or t
  misc_feature (675)..(675): n is a, c, g, or t
  misc_feature (701)..(701): n is a, c, g, or t
  misc_feature (709)..(709): n is a, c, g, or t
  misc_feature (795)..(795): n is a, c, g, or t
  misc_feature (1151)..(1151): n is a, c, g, or t
  misc_feature (1178)..(1178): n is a, c, g, or t
  misc_feature (1229)..(1229): n is a, c, g, or t
  misc_feature (1247)..(1247): n is a, c, g, or t
  misc_feature (1254)..(1254): n is a, c, g, or t
  misc_feature (1350)..(1350): n is a, c, g, or t
  misc_feature (1443)..(1443): n is a, c, g, or t
  misc_feature (1480)..(1480): n is a, c, g, or t
  misc_feature (1487)..(1487): n is a, c, g, or t
  misc_feature (1602)..(1602): n is a, c, g, or t
  misc_feature (1677)..(1677): n is a, c, g, or t
  misc_feature (1693)..(1693): n is a, c, g, or t
  misc_feature (1696)..(1697): n is a, c, g, or t
  misc_feature (1700)..(1700): n is a, c, g, or t
  misc_feature (1704)..(1705): n is a, c, g, or t
  misc_feature (1707)..(1708): n is a, c, g, or t
  misc_feature (1721)..(1721): n is a, c, g, or t
  Peptide Sequence Number=SeqID_7697
  Probeset Number=SeqID_14063
ncgaggagaccagtggagtagtagatgaacgcagcgatcagcagggggcacatncacagaactccgtgctgcgatcgaggtgagagtacgtgtgtcgatcatcgtaatcgagcattcaagtngtgtcgcgtgtctgtttcggcgcgatcgntggatgtataagagcagagtagacaggactaccgagcgctgcagagtctgtgtgacgtgagtgctcatagatattatctacgagagtgtcgagagtggtgcggacatacatatacgtatacagagtagtacttagagtgacagtatagcacatgtatcgtatgaccatctatagatcatctatcaggtgcagtgagatgagtgagtgnttatagcacacgtagtcacgtcttacatgtctatatcacntagtatntatgatgtgatagtaggtgaggtagtgagtgtatatatactattgatagttgaagtcacacntcntttgacgtatggcagtcgcagagaacggcgtacgcgtactgataggctgatgtagacatgtgtgtatagcatatgcgtcgagagtgatcgtagcagagcgtgngcggtgagtgaagagtgtgagcggacacagtactagntatcgatctcgagtcacgagacatgagagtcgcgatcggagggagtgcgtgtgtgtatcgtatntcgtagatcgtgatagtgctatagtnatctatancaccgatcatatcatctacgttcacgagtttcatatcacgtactcaatgcacgatatgcgagactctctacacatgctcgtcagantagacatagatgaccgtacttcgcctacctatatgtgatgtgactgtcgtgatagtcaccacatatatcatatctacgtgcatacgtgcgatgtaggagtatatatatatggagtgatgtgtagttgctgtgtgtgtagtatagatggtatgtggtgtgtctgagtgtatagtagatcggtcgtgcgcatcgatattcatattcgcgcaacctcacacacagcgatatgagtcgtctcgagatgatatacagagtacagcttgtaatcatccattcaggattaatacgcgggagtgggcgtgtccgcgtatagcatagaactgtaagacgcaagatgaatattatcaagacaaaancaatagtgatatatttgctcgtgtctngtatattttataacgaaatacgacatatatatagagggtgtgtgagtgatntcttctttctgtagtgtnatacaancctacgactccacgcagagacgtgcgtgtgcgcgtatagcgcactagtagttatataaataggaaatcattgcgataagtgcacagctagtattcntaaactataccgtgaggggaggtgacgcaagatcaccgtacgcgcggcacgagccacaatcaagtcagagagaagggtagctctcgtgagcantgagtgagtattgactacaagagtcgtggcggggagnagaactnagggcggcatagtgactgcacgtctctccaccgctcccccctacctgctagcggagcttggtatgtggcatgccgctaatagagtgagtatgcgcgggccgcgggcgcaccccanacaccacttaggcggttctttatcaccatgactctgacatacgcgcgcatcgacggctcgcgcactccatggctntcacccatatacgcanccnnccntccnncnnccgcatctccaanaagaacaaaaaa

SEQ ID NO: 4285 - DNA, 171 bp, Glycine max
  misc_feature (2)..(2): n is a, c, g, or t
  misc_feature (153)..(153): n is a, c, g, or t
  Peptide Sequence Number=SeqID_7698
  Probeset Number=SeqID_14064
ancatattagcgggctatggcccagttcatattagccgaagcccaggcccttcatttttcagttggaagaaacagccggagcaaagcccacctaccttgcgcagtttgacgagcttctcgagatctgctctctgcaggaaaaaaaaaacggcnccgccccctctccgttaa

SEQ ID NO: 4286 - DNA, 1624 bp, Glycine max
  misc_feature (1)..(1): n is a, c, g, or t
  misc_feature (18)..(18): n is a, c, g, or t
  misc_feature (90)..(90): n is a, c, g, or t
  misc_feature (94)..(94): n is a, c, g, or t
  misc_feature (165)..(165): n is a, c, g, or t
  misc_feature (168)..(168): n is a, c, g, or t
  misc_feature (495)..(495): n is a, c, g, or t
  misc_feature (499)..(499): n is a, c, g, or t
  misc_feature (992)..(992): n is a, c, g, or t
  misc_feature (1034)..(1034): n is a, c, g, or t
  misc_feature (1586)..(1586): n is a, c, g, or t
  misc_feature (1598)..(1599): n is a, c, g, or t
  misc_feature (1611)..(1612): n is a, c, g, or t
  misc_feature (1614)..(1615): n is a, c, g, or t
  Probeset Number=SeqID_14065
ncatcgcaatccgcctgnactgacgacatccctgagagcagtgtgctacgcgtgcatcatgtagggtgctcatcgtgtattgtatgatgntatngaagacgatatccctgcgtatttgctatactcgtccgcctgagagtgcttcattgtactaccacatgtgtncancgcgtagcgcgtgtattgtaagaacttacgacgtgcgcatctgtccttgcgggttctagacgacgattccgtcatgctagagtagctctgtagtggtcacgatgatatatcaccgtcgagctcttgtcgcgcacttaccaagagcgaccttgtgatatcaccgctctctctcttgcttctgttcgtctataccactcacctcaatatctacacttgcataccacttcacatcgacactattatccactcttcccctctcgttgtttgctgcttctgggtatggacagagcaccgagcatccgcaacatctacggcgatatgacgcgncgcnaatactgcacgtgagctgagagaagcaggtcgatctatcgtgttgttcattaagctacgctacgccacgatcggtagggcgtgcgtatccggtcatagaccaccttttactgttcctaagtgttgatcggcgcgatcccatgtgttatcggccgtgctagcgatattgcgcgcttcgaggcacgcgttgcgcacagcatgctggtctattggcgcctgacttattcgatacactcggacgctcactctcgcatcacatggaatctactaggtactatctgctcgtgtttccttcacccctaatgcttctacacgcctacggacattctcttctaccaggccatgcgctcgaactacattcgtctctatcatgtcccaaatccgtattagatttcgtcttcatgcgccacggccgcctgcgatatgcccagctctccgcgcctctagatacgacggctagtacacgcttagcctcacgcacagtaggaagaganctcgctttctgctccctctaaatatccaatcgacatagctcnccccatcgatatcatacgcgccacgtgatagatcaggcgctcagtcacacatctttcttctctgtgtgggaagtgagaggcgagacacactcacctgcatgctcgcagtcttttcgttcgcaggtcgcctgtgtaagctacactggggctagcgccactatcctcttcttcctaggcatctttctagccatcacacggttatggagtcttcattgtttatgtttatcaaggtaatgagtacggctgccgtgattaacactcccggagagccgatcatccctggggctgtctggatgatagtatcgatggccggcgcgcaacctaaacctcactactccttccttcttcccgcgtgagacaacaataagccgcgccccactcatcgggtcgacgggaggctattctgacgctacatttggcgatctcacctcgccctctggggaaaaatcacaatacacgacgggagggagggtgctctagcgtagactgccctccgaggtggggagacccgtgtaccccaatttcggcaatggggtgaggatctcgtcgttnttcccggccagnncgggcaggtggnngnngggggtgag

SEQ ID NO: 4287 - DNA, 1978 bp, Glycine max
  misc_feature (12)..(15): n is a, c, g, or t
  misc_feature (19)..(23): n is a, c, g, or t
  misc_feature (58)..(58): n is a, c, g, or t
  misc_feature (62)..(62): n is a, c, g, or t
  misc_feature (65)..(65): n is a, c, g, or t
  misc_feature (73)..(75): n is a, c, g, or t
  misc_feature (107)..(107): n is a, c, g, or t
  misc_feature (152)..(152): n is a, c, g, or t
  misc_feature (154)..(155): n is a, c, g, or t
  misc_feature (157)..(158): n is a, c, g, or t
  misc_feature (160)..(162): n is a, c, g, or t
  misc_feature (164)..(166): n is a, c, g, or t
  misc_feature (183)..(183): n is a, c, g, or t
  misc_feature (198)..(198): n is a, c, g, or t
  misc_feature (200)..(200): n is a, c, g, or t
  misc_feature (270)..(270): n is a, c, g, or t
  misc_feature (287)..(287): n is a, c, g, or t
  misc_feature (290)..(290): n is a, c, g, or t
  misc_feature (317)..(317): n is a, c, g, or t
  misc_feature (373)..(373): n is a, c, g, or t
  misc_feature (416)..(416): n is a, c, g, or t
  misc_feature (447)..(447): n is a, c, g, or t
  misc_feature (463)..(463): n is a, c, g, or t
  misc_feature (637)..(637): n is a, c, g, or t
  misc_feature (772)..(772): n is a, c, g, or t
  misc_feature (789)..(789): n is a, c, g, or t
  misc_feature (948)..(948): n is a, c, g, or t
  misc_feature (1006)..(1006): n is a, c, g, or t
  misc_feature (1026)..(1026): n is a, c, g, or t
  misc_feature (1102)..(1102): n is a, c, g, or t
  misc_feature (1128)..(1128): n is a, c, g, or t
  misc_feature (1309)..(1309): n is a, c, g, or t
  misc_feature (1416)..(1416): n is a, c, g, or t
  misc_feature (1490)..(1490): n is a, c, g, or t
  misc_feature (1523)..(1523): n is a, c, g, or t
  misc_feature (1568)..(1568): n is a, c, g, or t
  misc_feature (1570)..(1570): n is a, c, g, or t
  misc_feature (1579)..(1579): n is a, c, g, or t
  misc_feature (1591)..(1591): n is a, c, g, or t
  misc_feature (1642)..(1642): n is a, c, g, or t
  misc_feature (1665)..(1665): n is a, c, g, or t
  misc_feature (1677)..(1677): n is a, c, g, or t
  misc_feature (1725)..(1725): n is a, c, g, or t
  misc_feature (1732)..(1732): n is a, c, g, or t
  misc_feature (1853)..(1853): n is a, c, g, or t
  misc_feature (1860)..(1860): n is a, c, g, or t
  misc_feature (1873)..(1873): n is a, c, g, or t
  misc_feature (1897)..(1897): n is a, c, g, or t
  misc_feature (1906)..(1906): n is a, c, g, or t
  misc_feature (1908)..(1908): n is a, c, g, or t
  misc_feature (1911)..(1911): n is a, c, g, or t
  misc_feature (1915)..(1915): n is a, c, g, or t
  misc_feature (1931)..(1931): n is a, c, g, or t
  Peptide Sequence Number=SeqID_7699
  Probeset Number=SeqID_14066
tgatttttgttnnnntgannnnntgaggtggatgtggcgtgtttgttgtggtgtcaantgcnaancaaacaannnaccacaaccaagcgccgtgtagtcaatcaganagcgtatttgatataatatctctggtgtgactactcacactcaantnnannannnannnatattccctctcctccncacatcactcctcancncatcaccgacgcggagccgcgccctcaccatattagtccacgtatggcgacgacacaagataagcggtgnagagaggtgttggtagntanttagtctactaccggcaatcccgcaanagactaataatagtaatctatgggcgctagggtcgattcacaatgaggctgtcctnacataatgcggtgtatagtggtgagcacctgagcgttcgtttntgccacgcgctgccatacacttcgccacatntatcccgctgccattntgtgatgattttatctactccgctttatatcaaatgtagcacgagtgagcacggagaatagggtagagatacgttgtgaatgtgtatgatatattctacaatacatctatatcatcgctgtatgtctgcttcattcgttgatcgtgatgttctggtgattctcttctgcggtcntgattgcgtcgtgcggtgtgtggtccgcgctctgtgtatatattgtaatgttagagtgtgaagttcctcgtgtgtagttacagtctgctctgaatcgaaatgtaaacatttatgacagcagacatatattcgcgnatatcacacaccacgancagcatacatcgtgtgtcgtgccaccgcactcgccctgtgtatatatatcgcgtagacagttgtatatattatatcacgcgtggagctacggccactcatcacctacacttccacagtagtatcaggtccgtaaacgtattgcaccaatacccattctntgcacatacattatatatactgcctgcatcgcttgcggttaatcactcactctgctgngtgctggagagcgtatgctngcactcgatcggagccgcgggtatgatagaagtgagcgtccgcgcactgactgtctcatgctgtgacgatattatngtcacagcaagacacactcaaatctntatcgcctactagagtgtgtattcattcttatcttaagacatataacaagatctatgtgagagggtctgtgctatcgtacgttgcgcgtcatgcgtctgtctcgatcgtgaacacacgacgagcgtgcgatgatgatgcgactgtgctcagcactacaccatcactagcatcgcatatgantcggtgactagagtggcatgagcgccagcgacgtacacagtttcgtcgtgcttctgtatgcctgcgtcgatattgattgagctggatgatacgcatgtgatggagangcgtcgctctcacttctcgacccgtcgcgtctacgatgccagacgtatagacatgcgattactcagtcatcatntcgagatatgcgcgtggtacgatcaacgcgccnagcgcgcgtagctcagctgagacgtgttcatatgtatgactgatntnagtgtgtcnagacgagtctantgatgactgatgcagcgtacgtctgacattgatcgtgatgctgcgctatcngcgcaagtgtatgtattcgtatngattacatagtncatgacgatctatcttcacagcacgcgcgactccgtctagtcgcatantctgacnctgtctgtgacgcagtgtgctctgatgatagctgtcagcatacgatggaggaccaggtggagtactacgtgacgacctgtgaacagcatgcgcaagatactaaactctatgcgcaacagantgcgatnagtaaagtagtantgatgatgatgacatgtgcaacanagatgctgnantcnttgnccagcatcgtactgcnactagtactcgtatggaacgtctctcatcaccacaacacaacaacag

SEQ ID NO: 4288 - DNA, 625 bp, Glycine max
  misc_feature (1)..(1): n is a, c, g, or t
  Probeset Number=SeqID_14067
ngcttgcgagcgcggcatgggcggctgagcgcaatttgccggtgctcgcgtacctgacattcggcaaagcgtgggcagttgacttcgcgagcggcgaggaaggtttgttgatggcgccggcgtacgcggtacccgccatgttgaaggatgccgggctgacattgcaggatttcgactactacgaaattcacgaggcgttcgcgggccaggtgttgagcactcttgcggcctgggaatcccccgagtattgccgggaggtgctgaagttaccggcgccgctgggcagcatcgatcgcagcaagctcaatgtgaagggcggcagcattgccatcggccacccgttcgcggccacgggaacgcgcattgtcagctcattggccaaaatattggcgggtgaccccaacgccaggcgcgggctcatttccgcctgcaccgcaggtgggatgggggtaacagcgataattgagcgctgaaccgcggcgcgaaccaggaccccggctccgcgcgaacgttttcgcgccaatgaacgatagtgacagcgatagtcgagcgctgccgattgtgatcctggtctgattcctccccctcccacggggcctatgatgtggtatggagggggacattc

SEQ ID NO: 4289 - DNA, 328 bp, Glycine max
  Peptide Sequence Number=SeqID_7700
  Probeset Number=SeqID_14068
gccgatcagaaacatcgccgtcggaagggctgaataggctactcaccccgacacgttgaaggcggggttgactgagttcatctccaccttgatcttcgtgttcaccggatcatgttccggcatcgcctacaacaattttaccgacaacggtggcgacactcccgccgggctcatctccgattccatcgcccatgctttacacctcttcatcgacgtctccgactgcgccaatgtctccggcggacacgtagacccccacgccaccttcaggaacttcaggggcggggacatcaccttactccgcgaaatcttatatcagatcagccaa

SEQ ID NO: 4290 - DNA, 1463 bp, Glycine max
  misc_feature (20)..(21): n is a, c, g, or t
  misc_feature (24)..(25): n is a, c, g, or t
  misc_feature (30)..(32): n is a, c, g, or t
  misc_feature (34)..(35): n is a, c, g, or t
  misc_feature (39)..(39): n is a, c, g, or t
  misc_feature (42)..(42): n is a, c, g, or t
  misc_feature (63)..(63): n is a, c, g, or t
  misc_feature (80)..(80): n is a, c, g, or t
  misc_feature (88)..(88): n is a, c, g, or t
  misc_feature (157)..(157): n is a, c, g, or t
  misc_feature (170)..(170): n is a, c, g, or t
  misc_feature (244)..(244): n is a, c, g, or t
  misc_feature (250)..(250): n is a, c, g, or t
  misc_feature (270)..(270): n is a, c, g, or t
  misc_feature (497)..(497): n is a, c, g, or t
  misc_feature (887)..(887): n is a, c, g, or t
  misc_feature (1425)..(1425): n is a, c, g, or t
  misc_feature (1463)..(1463): n is a, c, g, or t
  Peptide Sequence Number=SeqID_7701
  Probeset Number=SeqID_14069
gggggggccgccgccgcgcnngcnnggggnnnanngggnganagaagagaaaagaaaagaaanctcgccccctcccctcngctcttcnttcaacgacgactacagctgtgtatcatacaagcccaccacacgcaacaagcagctgtcacgcacactntaatcgtccggcnaagatagaataaaaaacggggattaaccgcacagtcgcgacttaatagacaatcatagacaatcgcaatcacgncaatanataatttattataattgtgnagagcgtgcctcgcacgacgatgttcacactctacgctgccaatcgccctcatctctgtgtccactaatcctgtaacagcctaccggtgctctgagccctaaatgctagaaaacataattcaaaagtgtggatatctattctaaacattctttcgcaacacatgaatatacatcgcaatcggcagaccggagcctgccatcaccatctatcgccatcccgcctctanactactcgcacaccaccctcgcgcatcccgcacccgcccttccacgaacacaccacaacacaacttgcacaaaccatgtacaccaccgcgcgtctctctatcccatctactcactaccataatacatattcaccctctaatttatcttcacatgcctctctccacttcatcttccgcactcaccaccatctcatcacacacacctaataagcgacagacaaaccgccgagctaatcgcaccacggagtgcgacgcctcctcagtgaacgtcgataactcccaggagacaccaacaacccgaccggcaccgcaaccactatgcgacgctcgctgctggcacacagagaaagtagatgacgtgtgtactaattcgtccctggtgctcgcgangacgcaggaaagtccgagatggtacacgcgcaacctcacactgtacggacctaccacagcacatcggccgcactgcgcgaccagtcacgcatccacacctagcatgatcgtgatcaaacaccacactcgcgaggcatccgacacatcctgggtgacgtgcggcggcacccaaccagcgcactccaccacctactctgtacacgcaagagatgaacgacacacaacaagctatcacgacacagacacatgaacagaacagccacagagacattagggaaccgactctgcagatcgaatgtagcagcactatgatgagcgcgagcgcacagctacacgagcacgatgagtgtagacaatatggctcgatcaacgcatccagcggcgctccgtcgtgtgcgtgcagctcgacgtccaattacgctggcatctgaggagcgtgacgatgcgatctctgcaccacgcgcgagtggcgatccacaccgtatctgactcaccactactcgacactcacgcttgtcagtcgatctcacagcgtggntcatctaaaatccaccctgtgcatcgatcgtcacttan

SEQ ID NO: 4291 - DNA, 2222 bp, Glycine max
  misc_feature (1)..(1): n is a, c, g, or t
  misc_feature (27)..(27): n is a, c, g, or t
  misc_feature (30)..(30): n is a, c, g, or t
  misc_feature (52)..(53): n is a, c, g, or t
  misc_feature (57)..(58): n is a, c, g, or t
  misc_feature (62)..(62): n is a, c, g, or t
  misc_feature (68)..(68): n is a, c, g, or t
  misc_feature (161)..(161): n is a, c, g, or t
  misc_feature (165)..(165): n is a, c, g, or t
  misc_feature (168)..(168): n is a, c, g, or t
  misc_feature (201)..(201): n is a, c, g, or t
  misc_feature (213)..(213): n is a, c, g, or t
  misc_feature (224)..(224): n is a, c, g, or t
  misc_feature (226)..(226): n is a, c, g, or t
  misc_feature (229)..(229): n is a, c, g, or t
  misc_feature (233)..(233): n is a, c, g, or t
  misc_feature (253)..(253): n is a, c, g, or t
  misc_feature (257)..(257): n is a, c, g, or t
  misc_feature (264)..(264): n is a, c, g, or t
  misc_feature (278)..(278): n is a, c, g, or t
  misc_feature (287)..(287): n is a, c, g, or t
  misc_feature (290)..(290): n is a, c, g, or t
  misc_feature (297)..(297): n is a, c, g, or t
  misc_feature (314)..(315): n is a, c, g, or t
  misc_feature (365)..(365): n is a, c, g, or t
  misc_feature (378)..(378): n is a, c, g, or t
  misc_feature (397)..(397): n is a, c, g, or t
  misc_feature (449)..(449): n is a, c, g, or t
  misc_feature (454)..(454): n is a, c, g, or t
  misc_feature (476)..(476): n is a, c, g, or t
  misc_feature (530)..(530): n is a, c, g, or t
  misc_feature (532)..(532): n is a, c, g, or t
  misc_feature (555)..(556): n is a, c, g, or t
  misc_feature (608)..(608): n is a, c, g, or t
  misc_feature (625)..(625): n is a, c, g, or t
  misc_feature (629)..(629): n is a, c, g, or t
  misc_feature (640)..(640): n is a, c, g, or t
  misc_feature (671)..(671): n is a, c, g, or t
  misc_feature (673)..(673): n is a, c, g, or t
  misc_feature (741)..(741): n is a, c, g, or t
  misc_feature (757)..(757): n is a, c, g, or t
  misc_feature (774)..(774): n is a, c, g, or t
  misc_feature (786)..(787): n is a, c, g, or t
  misc_feature (789)..(789): n is a, c, g, or t
  misc_feature (801)..(801): n is a, c, g, or t
  misc_feature (824)..(824): n is a, c, g, or t
  misc_feature (853)..(853): n is a, c, g, or t
  misc_feature (881)..(881): n is a, c, g, or t
  misc_feature (893)..(893): n is a, c, g, or t
  misc_feature (900)..(900): n is a, c, g, or t
  misc_feature (903)..(903): n is a, c, g, or t
  misc_feature (968)..(968): n is a, c, g, or t
  misc_feature (1044)..(1044): n is a, c, g, or t
  misc_feature (1048)..(1048): n is a, c, g, or t
  misc_feature (1062)..(1062): n is a, c, g, or t
  misc_feature (1084)..(1084): n is a, c, g, or t
  misc_feature (1098)..(1098): n is a, c, g, or t
  misc_feature (1103)..(1104): n is a, c, g, or t
  misc_feature (1110)..(1110): n is a, c, g, or t
  misc_feature (1129)..(1129): n is a, c, g, or t
  misc_feature (1174)..(1174): n is a, c, g, or t
  misc_feature (1176)..(1176): n is a, c, g, or t
  misc_feature (1182)..(1182): n is a, c, g, or t
  misc_feature (1193)..(1193): n is a, c, g, or t
  misc_feature (1244)..(1244): n is a, c, g, or t
  misc_feature (1332)..(1332): n is a, c, g, or t
  misc_feature (1581)..(1581): n is a, c, g, or t
  misc_feature (1584)..(1584): n is a, c, g, or t
  misc_feature (1612)..(1612): n is a, c, g, or t
  misc_feature (1638)..(1638): n is a, c, g, or t
  misc_feature (1694)..(1694): n is a, c, g, or t
  misc_feature (1726)..(1726): n is a, c, g, or t
  misc_feature (1765)..(1765): n is a, c, g, or t
  misc_feature (2124)..(2124): n is a, c, g, or t
  misc_feature (2126)..(2126): n is a, c, g, or t
  misc_feature (2153)..(2153): n is a, c, g, or t
  misc_feature (2186)..(2187): n is a, c, g, or t
  misc_feature (2191)..(2192): n is a, c, g, or t
  misc_feature (2195)..(2195): n is a, c, g, or t
  misc_feature (2206)..(2207): n is a, c, g, or t
  Probeset Number=SeqID_14070
ncgatgagtcacgacgattctgaagtnatngtatggtcatcggacctttcannctcnnctantagtcngcaaatcatccgctgacgtaatcgctgcacacgaccgtgcagtgctcaactgaccacaccttactcatactcctggcatgaccgatcctacgntagntancacagtagtaccagctcacgcagcatgctcaangtcacttcgttngtaagtcggtncntcntcancgaacgtccatgcatgggtngctnctaatcncctgcgtctcactnagcagtgcnctngtagatncccaacagatcgacatnncacatagagtcgagactccatctgttcatacgatcgcatcacatccgtgntcacatcatcgtnggacgcgcgacgtcagctncaacacgacagtcgagcccatatacctgacagcacgtacacagctcgaagcntaatncactacgacgtatcagacgcgnacatctagcatagtctctcgcccatctaccgccataccagtattgctatttatngnagtcttcatacagtcagtatcanntgtcgcacgactcacagacgcgtaaaccaccgacgataaacgtacgatgatngcatgagtcatcgatgnctgnaaacgcagtcnatctatctcatgacgattattactgtcgtcnantttacgtcagctgatgccacgtgacgaagtatatcatatcagatatcgtgctactcagcatgtgagtngtattacacgcgtcancatacactataagtacntatgtatatatnncnctcacatcatcnccactacacatactatcatactnctcgtgcactctatacccgacagccatancacgtcatcgcatgcgccactcgcacanctctcacgcgtncgatgancgntcgtactattgcataacgctccacgtcgccagcgtactacgcatcgatatcagtaacgttatacngagcagtacaacaatgaccgacatgatagcagagtagtataacgacgacgcacacgtatagaacggcgacgcaganttcntatcgcggtgtgtntcactcagctcacaacatcatnacgagggatgtgtngtagnngaatangacgtctagagccgcatgnatcacacatctacgacgaagagcgcttaggtaatgaatatatagnanttagtnatagtacacgncacgtacacacaagagcaagacagatcatcatacacgtgcagagtataaantcagctgctacccactgtcatcactatctattatacgcacgtgtcgtcgtgatccagcgtccacaccagagctatactcagagaagcntcgtacgtgctagtaaccgcgacattgcagcatcatgatagacgatggtcattacacgaagagaacgactaacatatcatactagcaatgcgctcagcgcacctcaacacgagatatgtgtaagtcaaacatatgataattaatgtcttatcatgcacaaatcgaatcattgtgattaatatatatatcactacatctaagctcacttcctgagagacggagctacatagagtaccccagctcgccgtngtnccgcgcgccggctcgacgccttcttcgngcggaggcagcgcgggctccactacngcaccgtctggcagcgcacccacaccgtcgtcccgcctcccagccaccatcccgtngtctacgcttagcaccgctatgctgtatagcntactagatatagcatcacacgcactcatgtgtgagtatntagacacggatacaccacacgcaacctcacgacgatccccccgtcgccacagccaccctcagtcctatatacgaccacaaggcatattatatctatcacatctctcttcctcactctcacctatcttattcttttgcactagtgtagttgtgtcggccgtgttgtgacaggtaataggagtctgatctgcgcctacgctcggttggtgcggtcactgcagttgtacgaacaagacactcctattactatatcatcacatcactatgctccctccatacctcattcatgtctaagcaggtagcggagtcacctaccacgattgtatcgtagtcagatgtggatgggagtgcgcagcgtangncctcttacgtagatccacgatgccatngcagccctgccgccacgcacacctacgaaacannaagnngangagaaaaagannagcgataataggaaa

SEQ ID NO: 4292 - DNA, 1228 bp, Glycine max
  misc_feature (1059)..(1059): n is a, c, g, or t
  misc_feature (1228)..(1228): n is a, c, g, or t
  Peptide Sequence Number=SeqID_7702
  Probeset Number=SeqID_14071
tcagctacgtaggcccccccccccccggcaagttgaatatttataaatattctgatcatattctcattacttgattagcctttggatcctttcagcacctctagttcttcatcagcaccttttccttctgtggtatttgatagacctaatcaacaacaaacactcaattttgagtctattttgcaaaatgatattttggaacctatggatatcggactaggaccaacctcaggcacggctactaccttttccaatcagatttataatgtagatactggcgatgcacaaattgagaatatacaaaatgatgtgccaaagccaaatatgagtgtcaatgcactaacaaccctgtttgcagagctcaaggtcctaatggatacagaatcaggcaattgcttcactgagctttctcaagtaagatctaacttagcagccacatcaactaaattggcaactttggaaagtactcataatgcagtattgaaggaattggaaaaattcaagaaacaattctttgagtcatcccaacattcttcatatagtgaacgtcatgtacagcaggaccaattggcggagttgcaaaaggtgaaagaagaattagaaaaaaatgtgaatcaaaatgaagaaatgagacaggaacttgcccatttgaagaccaattattctcaatcacttaatgactttcaaaacacagaaaaagcaaatatcgaacatatgcatactacacttgagattcatgaagcaacccacgcacgcaaccaaaaggaaatcaatcagctaaagcgcaaagtttctacagctcagaaaaaagacacaaaatcaacggcgaggattgcagaattagaaaaggaagttgagaggatcgtggaattagaagagaaagttgcaaggaccgtggaattagaaaagaaagttgacaggattgtggaattagaagagaaagttgcaaggactgtggaattagaaaagaaagttgagaggaccgtggaattagaaaacaaagtcaaggagctagaacaaaaattggcaacacacatccaacaagggtatactcacttnggctgagattaacatgctcaagaaaaccaatggagaggtggaaatgactgctcaatgtttacgtgcggatattcatcagctcaatgacgaattagaaaggattgtaacagataataatgcaaataatagaaacaatgataatagaaacaataataataaaaacaataan

SEQ ID NO: 4293 - DNA, 1384 bp, Glycine max
  misc_feature (207)..(207): n is a, c, g, or t
  misc_feature (577)..(577): n is a, c, g, or t
  misc_feature (1188)..(1188): n is a, c, g, or t
  Probeset Number=SeqID_14072
tgggtaggggggcgacgtagtcgttgagagtgtggagggttgcgtgatcaggacgttacgcttggagttgtagctacgttattggagttagaagatgtgggagttgatgttattgtcactcgatctaataatcggccagacaccatggcgtgcttctgacatgtgcgacgagagagtcagagatgataatcgtgatgtagcacatcnacgcgcggtagagcggtgaaatcgaaggtgtcctgtgataacaagaacgcgcagagcgggtgccacaagattgcgtgggaggagagaatacgtactaggtataataaacaggctcatcacgcgtcgatgtcatgttgttggtacgcttcaacctctattataatataaatatgcgataggtgcttgtgaagactaagcatagcgcgtggaggagtaggagatgcagtaatgtatatagtcgcgagacagcgtgtattagatgaatcacacaaaacacaaacattgcggtctggagggaggaggagaggatgacattctcccacccgcacccattcggctctgacttattctcgtgtgtcaccaatcactngccgcacacgtgctcacacatcaactaagtgataagagcgaagcgacggactgtagctcggcgtatttctattgcgggtgcgtaaaggtgtaattcccatattaattgtcactaggatgatgaaaggtagtgcagatatagatcgcgcaatatatgaatgtggtagttgcctatatttctttcgtgtatagacttgcgttcgttgcctagtccttgattcttctgtggtgtgggtattgtgatgttgtatgatgtagttatataatctcgtcattgtaagggtagagtaggtatatgttctatgttctatatttttttcgtccttattatactttggtcgatgttagatatagtttgggtgttgtttgtgtgtgggagtctgttgcggtgatggcgtgagcagaagccgcgtagacgaaaggcagtgaggcggcgatgtcacgcgggcgcgggtgaagaaaagcacacgcggtcgctgcgaggagttggtatgtggtgtatgtgtgacgataataaatattgaactcatcggtccactccttttttactctataattggctctgttggtagccagaacacggactcccctcgagggggtacatattctctngtgtcgcgtctcaggcagaataacttgatacactatagtataagtgttggattgtgtagtcggtgcgccgcctcagggggggcggggggggatgtcctatgtggggagataagcacgaacttatgtgttctcgtgatgaatttgtgtgttgcgtcggttcgtgcaagagagacctaaaattagaataaaaataata

SEQ ID NO: 4294 - DNA, 1304 bp, Glycine max
  Peptide Sequence Number=SeqID_7703
  Probeset Number=SeqID_14073
taaaccatcccgttatttaaaaaaagaaatttctctctcaaccatgcagcaaaagcctcacggatttgaactctacaaaaaaatcggcgaacccaaatttgtttgcgcccctatggtcgatcaatctgaactcgccttccgtatgctctgcagaaagtacggtaccaccctctgctatactcctatgctccacagtcgtcttactgttgaagacaaaaattatcttggcgataacttctcaacatgcccagaagatcgtccactttttgttcaattctgtggtaacgatcccgatacattgttaaaggctgcacaaatggtcgaagatcaatgtgatgctgttgatattaacctcggttgtcctcaaggtatcgccagaaaaggccattatggatcctttttattgagtgaacctgaacttattggacgtatggtgaagaagttagctgataatttaaaggttccagtcacttgtaagatccgtgtgttacctaaagaagaagatactttccatcttgttagaactattgtggaaaacggatgcagtttgttgacagttcatggaagaaccaaagaacagaataaacaaaaggttggaaagtgtgattgggatattatcaagagaatcaaacaatctgtgaatatcccagtctttgctaatggaggcatctataattatgaagatgctatcaaatgtcttgagtatactggtgttgatggagtcatgagctctgaaagtttacttgaaaatcctgctttattcagtggaaaagtctataatttagatcaacttgctttggaatatttggacatttgcaagactttcaagactgatcctgcttatattagacctcatctcttcaagttcttgttcactggcttacagagaaatcctgaattgagagaagaattaggaagagcaagaacaatggaggaatttttggatatcacacatagattgcataaattgagaattgcagagagtccagagagtaagattggatggtatgagagatatattccagctgaagataagctctactataatgattacagaatcactttcaaacaaactatatctattgaagaaagcaaagataatttcggaggtgaaaagaaagttgtcgttgctgttgttgaagaaaaagctgatatggatttaggtggtatgtttgaataattattatgtctctcttgcttagtttttttttcgcataattaaatgtatgatattatttgttaatcaacaataagaaacccctttttatttttattcaaaagagatattgagaataatatcagct

SEQ ID NO: 4295 - DNA, 371 bp, Glycine max
  Peptide Sequence Number=SeqID_7704
  Probeset Number=SeqID_14074
acgacgttccatacaccacgcgtgcactgacggcggcgttccggcagcctggttaccagcctcctcagccatgcacgtcgacccgccgccaccagcagctaactcgcacccgccggcgccggagccgtccggctggacgcggcagaaggacaagctgctggagctgctgctccctcgcatgtacccgcaatgggatcgcatcgccgagcacctcggcggcaagactccggacgaggcgcgccggcggcacgagtccttggtcgccgagctgcggcgcgtgcttgaggcgccaggggtggagacgccgcccgagtggggttcgcggcagcctgctggccgtgcgctgaccggccgcgagccggcggtagccg

SEQ ID NO: 4296 - DNA, 241 bp, Glycine max
  Peptide Sequence Number=SeqID_7705
  Probeset Number=SeqID_14075
atcaagttgaacgatgcgattctcgctgaggataaccacaaacctatgtatgaagaattggctaacaatcctaatgtggagtacattgctggaggtgctactcataaatcaatcagggttgctcatcggatagcttcaagcaccttgtgcctcaggttacttaggttgcataggaaaggacatatttggagaggagatgaagaagaattgtacacttgatggtgtaaaggttatcttttat

SEQ ID NO: 4297 - DNA, 2088 bp, Glycine max
  misc_feature (1)..(3): n is a, c, g, or t
  misc_feature (14)..(15): n is a, c, g, or t
  misc_feature (19)..(19): n is a, c, g, or t
  misc_feature (24)..(24): n is a, c, g, or t
  misc_feature (28)..(28): n is a, c, g, or t
  misc_feature (32)..(33): n is a, c, g, or t
  misc_feature (35)..(35): n is a, c, g, or t
  misc_feature (37)..(37): n is a, c, g, or t
  misc_feature (47)..(47): n is a, c, g, or t
  misc_feature (101)..(101): n is a, c, g, or t
  misc_feature (112)..(112): n is a, c, g, or t
  misc_feature (222)..(222): n is a, c, g, or t
  misc_feature (237)..(237): n is a, c, g, or t
  misc_feature (239)..(239): n is a, c, g, or t
  misc_feature (246)..(246): n is a, c, g, or t
  misc_feature (263)..(263): n is a, c, g, or t
  misc_feature (362)..(362): n is a, c, g, or t
  misc_feature (556)..(556): n is a, c, g, or t
  misc_feature (601)..(601): n is a, c, g, or t
  misc_feature (617)..(617): n is a, c, g, or t
  misc_feature (697)..(697): n is a, c, g, or t
  misc_feature (1023)..(1023): n is a, c, g, or t
  misc_feature (1122)..(1122): n is a, c, g, or t
  misc_feature (1213)..(1213): n is a, c, g, or t
  misc_feature (1221)..(1221): n is a, c, g, or t
  misc_feature (1231)..(1231): n is a, c, g, or t
  misc_feature (1277)..(1277): n is a, c, g, or t
  misc_feature (1309)..(1309): n is a, c, g, or t
  misc_feature (1387)..(1387): n is a, c, g, or t
  misc_feature (1414)..(1414): n is a, c, g, or t
  misc_feature (1416)..(1416): n is a, c, g, or t
  misc_feature (1419)..(1419): n is a, c, g, or t
  misc_feature (1431)..(1431): n is a, c, g, or t
  misc_feature (1489)..(1489): n is a, c, g, or t
  misc_feature (1509)..(1509): n is a, c, g, or t
  misc_feature (1520)..(1520): n is a, c, g, or t
  misc_feature (1533)..(1533): n is a, c, g, or t
  misc_feature (1564)..(1564): n is a, c, g, or t
  misc_feature (1603)..(1603): n is a, c, g, or t
  misc_feature (1609)..(1609): n is a, c, g, or t
  misc_feature (1613)..(1613): n is a, c, g, or t
  misc_feature (1620)..(1620): n is a, c, g, or t
  misc_feature (1623)..(1623): n is a, c, g, or t
  misc_feature (1625)..(1625): n is a, c, g, or t
  misc_feature (1637)..(1637): n is a, c, g, or t
  misc_feature (1651)..(1651): n is a, c, g, or t
  misc_feature (1687)..(1687): n is a, c, g, or t
  misc_feature (1709)..(1709): n is a, c, g, or t
  misc_feature (1837)..(1837): n is a, c, g, or t
  misc_feature (1906)..(1906): n is a, c, g, or t
  misc_feature (1999)..(1999): n is a, c, g, or t
  misc_feature (2019)..(2019): n is a, c, g, or t
  misc_feature (2054)..(2054): n is a, c, g, or t
  misc_feature (2072)..(2072): n is a, c, g, or t
  misc_feature (2088)..(2088): n is a, c, g, or t
  Peptide Sequence Number=SeqID_7706
  Probeset Number=SeqID_14076
nnnttttttttatnnaaanttttntttncttnntntnacttatactnattttacttacattactctataatagtctccgctactctgtcacacacataccncatatcatcanagagagaacactcacgaccactgcactgcgcaccaccatactgcacactatcgtacgtctgttcactcctccttgcgtcacctcttttctgctcgatgtcttcgtgccgnattgtgctgtggctnanctatgtntagtacttatcgagaanagatatacacacgacacgcacgacaagaacacgactatcatgaatatgtagggcgagcgcgtgtgtgtgatgaactgtggtcgcgagcaccaggtgtcngttgtgtggaggactactaagcagtacattcgtgttactataaatcgatctcattgcgctgatcatgacctatctctttctctgtatttctctcttcttatcttactctcgtcgcttcattagcatacgctgtatgtcattgtagacagtgttatatcgctctatcatagcgtagatgatctcattgtactgtnatcgcaatatcgcgctcgtctgtatagtagtgcaagcacacgcanggtattgcttagatgngatattgtgtagttactagataaacacggacatgttggagtatgaatgatgaaactcacgcgtacacatgagatcatatnactcgatcgcgagatctcacgagtctcttcttcacgctgccgcactacatatacacttcacggtgatgtctcacactgcgctatactgctcctgcgcgctcaccatcgatcatcactcgtagcgtactactgcatgtatatcatcactgacgatgagtgagagatcacatgtatacactctctcgcgcacgccgcggcgtaggtcactatctcgtatgcatattatggctggaatgatgagtgatgtatatgcacactcactctatctactctcgtctcggcactcattactccgtgcgagctcagatatacatgtcgcgcgacgnctactctatatatttataatgcgtgcacactgcgcagtatacaaatatatcactgatagaatagatagacaattacataaatgcactacgctctcgagntctgacgtcacgtcgtacgcactacatgatacagactcgctacgctataacggtctgagagcgcgtgctcggtcgatgagacgcgtgacgnatgcactncagaagtatngcacgagtctcatgtccactcggcgacgcgacgtagtatctgactntgggatataagatatgtgatacgaggcatctntgtctcgcattcattacatcacgcgtatctctactcatctgctacatatagtaagcgactatcagtactatttgcatnatacacatatagactacatacatatantnatnatatatcgatangtacacgacacatccatcgtagactacagcgatctcgcgatgtgtctactcgattaantcactgtccagatatatgangaggttagttncgatgatgcgtcntgtgttgacgcgactacgtgtctcctggtanctacgacatatctatatactactcgtagatatgtgtgangacatnatgnagatcangcntntatgtcgttcantcaggttgcactcnactgacgcacatcactactagactatacgcgtgatnttcgagtagatcaagttatgtntacgtagatatacgttacttacggtgagatatgcatgtctatctcgtttactacctacactctacatatatatatcctgatgatctatcacaatcatctatatagactatcatcgcagcagacagaantaccactctgtctactacttacatacgtcggtcactgtcgctctattatagtttatgagtagtaatagntggtagcagagatatgatgaatgaagactagacatgctcggacgatgccgacgacctcaactatcagacgaagtacaagactgagactgaagnctacaccacgactgacagcnggagtactactatatactcgacagtctactacctngactgtacatgagatacncaaaagtatagtaagn

SEQ ID NO: 4298 - DNA, 489 bp, Glycine max
  misc_feature (485)..(485): n is a, c, g, or t
  Probeset Number=SeqID_14077
atatatttacttggggtttatgagattggttatctggattcttagtgtttgtggtatcgaacacacgctccattgcttaagattttaacataaatcgatttatgtgttcggttcagcgaattgttgttttacttgtggcttgcttcgcctttgttctctcggcaatggatttcaattcttttttttttacgaatagaactgctgactgccaagtgttcgttgaaattcctctgagaggtggaattgttatgtcttttaacagttacttgactatgttcatctgttttcttttttctagcaggtccgaaagagccttgtttcagcagccatggccaagcatcatcctgatttgatcatgtgccggaaacaacctggcattgccatcgggcgattgtgcgagaaatgtgacggcaaatgcgtggtctgcgattcctacgtgcgcccgtgtacgctggttaggatttgcgatgaatgcaactatggtncgtt

SEQ ID NO: 4299 - DNA, 1333 bp, Glycine max
  misc_feature (18)..(19): n is a, c, g, or t
  misc_feature (21)..(21): n is a, c, g, or t
  misc_feature (25)..(25): n is a, c, g, or t
  misc_feature (29)..(29): n is a, c, g, or t
  misc_feature (32)..(32): n is a, c, g, or t
  misc_feature (125)..(125): n is a, c, g, or t
  misc_feature (136)..(136): n is a, c, g, or t
  misc_feature (596)..(596): n is a, c, g, or t
  misc_feature (802)..(802): n is a, c, g, or t
  misc_feature (919)..(919): n is a, c, g, or t
  misc_feature (1137)..(1137): n is a, c, g, or t
  misc_feature (1145)..(1145): n is a, c, g, or t
  misc_feature (1183)..(1183): n is a, c, g, or t
  Peptide Sequence Number=SeqID_7707
  Probeset Number=SeqID_14078
atatgaaattgtggagtnnanttanatanatnaaacatacataaatacacaatactgacaaagaaaacaatatgtgtaatcactatatagttgttgtgtcctccccccccctccccccactctcntaataaacacncccacatattataaataaaacaccaaataatgtgagttttgtataatacaaacggccccacgcacccgcagccacaagagttatgcctctatacatacattgtcctattaggataaccagtagttagagcacatctcatgctttgaagtacctatacactcaccacttagcgcatcagacaacagctcatcaacccacatctcctaacataacacacaatatcatttacctccacttgtcactctcaattactgattgaacgagacaataagacgaatggtatacttgtgtgctggcgcctccgctactgtctcacacctacgtctcacggcgcaatacatatagctccactttgacacaatcctatacatgcgactctctgattgataacaatgaatgcaaatctaaaaaacaaaattaataacttatccctatctttagaagaaaattatcatcaaanaacatcaaagaagccaatacttccaatcttgattattgaaactataaatctaatttataatattagtcctagtagttcacacgctcagactatatgtatatcactcttgactgcaaccacataactccacgatacatgcctctgcctaacttgagaaaacacatcagtactcacaccaaattatcccaggcgttccatctatattntttgcgttgatttgagcacgcgaagatcgtgaaagaagaagctctcaacaatgtacacagacccacacacaccttcaacacaatgtaggatataagactaacatagatactgtctangtctatatatactcgtcacctaccgttaccaacagaaagaagaccgaccccacaattctctcactaccaccactatcgatgtatctcgacgcgcctccggcttatatcgttcttcaataaccgtcataaaccatacacaataccatcacatacagaggagtcacttcgcaatcatcctctacctctcaagaataaatatacacgtccacttctctccncctcggancacagaagataccacactcctcctacacaactccacanagatcaaatatcatatacatttcatcagagacataccacaataaacatacacataataccaatatcatgacacagcgataacactacccaacgccccgcgccgcccttgctcctctctctacgaaattagttacttcctgacacacaccg

SEQ ID NO: 4300 - DNA, 1256 bp, Glycine max
  misc_feature (1256)..(1256): n is a, c, g, or t
  Probeset Number=SeqID_14079
tcagctacgtaggcccccccccccgaatatcagagcattagtaaatctaattaatataagttcaagcaaaccacatatgaccgaaaagaagcctgttcatattctaataagctcaacattagctacaattgttgttactgctttaaccaaccctctcgatgtgttgaaggtgagaattcaaaataacgataagaattgcagcactatcaaccacactcattgcgtgactcgatcaagttctcactctgctcccaattccttacgacaagcttccttatatcgtcttgtaatgacaccgaaccttcaagaacattatcaagtcttgtgtgattgcctcccctttagatcaaacgcaaaagcccttgtttacttgactcgtaaagagggatacagagtacttaccaacggattggctcaaggtttgatgggttctgtactgagcaccgtaacttacttttactgctacgaggctgcaagaaagcgtgtgaagcaatatacttcacacaatattggtcttccattgttgacagctctgacagccagaaccatcacgacatgtatcgctttcccatttgaatattggaagaccttgcaacaaagttcggttggtgtgagtggaaagtcttcaatgaaactcggaacaaaaataaatgcaggattcggtactttgctcggaagagacttgatgttttctgggctttattgggtgttggtggaaaatatcagaagacatgtgaagagctggagccaacaaaatgaagagggatatcaagataaaggaagtctattgctttctaatgtgattgccggtggtttggcaggaggaatatcagcatccgtgacattacccttggatgtggtaaaaacaagaaaacaattgaatccaaaagaatataagaagaaatccacaattcgaattctcaaggatatctattataatgaaggaaaggatgctttgacagcaggtatgagacaaagagtgaccaaggttactatggcatgtgcaggcatcttgacattatatgagctcttctctgacatgttgagagaagacaatgtttactgagtggagtagttaggtttgcttgattgattttttaaattaaatattttggctgatttcgtacatttttattgtaattttagctagtgctcttcctttcgaataatgtctttttatctctttgtttatttatctatccctgtataaagataattaaatatcgtattgtataaccatatcatgaaaattattn

SEQ ID NO: 4301 - DNA, 1381 bp, Glycine max
  misc_feature (1)..(1): n is a, c, g, or t
  misc_feature (28)..(28): n is a, c, g, or t
  misc_feature (107)..(107): n is a, c, g, or t
  misc_feature (141)..(141): n is a, c, g, or t
  misc_feature (258)..(258): n is a, c, g, or t
  misc_feature (260)..(261): n is a, c, g, or t
  misc_feature (276)..(276): n is a, c, g, or t
  misc_feature (386)..(386): n is a, c, g, or t
  misc_feature (426)..(426): n is a, c, g, or t
  misc_feature (428)..(428): n is a, c, g, or t
  misc_feature (476)..(476): n is a, c, g, or t
  misc_feature (577)..(577): n is a, c, g, or t
  misc_feature (608)..(608): n is a, c, g, or t
  misc_feature (702)..(702): n is a, c, g, or t
  misc_feature (861)..(861): n is a, c, g, or t
  Peptide Sequence Number=SeqID_7708
  Probeset Number=SeqID_14080
ncgttctctactatgtggcgtatagagnggtatagagaaggcgtcatctatacatactattatcgtcgtcatgcaatacgatctacagcgagactatcacagcgtanagaaactgtatatatatactgcagatgcgggcgnccgcagtcgcgtgttacactgacatagatgacgcctatgtgttattctgctctcgcgctggctgcgggtcttgtcatcatataatatagccgcgagctcgagcgatgcacgagaggnanntgtcgttatacatcncgcgctctatcacccaatcacagacacgcgatgcctgcggccgggtattatccaccgaagaacgtacgcatcatactgtgatacctcgccgcgatagccgcgaggagganacacactcgtgctttcaaccacgctccctgctgtcgcggngnggcgcgtagcaccatacagcacgcgtacgtatggaataatgcgcggcnatgttaatatgtataatagctgtgcgtctgcgggtgggcgctattacttattgcggtgcgagtccgatgtgcactacaggtcgactatcgataatgtccgncgttgcggcgttcgcaatgtgaacggggagngcacgggatacaacctcactcctatttccccactcagtcttgtccgctgacggggcgcgcagacgcgcgcgatacgtgcttctcctatccgtcnaatccaatcagtcgatacgcaccgccgaaatatccgcgacagcgtcacggcttctaatgcgttatgccatcctaccgcatgatccgtatcgcagcttacgataccgtaacaacgggcgcgacgctccacaccgctcccgcgttcaccagcacccccgcnccacgtccaacgtgtatcgtcaacccgcactgcgcggcgacgcatattatataggttgtgtcgttgtcgcgtttctgctcctctatccatctccgctccctattacgacctctgtcgcgccaggtatcgtctctcagcgcccgttcgatcttgactctcgaagcgacgcgataaatagggtcgtactccgctattagttcgtccttctcgctagtagtagtatatatccgcggtcttcgtctggaccgtgttgacgcctccgcgctcgcaggggccggtttaagccattcgcgcactcgaacaccaataaaataggggcagaacgtctccaggcctagacgtcaatataaacagtcaacagcgctcgctccgggcgctacacgagatgctacacgaaagcaaaccgaaactaataataatatgtactgtgcctaagatcaggtgaagagatatggtgcgtcgcgcgtcgtaacacgccctccaatcgcgtgtatgcacaatcccccgagcgcccacccac

SEQ ID NO: 4302 - DNA, 1450 bp, Glycine max
  misc_feature (22)..(22): n is a, c, g, or t
  misc_feature (45)..(45): n is a, c, g, or t
  misc_feature (1205)..(1205): n is a, c, g, or t
  misc_feature (1230)..(1230): n is a, c, g, or t
  misc_feature (1275)..(1275): n is a, c, g, or t
  Probeset Number=SeqID_14081
gttcccatgaacactccttccncgcggcccaacgtcatttataanacacactcttgcctctatggcgggctgcggagggctcccccctcgtgtggccgcggcgtgtggatgtgggatgatatgttgtattctcttttatagggatgggtttgtatgtaattgtcctctgtagcaagttctatacttacattaaacgatagttatcttacgctgcgctgtgctccctccccctattctctcctcagttctctgtagtttcggtggactcggctcatccaccgcccggttggcattgactcttgtgtgtagttcgagtggttaccagtttcgctgcgtcgcggagtctgcgcccagtgcagtctttctcgataacgcccgactctcaatctcgaccgtccttcatcgttctcttatcgtcgctgtgattctgactctgccccctcatacatagcagagaccgtaggtattaatataatacgcgtgttgatcttgatatgctctcccctcacccatcacgcactcctctaaagaacaactacgacaccactccaacggaagtatgtgtacttatttcttcggcgtaactatactaactattaacatctctccgctcctcatcggtactagtgaattatttctccaattactcccttcactccctactctccgcgttcctaattctattatttctactactgtcgtggatatggatagttatactcactcttgacatgttgtttacaacagcattataaggagatggtacacgcgcctctatatgaccttgtacgagacgcgctgctcatcgcccgctatcgacgtgtcgtatcacgaacgagctcaatagacattcttcacctctagttctgcctctgatgacatccaagcgtggaccgcacgagtaatatcatagttaactgatccggttctgtctacgtcacccacccctctgtggtgtcccgcagatatgttaccccgcttctagattcagcataataggcttgctagtgtacgacctcgactctagatcatgcatagagacaagattatagttttggtgatcacatactgcatctgcctgtacattgtgattgcatagtactgcatccagagagagagtagcaagaatgcacgttcatgtatctgtgcgagagggctcgatgacactctaatcgtggtatagcatggattgacgtgctcgtgcntctgcatctcatctatgtcgcatcnctacgatatgacattcctatctagcactgctcacagaccactagntatgtatcattgtacactactcacacagacagtaaacctatctcgctgttgtgtctcacaccgtgccttttacagcgagactctgttagacgctctgtagcgtcgaactatattatactatgcgctactgatcacatatagcgaggaacacagatattgatgtgtgtcacatctt

SEQ ID NO: 4303 - DNA, 627 bp, Glycine max
  misc_feature (627)..(627): n is a, c, g, or t
  Peptide Sequence Number=SeqID_7709
  Probeset Number=SeqID_14082
tcagctacgtaggccccccccccatatgtgattcatttttcacgcggtgggaaagcataattcagcaactgaaggacgatgaacctcaagcgtacccaacttatgcacaagccatcaaagacattcaaaccgtggtgcaagccgtcgcacaaaccacgtctgtaaatggccccgcgccgccaatcggatcaaactcccgagctccctccacacagcgggccgaaccgcgtggcatcggaccgtcctttcatggtcttaatactggcacttcatcgcatacaaatcgagtctcgaaacgtgaacctaaacgaccgtcctcgaatagttcaggacaaaatattgctgttgccctacgacagttggcagacaaggtgaaggacaaaaaggtcgattgcccagtctacaaacaccaccttatgcacaacaccttacccccgtgctcaggttgctctgtgaaggttatgtctcagatccgaagtcatctcaacccaaaccgtgctgcgggtacacacaacggctttccccgatttgtggagcagtgccatcgctgcaagcaagactttgtcgaactacccacttatgaagcccacaaggatgcaggctgcgagtttcaaactcagactagan

SEQ ID NO: 4304 - DNA, 1577 bp, Glycine max
  misc_feature (120)..(120): n is a, c, g, or t
  misc_feature (268)..(268): n is a, c, g, or t
  misc_feature (337)..(337): n is a, c, g, or t
  misc_feature (579)..(579): n is a, c, g, or t
  misc_feature (637)..(637): n is a, c, g, or t
  misc_feature (858)..(858): n is a, c, g, or t
  misc_feature (920)..(920): n is a, c, g, or t
  misc_feature (924)..(924): n is a, c, g, or t
  misc_feature (932)..(932): n is a, c, g, or t
  misc_feature (943)..(943): n is a, c, g, or t
  misc_feature (947)..(947): n is a, c, g, or t
  misc_feature (987)..(987): n is a, c, g, or t
  misc_feature (995)..(996): n is a, c, g, or t
  misc_feature (999)..(999): n is a, c, g, or t
  misc_feature (1007)..(1007): n is a, c, g, or t
  misc_feature (1033)..(1033): n is a, c, g, or t
  misc_feature (1059)..(1059): n is a, c, g, or t
  misc_feature (1150)..(1151): n is a, c, g, or t
  misc_feature (1154)..(1156): n is a, c, g, or t
  misc_feature (1160)..(1160): n is a, c, g, or t
  misc_feature (1195)..(1195): n is a, c, g, or t
  misc_feature (1198)..(1198): n is a, c, g, or t
  misc_feature (1200)..(1200): n is a, c, g, or t
  misc_feature (1220)..(1220): n is a, c, g, or t
  misc_feature (1235)..(1235): n is a, c, g, or t
  misc_feature (1250)..(1250): n is a, c, g, or t
  misc_feature (1256)..(1256): n is a, c, g, or t
  misc_feature (1264)..(1264): n is a, c, g, or t
  misc_feature (1267)..(1269): n is a, c, g, or t
  misc_feature (1315)..(1316): n is a, c, g, or t
  misc_feature (1324)..(1324): n is a, c, g, or t
  misc_feature (1363)..(1363): n is a, c, g, or t
  misc_feature (1394)..(1395): n is a, c, g, or t
  misc_feature (1500)..(1500): n is a, c, g, or t
  misc_feature (1504)..(1504): n is a, c, g, or t
  misc_feature (1577)..(1577): n is a, c, g, or t
  Peptide Sequence Number=SeqID_7710
  Probeset Number=SeqID_14083
tggtgagtgtcccctccaatatatttctcgcacgcactgagcaatgtagacgtgtatgcttccgcgcgtcgcacagatatcctggcgcggcgtggcggggcggagggtggcctattttanctatattctgccgttgtccctgtcctgtacactcatcccatttcccagcctcaagcaaagcgtagagagatttgtgttaattcctacctcatctcgtatctatgtcatactgcgccctttagaatatgtatcgtatagcatatgatcngaaatcgattaataagcgcgcgtcgtatgcagtgaccttatcacgaacatacggtgacgatcgtctatnctcttcgtctttgtgaagattcaccaattctcgagcgtagaccgatgtagattatactctttgactgaccgctttacattctatctcaattgacctagtagctgaagtacgtatacgacgcgagaaggatggaccctcgcccgttgtcatacgacaggtatgataattaaagcgcgcgcgaaatgcaatactgggtgtgatagtgacacacgtcggcagcacgacctatatatcttagaacngtgtctcgtgtggttcgtgctgctccgacgtccgacggccggcacccacggagcgccncggagttgtacgtcggtttgtttcgcgcgactcgcgccgcggtcatacgcgcagagctacgtactgcgatatgtatctcgcgcgtatgtatacgtcacgcgatatgctacaactccgcacgcgcgcgctactcgcgggcgcctcgaatcgcaggttcggctcatcgactatgcgaatctctgtatcgcctggccgccgctcgtgcgcataagcatccttancgaagcgatgaataagctgatgtaatattgcgttgtgggccggtagcgtcacgacttcgacncgcncacgcgcncggcgccatcnaaanaacctaccacaaactagtattagtaagcgcttgacgtctnactattannccncgcttggntcccccgccctaaattctaatatatngaactctgctgttgtggctctatagnctacgtactatcgaaactacaacacacccgagctgaaatgcgggctgccgaggataagtagtgctgcgatgtcgcgcgccaccggcgtganntcnnncatntctccactgtgtgccgcctccgtaagatctatatnatngnactccgccgccacggagagncgcgcagacttattntcccgttttcacatntcaatnactaatanatnnngtctacgatagctgtatcgctcgtctgcgaccgctacggagtatgnnttatgtcntgcgcagcgggcccacacgcgtccgcacatgaaaaatcncacacacgccgaccgaaatgtgatgcgtgannctgtgtctcgccgcctgcgacgcgagtcagtcgctaatatatgatcactgtacatatactcatactctgcgcactcgaccgtagtggatttacgcagcacgttanattnacttataattacttgataacgcgccgctatgcgatcacacgcagcatcactgcgcgtcttgacatcatagtan

SEQ ID NO: 4305 - DNA, 546 bp, Glycine max
  misc_feature (123)..(123): n is a, c, g, or t
  misc_feature (134)..(135): n is a, c, g, or t
  misc_feature (392)..(392): n is a, c, g, or t
  misc_feature (420)..(420): n is a, c, g, or t
  misc_feature (498)..(498): n is a, c, g, or t
  misc_feature (501)..(501): n is a, c, g, or t
  Probeset Number=SeqID_14084
gttttttcgcagcattccatacgaggccgaagggaagagtttttgttgggtttgggaggctaagtagggtttgcgttgagaaagagagagatgggaagagaaaaggagacaacaaagggtagncttttacacannggtgggagcagcttgtagcccctttcaattcccataacaaatccccggatatttctttcccaggaatctcgaaaaaactaatgttcaacggacccaagggtttccggtcgccaaaaactttaccaggccctgggggccggcgaaattcttcctggccctttcctttcggccttcctacccgagtttttgaaaccccaaaaaaaaaaatggaggtccccagattggggcccccggaattattgggtcaaagggctttncctcccaaagggggggacaacaatgggnccccgcgggcgggcccgaaaaaaaaattttcacaaccccccttttaagctagcgtttgtagattccccaaaaaccccnttnccaaaagggggagggggaggaagtttccaaaggagattttttttt

SEQ ID NO: 4306 - DNA, 1339 bp, Glycine max
  misc_feature (1)..(1): n is a, c, g, or t
  misc_feature (16)..(16): n is a, c, g, or t
  misc_feature (266)..(266): n is a, c, g, or t
  misc_feature (1246)..(1246): n is a, c, g, or t
  misc_feature (1310)..(1312): n is a, c, g, or t
  misc_feature (1325)..(1325): n is a, c, g, or t
  Peptide Sequence Number=SeqID_7711
  Probeset Number=SeqID_14085
ngtgtgcgtcacagangacacgcaacatagtcgatggtcagttgagcggcagcaatgacgtggcaggcggcagcaacacgctagatggttgcgtgtgagtgtattacaagtgaggcagaccatcccacacaggaaaggatgagtatagtgtatagcatgtgtggcgtgtgtcgtgacgaccatcgcgaaagtgtacccatggaacgaggataccgcatccattatgaggaagggagggtagctagacacggatcgtcagtgatgangagagtgtaagacagatgaggaggtcatcgacactaggaaactgggaacgctaccacccagatatagacgcggccaagaataatcaatgatacaagagagcagagtcacgatcataccaggttgtagcgacaggtagcacactctcatggtagacatgcagaagggagggaataatgggctaagagcttatcaggtatgaagtggatcctctcgtgttgactctcctgcccatgtgtgttggcaggcgtcgctcataagacgatcgatcactagactagagatagggagttcaacggggagggtacagatagaacgacaagcgtggatgtgaacaacgaccgggatctactacgtgtctaaattagagaggtcgcagcgtagagaatagtgatagacgaaaatccacatcacatcgagcgagggcgcacactctacctttcaatcatgagcgggagcctaatagatacaggttcatcaatggaagagtagatgtaagaaccatggtagatacatctgagtggttatgaatcatagtgtggtaacgctccactgatggtgcgcttagagctttgtggaatggtctattacaattgtatagcgcactattgagatgaacggtatattcaggtggtaaaagcacaatagcctcactagtgtactcgatagtgccattcatgggctcaattcatcctagggacgcgaagatatgattatatgaatacttcaacctatcttgtaaaggtcaaagcaatgactagctggaccgacttctgtgtgagaaggtcgtgaacttcgcacgcacatattaggcctcgtagaactcagaagaagcacttgttgatgggacactatcttataacagatatagatacgttgagcgagagtagacaacgaagaagagaaaaatggtaattcctctgctaagtcagcgggggggatactcaccctagtctgctgtggagcgggcgcaggccaagcngaggatggagacctcccagatctctttactcagagagggaagcaaagataagcagaatcgtaannngtggatgtgatgntcggctacttttga

SEQ ID NO: 4307 - DNA, 1642 bp, Glycine max
  misc_feature (89)..(89): n is a, c, g, or t
  misc_feature (108)..(108): n is a, c, g, or t
  misc_feature (118)..(118): n is a, c, g, or t
  misc_feature (138)..(138): n is a, c, g, or t
  misc_feature (195)..(195): n is a, c, g, or t
  misc_feature (297)..(297): n is a, c, g, or t
  misc_feature (308)..(308): n is a, c, g, or t
  misc_feature (336)..(336): n is a, c, g, or t
  misc_feature (353)..(353): n is a, c, g, or t
  misc_feature (384)..(384): n is a, c, g, or t
  misc_feature (416)..(416): n is a, c, g, or t
  misc_feature (588)..(588): n is a, c, g, or t
  misc_feature (668)..(668): n is a, c, g, or t
  misc_feature (744)..(744): n is a, c, g, or t
  misc_feature (759)..(759): n is a, c, g, or t
  misc_feature (822)..(822): n is a, c, g, or t
  misc_feature (828)..(828): n is a, c, g, or t
  misc_feature (961)..(961): n is a, c, g, or t
  misc_feature (965)..(965): n is a, c, g, or t
  misc_feature (979)..(979): n is a, c, g, or t
  misc_feature (983)..(983): n is a, c, g, or t
  misc_feature (1061)..(1061): n is a, c, g, or t
  misc_feature (1063)..(1063): n is a, c, g, or t
  misc_feature (1085)..(1085): n is a, c, g, or t
  misc_feature (1128)..(1128): n is a, c, g, or t
  misc_feature (1299)..(1299): n is a, c, g, or t
  misc_feature (1394)..(1394): n is a, c, g, or t
  misc_feature (1464)..(1464): n is a, c, g, or t
  misc_feature (1507)..(1507): n is a, c, g, or t
  misc_feature (1511)..(1511): n is a, c, g, or t
  misc_feature (1515)..(1515): n is a, c, g, or t
  misc_feature (1544)..(1544): n is a, c, g, or t
  misc_feature (1554)..(1554): n is a, c, g, or t
  misc_feature (1556)..(1556): n is a, c, g, or t
  misc_feature (1558)..(1560): n is a, c, g, or t
  misc_feature (1581)..(1581): n is a, c, g, or t
  misc_feature (1588)..(1589): n is a, c, g, or t
  misc_feature (1600)..(1602): n is a, c, g, or t
  misc_feature (1615)..(1615): n is a, c, g, or t
  misc_feature (1624)..(1626): n is a, c, g, or t
  Probeset Number=SeqID_14086
ccagccagtacagtgtcatgtagcagcacgtgacgcctcgtccacgcacggtgtagcagctgctggccggtaggactcaacatcatctnctattgtgtcacgtcgtgnttcatatggntcactctatctagactgtancaatactccataacagtatgtgtcagtgacgagcgagggccagtagagctgatgcgnaggtgatggtcatcgagtcaggtcacaagctggtcgttataccacacgtcatgtatgtcgtgagcgtgcgtgggtgtcgacgcgagactatagagacgagtngcacttagtanacgtccactcatcgctgagagcacgcancatcacctctcacgctngatggtgtcgtgtccgctatatggttcgcanggacgtgacgctctggtattcggcggcagcanctcgccgcctgagcgacgtgcgacgtcgtagactggtagctcagagattgtgtgtagatgtcacgagtgtgtgagcttggagcttcttcggttacttcgtgtcagctcgggtccttgttataagtttgtgctgtccgaccagggagatgacgcgtgctatgcaagtcgtcgnagatactctgcgcgtgtcgtggctgcgccattccgcgcgcgacccctgcagctagcgtgcgtctccgctaagtcgcgagnggtgggagtgtgcggttctgtacacgtagcctgtctgttgttgttgtattgtctaacttattactctttagtttanctgtgttgtgtttantataatactatcttgtgtatcgatacgttcatgctttgtacaatagctggtgagcgatgctgncctgancgcgtactacctcgtcggcgtgtgcggagtgtactcgagtaggaggataggtgttgtgtgctgatatagtggtcctggctgtgcatctattatattcggtttatcctactctctcccttactttctctatgtntttnatatctattatttntgtngtggtgtgtgtctttttgtttctccttctctcgttcttagtatcccctctctccttggtttattctattattttattncncatcattcccctactattctcntacgtctccttcctcatgctcctcgagcccgcgtggtaacgantcgtttataacgaaagaagcaggatgggccgcgcgcgaccgccgcctcctggcgcgtcattgttctcttacccttttcctgcgtatgctatctctagaagcctcgtctctatcgccgttgtgactgtcatatcttctcgtggtctctactctagagtcggagcattaagtntcagtagatctacttctctatacacactggatgtgtgtgggtggggcgatgtaagttaggtggtagatacgaccgcgcgccgcgctcctcgtggngggtgggttacatcaatccaacacataaacaaatgtggtattgtgttctatctcctattctccactactnttatatcacgacgatctctgacagagtcttctgcgtatactgnttgnttcnttcctctggtgatttcataatattatttntacaacaatngntnnntggggggggtgagtgggcggnggggggnngggggagaaannnaagagagaagaanagaaaaaannngggcaacccaacccac

SEQ ID NO: 4308 - DNA, 580 bp, Glycine max
  misc_feature (11)..(11): n is a, c, g, or t
  misc_feature (15)..(15): n is a, c, g, or t
  misc_feature (24)..(24): n is a, c, g, or t
  misc_feature (28)..(28): n is a, c, g, or t
  misc_feature (30)..(30): n is a, c, g, or t
  misc_feature (35)..(36): n is a, c, g, or t
  misc_feature (39)..(40): n is a, c, g, or t
  misc_feature (44)..(45): n is a, c, g, or t
  misc_feature (67)..(67): n is a, c, g, or t
  misc_feature (73)..(73): n is a, c, g, or t
  misc_feature (83)..(83): n is a, c, g, or t
  misc_feature (85)..(87): n is a, c, g, or t
  misc_feature (90)..(91): n is a, c, g, or t
  misc_feature (105)..(105): n is a, c, g, or t
  misc_feature (113)..(114): n is a, c, g, or t
  misc_feature (118)..(118): n is a, c, g, or t
  misc_feature (121)..(121): n is a, c, g, or t
  misc_feature (156)..(158): n is a, c, g, or t
  misc_feature (160)..(162): n is a, c, g, or t
  misc_feature (177)..(177): n is a, c, g, or t
  misc_feature (179)..(179): n is a, c, g, or t
  misc_feature (186)..(186): n is a, c, g, or t
  Peptide Sequence Number=SeqID_7712
  Probeset Number=SeqID_14087
cacaccagcanccancaccaaggncacngnggagnnccnncaannccccgcggaggagacacccccngccacnaccaaaaccnannnccnnggaggcgcaggggngagagggnngaanacngaagaagaaaccgcaaagcccacgggaaaaggggnnnannnggaagacaaggccgngncaacacncggtgccaaaaggaagggcaaaagtgcagcagaattgccggactcacgcgaaccctacagagatatcaacaaaggccccgctgagaagttaaatcgagggccaaagccaagaacattggacggccgcgaatacgaaaggaaggcgccagacaactgtgcggcccacacggaatccgctgggacttacagtgaagcaaaacaaaaagccaacgaggaactcacaaatgcccacaaggatcaaaatctcccaccagggtccactggtttatacaaacaatcacccaccggaacaaaggggctaagtcaccccaaagatgagacaaaacccaaaaatgagcaagcagcgaaagacaacaaacacccctcggagggccgccgggaaaccagcaccgga

SEQ ID NO: 4309 - DNA, 1853 bp, Glycine max
  misc_feature (1)..(5): n is a, c, g, or t
  misc_feature (10)..(16): n is a, c, g, or t
  misc_feature (21)..(35): n is a, c, g, or t
  misc_feature (47)..(48): n is a, c, g, or t
  misc_feature (50)..(51): n is a, c, g, or t
  misc_feature (53)..(53): n is a, c, g, or t
  misc_feature (68)..(68): n is a, c, g, or t
  misc_feature (77)..(79): n is a, c, g, or t
  misc_feature (91)..(91): n is a, c, g, or t
  misc_feature (175)..(175): n is a, c, g, or t
  misc_feature (207)..(207): n is a, c, g, or t
  misc_feature (233)..(233): n is a, c, g, or t
  misc_feature (242)..(242): n is a, c, g, or t
  misc_feature (350)..(350): n is a, c, g, or t
  misc_feature (369)..(369): n is a, c, g, or t
  misc_feature (373)..(373): n is a, c, g, or t
  misc_feature (384)..(384): n is a, c, g, or t
  misc_feature (397)..(397): n is a, c, g, or t
  misc_feature (916)..(916): n is a, c, g, or t
  misc_feature (929)..(929): n is a, c, g, or t
  misc_feature (1042)..(1042): n is a, c, g, or t
  misc_feature (1168)..(1168): n is a, c, g, or t
  misc_feature (1193)..(1193): n is a, c, g, or t
  misc_feature (1218)..(1218): n is a, c, g, or t
  misc_feature (1234)..(1234): n is a, c, g, or t
  misc_feature (1427)..(1427): n is a, c, g, or t
  misc_feature (1445)..(1445): n is a, c, g, or t
  misc_feature (1543)..(1543): n is a, c, g, or t
  misc_feature (1546)..(1546): n is a, c, g, or t
  misc_feature (1569)..(1569): n is a, c, g, or t
  misc_feature (1578)..(1578): n is a, c, g, or t
  misc_feature (1602)..(1602): n is a, c, g, or t
  misc_feature (1668)..(1668): n is a, c, g, or t
  misc_feature (1691)..(1691): n is a, c, g, or t
  misc_feature (1802)..(1802): n is a, c, g, or t
  misc_feature (1822)..(1822): n is a, c, g, or t
  Peptide Sequence Number=SeqID_7713
  Probeset Number=SeqID_14088
nnnnnaaaannnnnnnaaaannnnnnnnnnnnnnnccaactttaatnnanngnacaaacccccacccncaccccctnnncgcgcccccccntttttttatgtataacatgtaatattatctctataaagagaagatatgttgtaattcacacagtgttatatcaaagtcttagcntcccttctaagacataactatatacactgatntccacatattgcgttctcaaaagaanacataacancacaatatatcacaaccgtctatctaatcacactataacactcttccactctatattcaacactctatataactactatatacacaacatatctatcatatatctctnaatacacatctctataaanatanctaactataanaatatatatatantctatatctatataacattcaacaatctatatatatatataatataaatacaaatacatactaatctaaatatacacacactatctctatatatgccaaagaacaatataaaatataccactatccaacactaccacacactctctctcttccctccactctcacccacacccatcactcctcatcacccacccctctcttcactccctatcctacaccactctatctctctctactcaccacacacatcatactctactcaccaacctacctcactattccacctaacacactactcaacacctcactcactcaccaataacatacaaactacctacacatctcttctcctttacatctctatacttatcatcaatttacttatcacatatagcaccatatcctatctctgtcatgtacattatcacataatacaatatgtcttattctccacacatatcaacatactccacacaacaaacaacacacaactatcacacattatctctctccaccatntcaacatcttatnatttcaccacactacacttaatcaccacatattcacactacacacacacatctacccacaatacacatatacacaccacccacacctcctcactacctacatcacactcagancacacacactactccctcacatctcatgcacacatactctcatctatctacatctcataatagcgccacactctacctcacacataacaccacatacacctaccatacatcacacaagacaacacnatacatcaccaacactcacacaaanatatacactactaccgcaccactcnacaaactcactaccantcactctactctcaccacattacatacacacgatcatcctctctctcccgaccactccatctcctatcataccactcaacacccaatctatcactctcttatctatttacatgttaaagctctttctcactaatatcatctccacgctatacacactcactactcatactactataactctaaccctacacanacacgacataatatacgnaaaacactaactaatccataaactatatatatcacatctatataatatcacactatactatcacaactaaataatactcatatcatatctactctccncancacctcttcacgtatcttatctnatgcttctntttcactgtttcctcctcttatanatatctccagcactactccatatatacaaaatattaacctccacatctcacaaaatcaccacatanagctacgaccatacaatcaaccnaacgacaacacgcacacaacacacatatcacctctgtctcctatactactctaccatctaatcctacaccacatgccatctatgaacccactaactcatcacgcactctcntctccccaacttactctgcncacatctctcacttaatgatataatactaca

SEQ ID NO: 4310 - DNA, 619 bp, Glycine max
  misc_feature (619)..(619): n is a, c, g, or t
  Probeset Number=SeqID_14089
tcgagtcagtcacgtagggcccccccccttttctccacttcacaatggcttggagcccgcatctgagatcaagctcttggcaagtggacgtacgatgacgtcgaatgcaacgatatctccctcacggattacgttgctgtgaagcaaaagtacaagtaccagtcctacctcccccacaccttgggacgttacaacaagaagaggttcaggaaggcacaatgccccatcgttgagcgtgttgctaatgccctcatgatgcacggaagaaacaatggaaagaaattgttggctgtccgcatcctccgcaacgccttcgagatcatccacttgctcaccgaccaaaaccccatccaaatcctcgtcaatgccatcgtgaactccggaccccgtgaggattccacccgtattggatctgccggtaccgtccgcagacaagccgttgatgtgtcccccatgaagcgtgtcaacatggccatcttcctcctcacctctggagcccgtacctctgctttccgcaacatcaagaccgctgctgagtgtctcgctgacgagttgatcaacgccgctaagggttcttccaacagctatgctatcaagaagaaggacgagttagagcgtn

SEQ ID NO: 4311 - DNA, 474 bp, Glycine max
  misc_feature (189)..(189): n is a, c, g, or t
  misc_feature (433)..(434): n is a, c, g, or t
  misc_feature (458)..(458): n is a, c, g, or t
  misc_feature (462)..(463): n is a, c, g, or t
  Peptide Sequence Number=SeqID_7714
  Probeset Number=SeqID_14090
aaattgggtttctctttctcagaattttccgccttggtgtttgctttaaaacaccgccgcacgcacattgtttctcttacaatcgttttttatttttcttcgaataattttttttgggttgtcatcaatggcgaatcaaagacaaagttgcagaatcaggaatggatcgtcgacaacagctccgtacgntgtttgtttatgctgagtggatctctggtcgatcgcctacacttgtctaaacctggaatgaaaaccagggccgtatcttccacgccaggttaaccgctcaggccctgaggttggcccctctaaattgggaaaccccccggggggttttttggatccaaaatggggccccccggatcttaccccaaattttttaagctgttaattttaaaaaaaaaaaaaaaacttttgggtaaaaaaggcatannaccccccgccgccaacttacaccncccnncacgcgaacct

SEQ ID NO: 4312 - DNA, 325 bp, Glycine max
  Probeset Number=SeqID_14091
tgaggctgcaacccactttcaccagagatatggcttttgcccaagtacgcccccattcattcagggaaaatgttatgctactgtcgcttaggttacatgcccatgtcatacttatttgggaagagatttgtgggttcaaataccggggtaatcatatctgtaagagaagaaatgtaccaactggcttatgaatcaatcgcttggaataacgcccgaaacacacatggccaaggggggtctctattacccacaatctttgattcaagaaattgtatgggcatttttttatcacgtggggaaatcctttatgaaatggtgggccttt

SEQ ID NO: 4313 - DNA, 657 bp, Glycine max
  misc_feature (180)..(180): n is a, c, g, or t
  misc_feature (186)..(186): n is a, c, g, or t
  misc_feature (194)..(194): n is a, c, g, or t
  misc_feature (204)..(205): n is a, c, g, or t
  misc_feature (238)..(238): n is a, c, g, or t
  misc_feature (245)..(245): n is a, c, g, or t
  misc_feature (248)..(248): n is a, c, g, or t
  misc_feature (262)..(262): n is a, c, g, or t
  misc_feature (267)..(267): n is a, c, g, or t
  misc_feature (563)..(570): n is a, c, g, or t
  misc_feature (639)..(639): n is a, c, g, or t
  Peptide Sequence Number=SeqID_7715
  Probeset Number=SeqID_14092
atcattttaatttaattgatttattccgcgtctataagctttcttgttttgctattgcttgctccgcaatcataatttcatcatcgaatcaaatcaattttgaaggttcattataatggcggaagagaaaccaagaacgacgtcggagtaacctccaaaaccacagaagcagctccaggntctggncctcgtgnattccacttnncacgatcacatcatcgctgccgagaagcgcttnctttcgncgncagaactggttatngtcangagcaggtaaccattggctccgggcctcctggctcaaagggaagggggttccgtttatccagaaagaaggccggggttattaaaccccgttactttgggaagaaaaccccttttccccaaccttgggagagaataggggattctcgcccccacgggggtttttttttttcaaattttagcgcccctgccccccaataaaaaaactttggtgaaaaccctgggggggggggggcaaaaaaaacttttttccttaaaaaaaaaaaaaaaaagggggggtttttttttttgtgagaaannnnnnnnaaaaaaaaaaaaataaaaaaaaaaatacccgcccccctccttgtggggggggggggggggggaaaaaanacccccccccccacaaaa

SEQ ID NO: 4314 - DNA, 438 bp, Glycine max
  misc_feature (106)..(107): n is a, c, g, or t
  misc_feature (275)..(275): n is a, c, g, or t
  Probeset Number=SeqID_14093
ttttctgagggcatttgaaaacaggttggtggtcctatgattcaaattcccacagggagaagagatggaatggtttcagttgcttcaaatgtcagacccaacattnnttggacaccagttttacaattggatgaagattgattaaccgcttctctttgataaagaagttgtcccttgggtttgaccttgtcattcctttccaggtgccatatttcgttccaaggggctcaccaccatagggaacagcgttcattgcaggctcatttcagagatanggttccaagaaagactccaaagggaaagcctcacaccttcattgacaaaaaccccttgacccagtaccttatggcagataagcttaatggcaagaggtggtcccctttaagtgcaagccctttcttgttcaagtgaaacaatggatcctgaaacattcaatgg

SEQ ID NO: 4315 - DNA, 1579 bp, Glycine max
  misc_feature (1)..(1): n is a, c, g, or t
  misc_feature (78)..(78): n is a, c, g, or t
  misc_feature (81)..(81): n is a, c, g, or t
  misc_feature (86)..(86): n is a, c, g, or t
  misc_feature (107)..(107): n is a, c, g, or t
  misc_feature (388)..(388): n is a, c, g, or t
  misc_feature (556)..(556): n is a, c, g, or t
  misc_feature (839)..(839): n is a, c, g, or t
  misc_feature (1268)..(1268): n is a, c, g, or t
  misc_feature (1301)..(1301): n is a, c, g, or t
  misc_feature (1363)..(1363): n is a, c, g, or t
  misc_feature (1493)..(1493): n is a, c, g, or t
  misc_feature (1497)..(1498): n is a, c, g, or t
  misc_feature (1500)..(1501): n is a, c, g, or t
  misc_feature (1503)..(1507): n is a, c, g, or t
  misc_feature (1509)..(1509): n is a, c, g, or t
  misc_feature (1511)..(1514): n is a, c, g, or t
  misc_feature (1516)..(1520): n is a, c, g, or t
  misc_feature (1522)..(1522): n is a, c, g, or t
  misc_feature (1524)..(1525): n is a, c, g, or t
  misc_feature (1536)..(1536): n is a, c, g, or t
  misc_feature (1541)..(1542): n is a, c, g, or t
  misc_feature (1567)..(1567): n is a, c, g, or t
  Peptide Sequence Number=SeqID_7716
  Probeset Number=SeqID_14094
ngtgatgtgtgtgaggtagtagaaggtgtatatggttatgagtaataggactcacccgctcggcaccggtgcggttcnggngaccntgggagtcgagttaagtgttnactgtataccgacaacagtatgagatacatgggagactgagagtggaagtagaggtgggttgtgtttttaatatgtgattattctctgtatccttatatataagatattggattatgtgtactaattgggatgcgtgattatagattgattttactcatatatattagatttgatgattaaatatgagagatgtacagatgcataatgagagtatatgtggaggagatagaatgcaagagaggaagattatggggtatggctcgtgcagagtctacgacanacagcttatagataatatacggatagataattcaatctatttgtgtgtaggtgatattatgttatagcgtatatcgtatcggtatgttgattgtatcggtgtatatgagtattgtgtgtagtgtgagagagaggacgcagaggagggtatgacagcaggggagagctngcacgagcgtgctcactgttcttgtgtagtgcgtatagtagtcagtgtggtggtgtatagaaggagggaggaaaagagagtggtgaatagtattgaggtagagttagttgaatagtaggtggaggttggtgatggtgaggagtatagaatgttgtggggtaagattgcgtgttattatcgttgtgttgttaaataggagaatgaattagattttacactgtgcaggtgcatttattatagatgctatagttgaattgtctttgtttcttcgcactcttcttcntattcatatgtttatttctattatcttcttctgtagttctgtgcgtgggaagtaggccgactgatagaagcgcggagagtataggacaagaagagaggagaatagagagagggacaaagaaagagagggaaggaacagaggtgggatgctcagagtcatagtgtggtagagaatcaagacaagatgcaaccatgagtactatgaagatcagtgatcctacagagtatacaactatcatatattaactataacaaactataatagaatacattaaacacatagccaaaatattagtataaattgtaagagatggttggtttggggtgtgtgttttgttgtttgtgttgtttaggtagcgtgagcgtcatgtgtgtcaatgtatggctcattatgtggcgagaatggttgagaggtggtggtttagtttgnagaaaaatataccaagacagaatacaaaagaantatatacgaacaatccgaagaagatagaggcaggcagatttgtgacaattacttattagtgngggccagagttggcctagtagttgtgtagccgtatgtggatttaggcgtgggtggaattcagcatatatatatatattacaaattattaactatatggggaggtgggtgtcctaaagagaaagcgaaaangggnntnngnnnnngnannnnannnnngntnnttttttttgtngtttnnggttgttttttttgggaggatatgntgtttctaattt

SEQ ID NO: 4316 - DNA, 2346 bp, Glycine max
  misc_feature (2210)..(2346): n is a, c, g, or t
  Probeset Number=SeqID_14095
ccctcgtgatcgataaaaaatattattattattatgagtattcataaaaaagatatgagtagtgtataaatctcagcgttgacaataaaggacagttaaattcttaaattatggtgtaaaagtaaaataaaatataaaaaaaaagttaattgaaatttataatcagttttaattataacaaattaaaaacaaaaacaaaactcttcaattaaacaataaacatccataatttgtggacttcatttatgttcatattagtttagcctctttgaataggaaaagtgattaacatcctaaatttgtgtagtgtctatgaccacatatgttggttggtaatgagaaatgaggatggtaggtatcagttaagttagctttatctggaactgctggttctcacttctcatactctcgaagcagagaagttaacaaccaatggccaccatcattgcttcttcctcatccactgtgctcttctctgcatcctcttcctacctcctcccattttcacacccttctacttcgcgcctttctttctcttcttccctttcctcctcctcctcttctctatcaatttctccttcttttttatcatacacttcttcaaattctacacactttgccactcatgctgccttcagcatcagtgccagcgccgccgagaagaagaaggtgctcatcgtcaataccaacagcggcgggcatgccatcattggcttttactttgcaaaggagcttcttggtgctggccactctgtcaccatactcactgttggcgatgaaggctcagacaagatgaagaaacctcctttcaacagattctcagaaattgtgagtgctggagggcgcacagtgtggggaaatccagcacaagtagggagtgttgtaggaggggaagtgtttgatgtggtcttggacaacaatggcaaggatcttgggactgtgaggccggtgattgattgggctaagagttcaggtgtcaagcaattcctgttcatcagcagtgctggaatctacaaaccaacagatgaacctccacatgttgaaggggatgttgttaaagcagatgctggtcatgttgaagtggagaaatacattgaagaaacttatggaagttgggcagtgttccggccacagtacatgattgggtctggcaacaacaaagactgtgaggagtggttttttgacaggattgttcgggacagacctgtgccaattcctggctcgggactgcaactcagtaacatagctcatgttagggacttatcttcaatgcttactcttgctgttgagaatccagaagctgcaaatcagaccattttcaactgtgtgagtgaccgtgcagtgactctagacggaatagccaaactatgtgctcaagctgcagggcgcccggttaacattgtgcattatgatccaaaagctgttggagttgatgcaaagaaggctttccctttccgcacctatcacttctatgcagaacctagagcagccaaagctaaattgggatggcaatcaaccacaaacctccctgaagacctaaaagaacggtttgaggagtacgtaaagattgggagagataagaaatccatccagttcgagctagatgataagatattggaggcattgaaggttccggtgtcagtgtgatccatttatatccaaaacaattatcagacaagactttaagattttttggtcgctcaattcaaatgatgtgcattgaagaaagttacttctctccttgttaaaataaaacaaaataaacttatgatgcttaagtagctcagttaggatatcatgactaaaatattccaaattcaaactataaattaagccctcaaacctcccgaaacatcaaaatttaaggtttgaggagtacctaaagattgggagagataagaagtccatccagttcgagctagatgataagatattggagggaatgtaaataagggtgagaatatactgttgaaaagatactaatttgcagaacataaagtatactacctcatttgataccagttttaccaaaggcaatggccatgcaatgaatgtgttaacgacatctctcacatacttaatttctgatgtcgctaatggaacttcagcttcaccatcaattgggacccgggtctacttacctgactcgaggactggcccggaacccaattccccctatagtgagtcaacattacaattcactgtgctgnnnnnnnnnnnnnnnnnnnnnnnnnnnnnnnnnnnnnnnnnnnnnnnnnnnnnnnnnnnnnnnnnnnnnnnnnnnnnnnnnnnnnnnnnnnnnnnnnnnnnnnnnnnnnnnnnnnnnnnnnnnnnnnnnnnnnnnnn

SEQ ID NO: 4317 - DNA, 1422 bp, Glycine max
  misc_feature (1102)..(1102): n is a, c, g, or t
  misc_feature (1403)..(1403): n is a, c, g, or t
  Peptide Sequence Number=SeqID_7717
  Probeset Number=SeqID_14096
gcggggaagactgggaggggggcaggggctacgggagcggaggggcctaagaggaggggggaggtcgcggcgcgagccgttgacggcgcagaggaaggagacggagctgttttccacacgagtttgaagtggggttcaaccaaattttcccaacgacactgtttggagtgcagagaggaagctcattagactctgtagcacattggcgcgtgagatttggcggacccgccgacacggccgcggggccgaatggtttattattagagcaagatagagtaattacctaaatgcaggattgagctgagcggatcaagaagaagacactaaatcggaactaacacaggaggtgaacagcgcacacggaggcagatgataattcgtcgcccccgccgccgagatcacaccctgagtgaccacagtacatcaccgttgcataccggcgcgccctccttcgttatatctttacttcggcggcagcctgcgcgaaccgcgccgtttccgcaatatcacatcattctgtataaccgccgtctgcagataggaaaaccatgtacatgtatagttcaattgatttatgcgcactgcataattggcgcgcatttgccgccatattgccaacactgtgacggaagggggaggagagagtagagggatataagatagatgtccgtgccgcgaatatactcaccttaaaaacacatcacccgacccctgcctattgctatgccacctccccgagagtgcgggcaactagtgcaggcgcgttgcggggcgttgtaagcagacgcttctcggttggcacgggtgatgtaggaggccggtgagcggcctcgtggcgaccgcagacgagcgctgcgtcattagcccgcttacatccgcgtcgcacctccgccgcgtccggtatgcttcgccgtaaacggagtacatactgcaatccgtctctcaccgccgacacactcttcgcgttctaattgagttggttggacgccagggcgggagcgacttatacacagcttgctactcatggataatcgcacgaagttatcgagatccgatgtctgtgacgacactgggagcgagatgacgtgtacacgcgcgtcgncagaagtcacacatagccgagtgcgattgacggcacataattatctcgtcgcctctgaaagatgcatacacccatgtcatggcatctaacagtcgacatgcatggtttctgacagtggagtaccacactcgattctaatccgacagacgacatgcagagccgccttatcgctacgtccagtcggcgagcccagcgtatctaccatgcgcgtatatactgcgcctctacaactcttgcatcatcaagataagcatacacactcgcgacgactacggcaggaagtatagaactttatcaacgnatcgcgtgcgagtgacacc

SEQ ID NO: 4318 - DNA, 1423 bp, Glycine max
  misc_feature (26)..(26): n is a, c, g, or t
  misc_feature (87)..(87): n is a, c, g, or t
  Probeset Number=SeqID_14097
ctggatgtgtgtggagtgggctgcanccacacttccgcgcagttacactcgcgcgagatcagagagacacacagtgtataatagtancggtaggtgtgtgtgcgaaggtgtctcactctcggtatcatgtcggagagtggtgatttacggagatccaccggatcgtctatgtcatgttgatcatgagagcatatgaagatgtctgcggcgattgatgtattaacacgacgctcggccgtactcaggctcgagcctgcgctccgcactcattgtgtgagcccgcgtaagtgttattgttcacaggatgttgcagggtgcggagagaagagctgttgcggtggtgtctcacgttgtgttctgcctatactagtggcttcccagaagtaatagttatgcgccctctccgagaccactaacgtagtcgtgctctcctgattgttcatgtcttctctgatagtacctatgtcgctggtgatgactcatgcaaacgcgtgttacacatgaggatatgagtccatgtagagtgtccgatagcgtatcgtgatgtagaatttttcgtactttttcatagtagtcgattacggatcctagtgctatgctgaaccttaaatgtgcaggcgcatgggctgactacagcttgagtaagaacatcttggtgtatagtaaagagatcgattgtcgttggatccgctcgtaaggaacgaggtcagactataccagtgcgctgctcgcgtgtgcgaatgtcgcttggcatttggtgcacccatcgccttcggaggaagttagatcgatttacgcttgtgctgtggctggggagagatgatgggctggggtgtcgagtaggacgcgggtgcatgtttgcaggtggtgtcctactggctttctcttgtagttcttggcgttgaacggcgggactcccaatctcgcgatgagcagaacgtcttaatatgcttttttatctacactgtttgtgtagggttattataattgcttattggcccgaatgtagcatcaacaggagctatctgcttcggactcttgctgcgtgtagagagcgcttgtctgtgtggtcctcataacggcgcagctactctctgctgctcctgcactcgtgaacaaaataagcgatatactgtagctaaataacacgaggtatggctctgtcttcggtgtggaagcgtactctactctcaagaggtgggattcaaatccgaggcaattgaggcaagatggagggatttatagagcggattcaggctatcttctcggttgaggtgtgtttgtagtgtaatcgtctgcgtgggggtaacctgcaggcccgggggatccacatattggaaaagctggccgccgaccgcggtggagctccagctattaggatagcggttcggtggcaacggccgaatagtagtgcgtggagggg

SEQ ID NO: 4319 - DNA, 1423 bp, Glycine max
  misc_feature (70)..(71): n is a, c, g, or t
  misc_feature (73)..(74): n is a, c, g, or t
  misc_feature (97)..(97): n is a, c, g, or t
  misc_feature (113)..(113): n is a, c, g, or t
  misc_feature (266)..(266): n is a, c, g, or t
  misc_feature (719)..(719): n is a, c, g, or t
  misc_feature (721)..(721): n is a, c, g, or t
  misc_feature (729)..(730): n is a, c, g, or t
  misc_feature (742)..(742): n is a, c, g, or t
  misc_feature (744)..(744): n is a, c, g, or t
  misc_feature (770)..(770): n is a, c, g, or t
  misc_feature (785)..(785): n is a, c, g, or t
  misc_feature (846)..(846): n is a, c, g, or t
  misc_feature (859)..(859): n is a, c, g, or t
  misc_feature (1219)..(1219): n is a, c, g, or t
  misc_feature (1222)..(1222): n is a, c, g, or t
  misc_feature (1236)..(1236): n is a, c, g, or t
  misc_feature (1333)..(1333): n is a, c, g, or t
  misc_feature (1381)..(1381): n is a, c, g, or t
  Peptide Sequence Number=SeqID_7718
  Probeset Number=SeqID_14098
tttttttttacacatctcatataacatgaaccctctcatcctcctccatcccaacacccggctccccccnngnngagaagtgatatatttcgacaanacccccccacaccganaccacaccaaccccaccccccacccccccctctcttctacttctctctttgtatttcattccaacatatctctctctacaactcttcttcctctctttatcctctcccacccaccccacctctctcctccactcttcactcacgtattcctcntacttacctaattcttcaacacactacccatcactatccctcacattaataatattactcaagatttttattctatctcctttgctctcatacctcttcactcaccccttcatatatattaacaatactctatctatatcactaatcctcttctctcgtctttctcttctccatcttatcaaacttaatattttatattctcaccccctcatctcctaccctctccctcttcatctctctactctctcctccctacactctatctcttactcactcaacctcctctcactctatccctcccacactactctcacacactttatattataattatatatatatatttacctatacatatatctctccttctctaatccctcactatctctccacacttccctcatctctcacttaatattaatttatatatatcacatttgatcatcaccaaanantccacttnnataattataacnancatctatacaactactggcactctcncctgcattattcctnctcaaatataacacactcatttattcgtatgtatctctactataattcaatattaataacnaccacacctcttntactatcttcattttatctatattctatctatctctcctatccacttcctcactatcaccatatacctctatttcattctctcctccctctgtctctatctatatttactctctctctctacctcttatatctcaactgataatcacccacacatatacatcatcatatctactccactccacctcctcggtacacctttctacactctcacctatctcatatactctctatactacttcctatatttttatactatattatcttcattcatcataaattaatatattattactatatttctcaatcaccctcaccactaccaactctacctctcttggccatccactatctacatcccnctnacactcatcctctnatcatacaccaatttctccgcactcgaactcactcacagactcctccttcgctctaccatcctacatctcacactattctatatattcaactaatcnacatcctatctcaccctatacactccactatactctcatcctctcctntctactctctccttactacatatctcgcatctcttctaaccg

SEQ ID NO: 4320 - DNA, 2441 bp, Glycine max
  misc_feature (17)..(17): n is a, c, g, or t
  misc_feature (29)..(29): n is a, c, g, or t
  misc_feature (33)..(33): n is a, c, g, or t
  misc_feature (35)..(35): n is a, c, g, or t
  misc_feature (40)..(42): n is a, c, g, or t
  misc_feature (58)..(58): n is a, c, g, or t
  misc_feature (72)..(72): n is a, c, g, or t
  misc_feature (77)..(77): n is a, c, g, or t
  misc_feature (86)..(87): n is a, c, g, or t
  misc_feature (127)..(127): n is a, c, g, or t
  misc_feature (149)..(149): n is a, c, g, or t
  misc_feature (151)..(152): n is a, c, g, or t
  misc_feature (161)..(161): n is a, c, g, or t
  misc_feature (178)..(178): n is a, c, g, or t
  misc_feature (181)..(181): n is a, c, g, or t
  misc_feature (184)..(184): n is a, c, g, or t
  misc_feature (188)..(188): n is a, c, g, or t
  misc_feature (190)..(190): n is a, c, g, or t
  misc_feature (217)..(217): n is a, c, g, or t
  misc_feature (235)..(235): n is a, c, g, or t
  misc_feature (250)..(250): n is a, c, g, or t
  misc_feature (281)..(281): n is a, c, g, or t
  misc_feature (306)..(306): n is a, c, g, or t
  misc_feature (353)..(353): n is a, c, g, or t
  misc_feature (386)..(386): n is a, c, g, or t
  misc_feature (389)..(389): n is a, c, g, or t
  misc_feature (427)..(428): n is a, c, g, or t
  misc_feature (446)..(446): n is a, c, g, or t
  misc_feature (489)..(489): n is a, c, g, or t
  misc_feature (492)..(492): n is a, c, g, or t
  misc_feature (501)..(501): n is a, c, g, or t
  misc_feature (533)..(533): n is a, c, g, or t
  misc_feature (551)..(551): n is a, c, g, or t
  misc_feature (558)..(558): n is a, c, g, or t
  misc_feature (564)..(564): n is a, c, g, or t
  misc_feature (569)..(569): n is a, c, g, or t
  misc_feature (596)..(596): n is a, c, g, or t
  misc_feature (598)..(598): n is a, c, g, or t
  misc_feature (605)..(605): n is a, c, g, or t
  misc_feature (625)..(625): n is a, c, g, or t
  misc_feature (663)..(663): n is a, c, g, or t
  misc_feature (676)..(676): n is a, c, g, or t
  misc_feature (678)..(678): n is a, c, g, or t
  misc_feature (697)..(697): n is a, c, g, or t
  misc_feature (730)..(730): n is a, c, g, or t
  misc_feature (756)..(756): n is a, c, g, or t
  misc_feature (761)..(761): n is a, c, g, or t
  misc_feature (774)..(774): n is a, c, g, or t
  misc_feature (793)..(793): n is a, c, g, or t
  misc_feature (802)..(802): n is a, c, g, or t
  misc_feature (824)..(824): n is a, c, g, or t
  misc_feature (870)..(870): n is a, c, g, or t
  misc_feature (873)..(873): n is a, c, g, or t
  misc_feature (877)..(877): n is a, c, g, or t
  misc_feature (883)..(883): n is a, c, g, or t
  misc_feature (891)..(891): n is a, c, g, or t
  misc_feature (901)..(901): n is a, c, g, or t
  misc_feature (942)..(942): n is a, c, g, or t
  misc_feature (962)..(962): n is a, c, g, or t
  misc_feature (969)..(969): n is a, c, g, or t
  misc_feature (1043)..(1043): n is a, c, g, or t
  misc_feature (1058)..(1058): n is a, c, g, or t
  misc_feature (1081)..(1081): n is a, c, g, or t
  misc_feature (1087)..(1087): n is a, c, g, or t
  misc_feature (1239)..(1239): n is a, c, g, or t
  misc_feature (1257)..(1257): n is a, c, g, or t
  misc_feature (1281)..(1281): n is a, c, g, or t
  misc_feature (1285)..(1285): n is a, c, g, or t
  misc_feature (1341)..(1341): n is a, c, g, or t
  misc_feature (1395)..(1395): n is a, c, g, or t
  misc_feature (1458)..(1458): n is a, c, g, or t
  misc_feature (1554)..(1554): n is a, c, g, or t
  misc_feature (1563)..(1563): n is a, c, g, or t
  misc_feature (1565)..(1565): n is a, c, g, or t
  misc_feature (1573)..(1573): n is a, c, g, or t
  misc_feature (1579)..(1579): n is a, c, g, or t
  misc_feature (1632)..(1632): n is a, c, g, or t
  misc_feature (1642)..(1643): n is a, c, g, or t
  misc_feature (1648)..(1648): n is a, c, g, or t
  misc_feature (1695)..(1695): n is a, c, g, or t
  misc_feature (1710)..(1710): n is a, c, g, or t
  misc_feature (1731)..(1731): n is a, c, g, or t
  misc_feature (1737)..(1737): n is a, c, g, or t
  misc_feature (1837)..(1837): n is a, c, g, or t
  misc_feature (1862)..(1862): n is a, c, g, or t
  misc_feature (1866)..(1866): n is a, c, g, or t
  misc_feature (1871)..(1871): n is a, c, g, or t
  misc_feature (1890)..(1890): n is a, c, g, or t
  misc_feature (1893)..(1893): n is a, c, g, or t
  misc_feature (1896)..(1896): n is a, c, g, or t
  misc_feature (1921)..(1921): n is a, c, g, or t
  misc_feature (1930)..(1930): n is a, c, g, or t
  misc_feature (1933)..(1933): n is a, c, g, or t
  misc_feature (1942)..(1942): n is a, c, g, or t
  misc_feature (1967)..(1967): n is a, c, g, or t
  misc_feature (1973)..(1973): n is a, c, g, or t
  misc_feature (2024)..(2024): n is a, c, g, or t
  misc_feature (2027)..(2027): n is a, c, g, or t
  misc_feature (2040)..(2040): n is a, c, g, or t
  misc_feature (2053)..(2053): n is a, c, g, or t
  misc_feature (2067)..(2067): n is a, c, g, or t
  misc_feature (2097)..(2097): n is a, c, g, or t
  misc_feature (2099)..(2099): n is a, c, g, or t
  misc_feature (2103)..(2103): n is a, c, g, or t
  misc_feature (2105)..(2105): n is a, c, g, or t
  misc_feature (2107)..(2107): n is a, c, g, or t
  misc_feature (2121)..(2121): n is a, c, g, or t
  misc_feature (2123)..(2123): n is a, c, g, or t
  misc_feature (2128)..(2128): n is a, c, g, or t
  misc_feature (2130)..(2130): n is a, c, g, or t
  misc_feature (2150)..(2150): n is a, c, g, or t
  misc_feature (2161)..(2161): n is a, c, g, or t
  misc_feature (2166)..(2166): n is a, c, g, or t
  misc_feature (2178)..(2180): n is a, c, g, or t
  misc_feature (2201)..(2201): n is a, c, g, or t
  misc_feature (2203)..(2203): n is a, c, g, or t
  misc_feature (2207)..(2207): n is a, c, g, or t
  misc_feature (2210)..(2210): n is a, c, g, or t
  misc_feature (2229)..(2229): n is a, c, g, or t
  misc_feature (2245)..(2245): n is a, c, g, or t
  misc_feature (2258)..(2258): n is a, c, g, or t
  misc_feature (2263)..(2263): n is a, c, g, or t
  misc_feature (2275)..(2275): n is a, c, g, or t
  misc_feature (2282)..(2282): n is a, c, g, or t
  misc_feature (2377)..(2377): n is a, c, g, or t
  misc_feature (2420)..(2420): n is a, c, g, or t
  misc_feature (2429)..(2429): n is a, c, g, or t
  Probeset Number=SeqID_14099
agtccctgtacccactntctgccgcccantccncncctcnnncacctctccagctacnccctatctgatctnctgcntcacgacgnntagctgcagctgactgctacactgacagctattgaatgtngtagatagtatacttaatattnanntagatagangtctctactgcttctgnctntcntgtncngtcgtactcatccagcatgcgtacgtnctgatgtgcgactcatanctacctactttactnagtacgtctacagcgtgctacactcactttngccgtctgtctgctcgatgtcgtgnctatcgcgcgtatcggcgtagtagcgttcactgcttgtatgctgctncacgactgcagtagaccgtaatctgatgtgatnatncatacgactgctcctagtgatctcgatcatcgatacannatatcgtcgactcatgcnctagctatgaagctgtgtctatagttgtgactgactccccaantantacgcccangttctgcacggtgcttacgtctctcatggcgngatcgatatgtgtgactnggttcgnatgcgntgtcnagacgtcactatagcagcactactacnancatagancatccacacatcgctgatancaacgtgactatgactatgcagtcaggcggtgacgcgntccatcgatcgtntnctggtgacatcgtgccgcngacacgtctgcgtgctgccgacagcgcacactnacgtctgtcgattggtgtcgatgatnacgcntgatcctatctantcacgacgacacacgacgnatagtcacntatatcaacgaactgatggaangaatgagactatcagacgcgacgagagtctgccatgtctgtctganatngatnatgtgntgctgatngtgagacacntacatcggatatactcgcatgcacacagtaacagtatcatnaaatgaatgatatgatcgtngatacgntgtatatagaggggagaatagcgtgcgtgatgcctatgtagatagcacatcgtcagtctcttatatctctgctncatatactactgccnctaacatgcatcagtctgtaacntagagngacgctgcgtagtatacgtgattgtgtagtcatatctgatcgctactcttgcgtcatgataacgtgtctgcgtattatgactcagtcagctgccgtagactaatgcttgatgtgtatcttactcgcctgctgcacgcgcctcattctgacgntatgccacctgtgagcgnctgagcgctgtcgtgtgcatcgancatntgctgtctgagaggcatcatctctggcgtctctcgttcattcactacgagtccgcnacggactgaagatagacgtatccgtagtcacaagacgaatacacgagcgacagntcgacgacgacatcactgacacgtagctaatctgaacatgtcatctctctatccaagtctacntatatctagttgatcactcactgatccacgtgatactatcgatatctctcatgcactctaatgtcgtatatgcttacgtatctagtgtggtagtgntctgtgctncnatctatanactcangatatgctacactcgtctctcgattgatgcaatacgcgagagagactacgacntgatcacganntgtgnatcccagtctgattcgacgtatgtagactgctgagtacataccgatnctcatgtgctactcncgtcgtgcgtatgcaatacanctcatnagtatactgacactctgcgtggatatcaagtgcgtatgcatgacctacgagtagtatcatacatgcaagatgtacgaatgatatgaggtatcgacctctncctgatctggagtatcatcgtactntgcnatatnactcatatctgatactacncanatngcagtgtctacatgtcgtcattagnctgactatnctncgagctgtnatggatgatatgagctataacgtgntcgtcntcgctggtagcgtagagtccgagctatcactgcgctctgtgctgactcgtncangcgtcagcgcacnaccgtatcatcgntgtactgatcgagncgctgtgataggtgtatggtctactcgcgncntgananancaggaatgagcgangncgtgncngtcgtcgactcagatacagncattacagtgntagtncagcatgcgtgnnntagtgcgaatgcagtgctgtngngagnaantgcatcgatcgcgttggcntgacccttcacagatnatgccgtagatgnagtantgagtagtatgnacgcacnggtatacgacgtgagcagtccagagcgtacgcagcgcgctgatctggactactcagtactcggacgcatcgtcgcacgcgtagtgatgacgatgntgctcgagcgcggtagtcatgcatgacggagcagcgttagagntcgacgacncgtcgtgctccg

SEQ ID NO: 4321 - DNA, 465 bp, Glycine max
  Peptide Sequence Number=SeqID_7719
  Probeset Number=SeqID_14100
gatcctctttgttatttttttctttcaatcaaaccctagttcctcccgatcatcggtactaatcgaatcaccatggctaagaactccttcaagctctctaatcctcttgagataagaatggctgaatctactcgcatcagagagaaataccaagacagagttcccgtgattgtggagaaagctgaacagagcgatgttcctgacattgacaagaagaagtatcttgtaccagctgatctaaccgttggacaattcgtctacgttgtgaggaaaagaatcaagcttggagccgagaaagcaatctttgtctttgtcaagaacacgctacctccaactgcggcattgatgtctgcaatctatgaagaacacaaagacgaagatgggtttctctacatgacatacagtggagagaacacatttggatcagcatgctaatattatctctgctttggcagtttgatcttg

SEQ ID NO: 4322 - DNA, 1805 bp, Glycine max
  misc_feature (15)..(16): n is a, c, g, or t
  misc_feature (24)..(26): n is a, c, g, or t
  misc_feature (36)..(37): n is a, c, g, or t
  misc_feature (44)..(44): n is a, c, g, or t
  misc_feature (715)..(715): n is a, c, g, or t
  misc_feature (725)..(725): n is a, c, g, or t
  misc_feature (812)..(812): n is a, c, g, or t
  misc_feature (900)..(900): n is a, c, g, or t
  misc_feature (932)..(932): n is a, c, g, or t
  misc_feature (1002)..(1002): n is a, c, g, or t
  misc_feature (1124)..(1124): n is a, c, g, or t
  misc_feature (1159)..(1159): n is a, c, g, or t
  misc_feature (1162)..(1162): n is a, c, g, or t
  misc_feature (1181)..(1181): n is a, c, g, or t
  misc_feature (1186)..(1186): n is a, c, g, or t
  misc_feature (1203)..(1203): n is a, c, g, or t
  misc_feature (1251)..(1251): n is a, c, g, or t
  misc_feature (1262)..(1262): n is a, c, g, or t
  misc_feature (1316)..(1316): n is a, c, g, or t
  misc_feature (1391)..(1391): n is a, c, g, or t
  misc_feature (1396)..(1396): n is a, c, g, or t
  misc_feature (1465)..(1465): n is a, c, g, or t
  misc_feature (1562)..(1562): n is a, c, g, or t
  misc_feature (1607)..(1607): n is a, c, g, or t
  misc_feature (1682)..(1682): n is a, c, g, or t
  misc_feature (1776)..(1776): n is a, c, g, or t
  misc_feature (1805)..(1805): n is a, c, g, or t
  Peptide Sequence Number=SeqID_7720
  Probeset Number=SeqID_14101
tatccttcttccctnnctcctctnnnctcctccccnnccgctcncaccacttacacacactgctagtacacaacacccctctcccatattctttgttctcccgccctcgttctgacctacggcgcaacctgcagctgcactactcccacacctgtcttttctctccttcttgaccccacatacactctgtagatgctttaacgatagaagcgcggcgcgacaaacctgccatagaagaactggcgcgagctggatactcagaagttaaatattataaatacaattgcaaacgacggtagaccatactacacaatagtagactgcacataggcctcccgcactatacacacctactctactcgtcaaacttcactcatcatgcctaatcacaattcttctacacagtaacatgagtatatcatctctgttctaccaacactctataacctctccctatctcgctactatatacaacaccaataactctcgacttcccagcgacatacatctctctctcatccacatatcgactgtgaggtacctcaacaagatcatctttctgaggtatgcctcatctgccgccgacctgtgcgtcgcacccacgcccacctcgtatacttatctctactttcttatgcttatataagaagcatcataccactgatcgcctatactctccatctcactcccacgtgtctttccagtctgcacgcgncatatttatntattatctgccacccgtctttgattatgccacttctattcttctacgatctactccacacgattgctcttctctcactaacaccgtnttatagctaccagcaagaggtgcgtcgattcccagcactcgctcagatactctgctaccacacgcaacatcagcacgccacacactcntcttatataatgctcgtcacgacgagacatcnctcgacgcacatacctcatcgcgcacgacgcctatgacgtggcgtagataatgattagatgtgacgaccncccacactcattctcacacatagagatatcgttcttaccacccacagcccaccacacagtcgccgtactgagagcgcacatctctcgtctgataatgacgtcagcgcctgcgacacgcttcnacgctcaccaccgcatgagttcttataactacgtncgngaggagtgacaacgtcgcntttcncttctggcgacgctaanacattcatctctatatcatgtcgggcgccgcactcgacacaaccaccnctccgctagtntgcacgttgaccactgcaaccactaacgaccgatacctgctgcgtaccgctcangcatatcgtcgctgcgtcacgcgcgatacacttcgccagatttcatatcgtctctaagactcgcgaactctgatncttcnatcacgtgatctcagatcatcaacagttacgcgacgcttgcgcgtctacagcgttgcgcaccatctccnactattcctcattatctctgtctgcctacatgcatgtcgacgtatgtcattatctatagcagtaatacgcgcgaaattacgctcactcctgattctntctctacgtactcacaccatgtcgttgacacgatgtgtcgcgctnctacgtctgtcgtcaccttccatatcatctgcgcacggacagtacgctgccggcgcattcatatacgctcttctnattttatcaaacgtactcgtatctatctgatccgtttacctctctcacagctcacgttccacgcgtctcgcaatcacgtgtgtcttaactggcnagcgtgacgcctcaaccctcgacgacctn

SEQ ID NO: 4323 - DNA, 1461 bp, Glycine max
  misc_feature (868)..(868): n is a, c, g, or t
  misc_feature (1054)..(1054): n is a, c, g, or t
  misc_feature (1083)..(1083): n is a, c, g, or t
  misc_feature (1089)..(1089): n is a, c, g, or t
  misc_feature (1139)..(1139): n is a, c, g, or t
  misc_feature (1255)..(1255): n is a, c, g, or t
  misc_feature (1402)..(1402): n is a, c, g, or t
  misc_feature (1447)..(1447): n is a, c, g, or t
  misc_feature (1461)..(1461): n is a, c, g, or t
  Probeset Number=SeqID_14102
actccccagctatcaacctactcccatcactttaactgtccctagcgtgtccgccgtgccgcgcctcgacgctctcaatgcccctgcgccagaatctctttcatgtttggacgggtaattgtacaggatctcgctaactccgtgtcacacacgcgccccgccccccgcaccacgcatggtgacacgcacagccgggcgaaagaacaggccaacgagcgaattgtcccccgatattaggccaacgaccctacacacgttttgccttcttacatattaaaccgaattcatcgcacgtttgcctaggcaccgtaacgctccgttaccccctgtgtgcccttttattttcccccctctcccccggttttaccaaataccccgactagtatcgcgcgattttcaccctgtgccctcgtgtcctcccccctgttaccccaccccatataacacctgtttgtcgcccctgcccctcggctgctccctctggtcccccacgccaccacctcgccactatgtcccccttgatcgcgtttgttcgcccctctcgccccctatcctccccctagtacccgatgagaccctctgtgtgcgtgatttacaccgtacctattatacctttctttttcgcaacctttatcctccccccgctaattcaccccactgtttagtcagcgaatacgacgctcgcgttgcggtgtgcacccgagcaaccgacaagagcgattcagcacaaactctacacgcaccaatgcgagagttgataagaatgctcaagacgctatattagacgtaccaccgccctttatagattgtttatctacctccagagacgactcacgagccggttctcacctcccgcttaccacaacgnacccattcacagcaagacgcactctcaacacaacccgcaacccgcccgtctttgtgagccgacccatacccacccacactcgttgttgtgtcacaacatgtgtctgacctcccgtacgaccacctattattacgtgcacacagagtttgaccacatcctctacagtattttatatccacaagcganctcgccaagcacaggtttgtacgccaaangtattntatacaccgacactgatggcgtgacgaggtgctctgatcatgtggtgtcnacgcactacagtcgctcaccccacgcgtatgtttgttcctctatcgccacgcaccgttctttctctgcgctccctgcaccgtacgcaccgctgattgttacgcccacacaccgctntctgctataccacgacatctatgtatctcacgtacgatcgaaatggcatcgacacccggcgccactaatctgaccaaccacatatatgaaaccacgtccgacctgccgcaggatatacatattgattatcttctacgtatcggaagncgcgcagatgactcatatgacgtgcgttggtacgcacgctcactntacgtgatgcctcn

SEQ ID NO: 4324 - DNA, 1432 bp, Glycine max
  misc_feature (1253)..(1253): n is a, c, g, or t
  misc_feature (1430)..(1430): n is a, c, g, or t
  Peptide Sequence Number=SeqID_7721
  Probeset Number=SeqID_14103
ggaagaaggcaaacatggcacgaacttttatccccatcgcgataggtccgcgccgcacaccgccgtccgggttatcaccttgttcttccatcgaccttcgcgctgatgattagagaaatttctctctctttcttctcgccgtacaattgtgatttaaaccaaccgttaaccgcgggccccgttgaatagcgaggaattcttcacacccccaccactctacacacatgattcggccggccattgtttgtgtccgcgttgtattgttaaattagaccgacgagacgctctaaaatcccccgattatataaaagaaacataacgccccgcgtcattttaaaatcgccacgcccgaagtgaattgtagtgcgatcccgcccgtaataaacacgcgcgcccccccccccccccccgcgagccacaaacaaacccgaatgagggttacagaatgcggtgcgggtatattgtcagtacgcagaaggcggcgcgcgcgtaatattagatatatcgaactcgcattacaatcgatgtaggccgcgaaacgaaacatgtgtgtgggccggccgcgctgttattaattgggacggattaggatatatagctccccaccgcggataaaaaatatcgtgggggtgtgtggaatgtatgaccacgggggtaaatatacgctgaacgtggtggtagttgtgctacgaggggtgtgccgaaaaacgaaatgacggggggtgagtgtgaaaaaatacccactccaactgatgataatagtgtgaaaccccgccaacgctatattgacggacctaccgcgggcgagcgcgtttcgtagtcgcgtgtgtagtttgcgcacacacgtttgaaacatgctttctgtgacaatacgtgcgcacagaacaacaaggaggtgtgttatataatgcgtgtagatagatggaggaggcgttctgtgtcggtggatccaccgcgctactttattcagtcgaccgtgtacgtgttgagccggactatttgttctataaatataatgcgccgcgcggcgagagatataagcggcgcgagcggcggcggtacaagctggtgaatagaatgagtgcgctcgagctcgcgcgcgcgtgctaaatatataataataagaaacgcttgtaaaaaaaaactcgtgagcgcgcgcgtccccgttggcggtgcataatgaatatatacgctcgcggtgtgacgcggggagagcgcgagaagagacgcgcactatgagagagcgtctgcgntgtcgttcgccgcgaataatactcagggcgagactactaaaggcgcgcgcgcgcgcacgacaatatagatggtatacggcgtgctggccgcgggcgacgagacgcgtattatagtcgtatatatttgtgactctcgccgcgcatacatacacgacgtatttgccgttatatgaacgntg

SEQ ID NO: 4325 - DNA, 1343 bp, Glycine max
  misc_feature (95)..(95): n is a, c, g, or t
  misc_feature (780)..(780): n is a, c, g, or t
  misc_feature (825)..(825): n is a, c, g, or t
  misc_feature (1055)..(1055): n is a, c, g, or t
  misc_feature (1132)..(1132): n is a, c, g, or t
  misc_feature (1271)..(1271): n is a, c, g, or t
  Probeset Number=SeqID_14104
tatttctctccatcgatttatgtccgttatatggttttgcctctatcctactaccatcttctccttccccttacctcatgtacggtttcactttnatgtgtagtttgccttttttatcgatcaccctcccctcctctatacattgggtgtgtcgttttctaactattagcgcattggtaatgtaaattggcggtgtgtcctaccatctacaaacacataagctagtcgaccgatccaccggatagaccaaagaactaaaaagatgaagcggaattctctctgtttaccatctcaacctacactaaacctctatattactgctactccgtattcactacgctcattatgatgggatcgtggttgctgcgtagcataatttacccgagctcagccgacactttacaaacacggacttacttactcctgttattgccgtgcttgcgtgtagtaatgggtctgcacgtgttcgtgtggtgtgatttttgccgttgctcgccgttaatttttcttatcacctactgcccgctccttatctgtttcgtttctttctctctcacctctgcctgctgataatattatcctatcggctctcaaatgtcgcaacgtagtccattacacagacgttctatgaatcatattctagatgtattagcccgtgaatcgcaggggctacttatctctcacctcctcctccacgcacgacttctctgctgcgcagcgagataatatttgtctgtgcaaccactctcgaatatgtgtgcatgaatgaagctgctgacntcatccacatatggaattatgactgccacctgactgctcatgatnacatctcgcatagctgcacctgaacggtgtctcgactacattctgcaggagctacggcgcacgagctactcgtcagtgatagcgcgcgtacttcgtcgcgagtcgcgattctctctgcagagctattcgcatagcgctgctaactctatacattacagtcactatctaataatataaactgatcacactgcaccgcctactcctcggcttacgcacattctcgtcatttnatgagtagagctcagatgacatatcctagaccgccgtagcggatcgcatctgtgagtcgctcgatgtggtggacttncatgttatgtatcttgcattatgattaatcagctcagcatgacactctctacgaactcattcgttctgtacctccgctcttagctctctactctcgtcctatctgattgctaggcgactcggtatgcgagatcgatatntctatcacaatgaggcgtgcggcgctgtgatgatgtagtgatctctatcagctactgcatgctcatactact

SEQ ID NO: 4326 - DNA, 578 bp, Glycine max
  Peptide Sequence Number=SeqID_7722
  Probeset Number=SeqID_14105
ctggcgtgcatgttcggcagcttcagcctcgacaacaaggccatcaccttcacagaccccactgtcttcgagagcatcgcgcccgagtaccacctctccgctgttggcatcgacgccaacactggcatgatcgtgctggttgacagcaacaaggacttcgccctccgtgccgtgcttgtgcacaggagcgacttcaagatcaacggcgttcacttcggtgacgttctgacgatcgaggacggcgtggcggacaacatctacaccaacacgttcaagaacggcattctgcccttcattgactctgccaaggtgtcctccaacaaggcggtcgtcgcgtggtcggactacagcaacaacggcaggctcaccacggccatcatcaccgtggaccaggcggccaacctccactcctcgccgctctacgtcatcggccaggccctcgcgctgaagcagcttaacggctaccacgtcagcgtcgccggcctttcgatcgacgccttcggccagtacggcgccgtcgtgatcgaccgcaacaacgccgtcgacgccgccagcgcgggccacgtcgcgctcgtcga

SEQ ID NO: 4327 - DNA, 556 bp, Glycine max
  Probeset Number=SeqID_14106
gcggggaggtgatgaatagatggtgaaaatttttattgatcctggccacggaggaacggattctggagctagtgctaatggacttttggagaaaaatataacacttcaaatcgcgcttttattgagagacattttgattagtgaatatgatggggtttctgtccgcttaagtcgttcaactgaccaatccgtcactttgtcccagcgtacgaatgctgcaaacagctggggagctgactatttcgtgtctattcatattaatgctggcgggggcacagggtttgaaagctatgtgtatccaggcgtttcagcaccgaccaccacgtatcgcaacgcccttcatgatgaaattgtccgctcggttgattttgctaaccgcggcaagaaaactgcgaacttccacgttcttcgagaaacttctatgtccgctattttaacagagaatggtttcattgatacggcagctgatgctaataagctccgcaacgcaaccttccttcaaggcatcgctcgcgctcatgcaactggtcttgaagaagcctttcaattaaaaaaa

SEQ ID NO: 4328 - DNA, 509 bp, Glycine max
  Peptide Sequence Number=SeqID_7723
  Probeset Number=SeqID_14107
actcacaattctccctgctttcctaaatacaaacacacttattttttccattgttcatatctttcttcttcagagtctcccaatggctggtgttgaggttgagaaaacagttccaaacacagaagagaagacgacgacgaccgaggcaacaacgatcgagacgccgaaggaaaccgtccatgcagatgactcagccactgcggttgaagttgaaatcaaagaagatgaagaagaagcaccaaaggtagagaaagagactgaaaaaaccgagacagctccggttaaagaggagaaactggttgaaactccggcagctgtggaggagaaagatgttaagccagcggcagaagaggagaagactgttgaagtcaagacatcctaagatgcttgtctttctctctcacccatgagaggagaagactgttgaagtcaagacatcctaagatgcttgtctttctctctcacccatgagaacatttctgttttgtttaaatcctatatttccgcat

SEQ ID NO: 4329 - DNA, 754 bp, Glycine max
  misc_feature (153)..(153): n is a, c, g, or t
  misc_feature (297)..(297): n is a, c, g, or t
  misc_feature (601)..(754): n is a, c, g, or t
  Probeset Number=SeqID_14108
aaaagttgatctcactaagcaatgggtagtatatcacagccccagctgctgccatttccgttattgatgaatgggaattacacagcaagcacctttccttggaggctcccttccgacgatccaagcattcccacacccatcgagctatcttgncttaatctcttcctcacacaatccccacttcaagaagcatgctgagagtgatacttctggtcctgatgctgcaaaataaagctgaagaaatttgctcaaaggtttgctagaataattgaaaatttcaggaaagatcttgcaagncaaggcgggccccttgagagcctttcttccggcaaaattccgggaaaaggccctaaaaaaaatggggttcaaaaattttttaaaaaaaaaaaggggggaaaaaaggcaaccgccatccccttttggaaaggtggttctcttaaggggcgcctgaagagggggggacccccaaaaatttttgttaagggtttttttgggagaaaaattattttttgggggcccccaatggagagaggttttttcaagaggggagttgtttttttttaaaaaaaaaaaaaaaaaccccccccccccccccgggggnnnnnnnnnnnnnnnnnnnnnnnnnnnnnnnnnnnnnnnnnnnnnnnnnnnnnnnnnnnnnnnnnnnnnnnnnnnnnnnnnnnnnnnnnnnnnnnnnnnnnnnnnnnnnnnnnnnnnnnnnnnnnnnnnnnnnnnnnnnnnnnnnnnnnnnnnn

SEQ ID NO: 4330 - DNA, 1736 bp, Glycine max
  misc_feature (14)..(14): n is a, c, g, or t
  misc_feature (17)..(17): n is a, c, g, or t
  misc_feature (30)..(30): n is a, c, g, or t
  misc_feature (42)..(42): n is a, c, g, or t
  misc_feature (75)..(75): n is a, c, g, or t
  misc_feature (96)..(96): n is a, c, g, or t
  misc_feature (103)..(103): n is a, c, g, or t
  misc_feature (150)..(150): n is a, c, g, or t
  misc_feature (152)..(153): n is a, c, g, or t
  misc_feature (226)..(226): n is a, c, g, or t
  misc_feature (332)..(332): n is a, c, g, or t
  misc_feature (424)..(424): n is a, c, g, or t
  misc_feature (441)..(441): n is a, c, g, or t
  misc_feature (663)..(663): n is a, c, g, or t
  misc_feature (694)..(694): n is a, c, g, or t
  misc_feature (737)..(737): n is a, c, g, or t
  misc_feature (848)..(848): n is a, c, g, or t
  misc_feature (922)..(922): n is a, c, g, or t
  misc_feature (935)..(935): n is a, c, g, or t
  misc_feature (1096)..(1096): n is a, c, g, or t
  misc_feature (1125)..(1125): n is a, c, g, or t
  misc_feature (1151)..(1151): n is a, c, g, or t
  misc_feature (1363)..(1363): n is a, c, g, or t
  misc_feature (1526)..(1526): n is a, c, g, or t
  misc_feature (1614)..(1614): n is a, c, g, or t
  misc_feature (1684)..(1684): n is a, c, g, or t
  misc_feature (1703)..(1703): n is a, c, g, or t
  misc_feature (1736)..(1736): n is a, c, g, or t
  Peptide Sequence Number=SeqID_7724
  Probeset Number=SeqID_14109
ggtgtttgtgtgtnttntgggttgtggtgntgtgtggtcggngtgccgcgcctcttacatagtggtggtgtggtngtgtaagtcgcaggctgtaangtgaatngtgtgttcgactgtcgagctaaccgctctccacacaccgccgcgagnannacaattgaatatccacatatagagcggactaagtgctgctgaacacgacaggcggacacaaggaagaggcgcncatacctctctaccttagtccagtagtacgggagggcggagcacgaccccatacacacagtacgagcagcaatagtatgctggatgactcgcgcgagcgatatgantaatatgaggatagacgtaagcacaccgacacatatgaaagactcagcaagacaagaggagcgccacaaagtgatatatatatacgaagacncatcacatactattatngtataccactcacctgtgcacgatcgcagagcgcgagtgttggcgacgcatgtacacgctaatgcaacgacggatacagcaagacacacacggaataacgtatgtgaacacacatagctcgacgtgtgcttgcttactcctaccctcgacatacacgcgtgcgcatctcgccgcgtgcatcgcgcgcaccgcaccatctcgtcccccatagcgcactccgcncgtgtcattttctggcctctatcggtgatgnacgctctgcgtgtcggcgcgcgtgttcgcgatgtgacttaganatgtgtgtatcacatatcagacttgttactgtcgtacgagaagagccaagcacgcaatattaatcgcaacgcgaataatctgagtcttctgcccgtgcttctatcgtactnacatctctcgattcacactctctccacccgtcgccgggctcagtccgcgctgcttacgtcgagcggctgctcgntctctcgcactgnctcgcgcatgagcataagacgtgtcgacattcacctacactgtcacccactaatcactagcatacatcttctcctatatatatatgtctatctactagcgtgacgtacgatctctgtcggtgcgcgttcgcacagctctgctacgtctagcgcatgtcgcnacgagtgacagtatctactgtgtaccatnactccaaagttgaattgatactcaantataccggatgtttgacgcagacaataagtacactactactactctctacagtcatcaccggccactacatgtacgtatctgacgcagtcgtgacgatgatgattgtgatatagttgatggataagaacgatacgacacacaatgctacgcacgcacgcccgtacactcgcgttgtaatcagtcgcatcaacgccgcttgtctcgccggccngcatctatcacatcaccctactactaatcagtcatccgtattctgtatctcgttctgcactctacatcgacatccttgtcgtcgatctggtacatcaggcacagacgagatagcgccacgacgcgagtgtgcgcagtcgctcgccatcacgcgcgcatatggntcgcgtcacgagcgacgctatcgccgccgagcttgcgtctcctcgcgcgtcaatcgagtagaactacgcatttgacgatcgcgtctcncgtattaacttactaccctcagcacttgttgtgtgtgtacgtctcggagacagcaacgagacgcgagcanatagtgcatgcgcgtgcanctcgctacgtggcagaactaagtcgcgagagan

SEQ ID NO: 4331 - DNA, 1967 bp, Glycine max
  misc_feature (31)..(35): n is a, c, g, or t
  misc_feature (37)..(37): n is a, c, g, or t
  misc_feature (39)..(39): n is a, c, g, or t
  misc_feature (41)..(43): n is a, c, g, or t
  misc_feature (46)..(47): n is a, c, g, or t
  misc_feature (49)..(49): n is a, c, g, or t
  misc_feature (59)..(59): n is a, c, g, or t
  misc_feature (61)..(61): n is a, c, g, or t
  misc_feature (65)..(68): n is a, c, g, or t
  misc_feature (85)..(85): n is a, c, g, or t
  misc_feature (87)..(89): n is a, c, g, or t
  misc_feature (99)..(100): n is a, c, g, or t
  misc_feature (103)..(104): n is a, c, g, or t
  misc_feature (148)..(148): n is a, c, g, or t
  misc_feature (150)..(150): n is a, c, g, or t
  misc_feature (264)..(264): n is a, c, g, or t
  misc_feature (268)..(268): n is a, c, g, or t
  misc_feature (388)..(388): n is a, c, g, or t
  misc_feature (440)..(441): n is a, c, g, or t
  misc_feature (525)..(525): n is a, c, g, or t
  misc_feature (531)..(531): n is a, c, g, or t
  misc_feature (689)..(689): n is a, c, g, or t
  misc_feature (745)..(745): n is a, c, g, or t
  misc_feature (763)..(763): n is a, c, g, or t
  misc_feature (801)..(801): n is a, c, g, or t
  misc_feature (806)..(806): n is a, c, g, or t
  misc_feature (812)..(812): n is a, c, g, or t
  misc_feature (815)..(815): n is a, c, g, or t
  misc_feature (824)..(824): n is a, c, g, or t
  misc_feature (832)..(832): n is a, c, g, or t
  misc_feature (847)..(847): n is a, c, g, or t
  misc_feature (874)..(874): n is a, c, g, or t
  misc_feature (969)..(969): n is a, c, g, or t
  misc_feature (999)..(999): n is a, c, g, or t
  misc_feature (1030)..(1030): n is a, c, g, or t
  misc_feature (1041)..(1041): n is a, c, g, or t
  misc_feature (1117)..(1117): n is a, c, g, or t
  misc_feature (1122)..(1122): n is a, c, g, or t
  misc_feature (1131)..(1131): n is a, c, g, or t
  misc_feature (1148)..(1148): n is a, c, g, or t
  misc_feature (1178)..(1178): n is a, c, g, or t
  misc_feature (1193)..(1193): n is a, c, g, or t
  misc_feature (1232)..(1232): n is a, c, g, or t
  misc_feature (1270)..(1270): n is a, c, g, or t
  misc_feature (1324)..(1324): n is a, c, g, or t
  misc_feature (1345)..(1345): n is a, c, g, or t
  misc_feature (1356)..(1356): n is a, c, g, or t
  misc_feature (1396)..(1396): n is a, c, g, or t
  misc_feature (1422)..(1422): n is a, c, g, or t
  misc_feature (1427)..(1427): n is a, c, g, or t
  misc_feature (1453)..(1453): n is a, c, g, or t
  misc_feature (1465)..(1465): n is a, c, g, or t
  misc_feature (1471)..(1475): n is a, c, g, or t
  misc_feature (1498)..(1498): n is a, c, g, or t
  misc_feature (1527)..(1527): n is a, c, g, or t
  misc_feature (1538)..(1538): n is a, c, g, or t
  misc_feature (1544)..(1544): n is a, c, g, or t
  misc_feature (1548)..(1548): n is a, c, g, or t
  misc_feature (1566)..(1566): n is a, c, g, or t
  misc_feature (1584)..(1584): n is a, c, g, or t
  misc_feature (1587)..(1587): n is a, c, g, or t
  misc_feature (1590)..(1590): n is a, c, g, or t
  misc_feature (1603)..(1603): n is a, c, g, or t
  misc_feature (1608)..(1608): n is a, c, g, or t
  misc_feature (1644)..(1644): n is a, c, g, or t
  misc_feature (1649)..(1650): n is a, c, g, or t
  misc_feature (1685)..(1686): n is a, c, g, or t
  misc_feature (1695)..(1695): n is a, c, g, or t
  misc_feature (1704)..(1704): n is a, c, g, or t
  misc_feature (1707)..(1707): n is a, c, g, or t
  misc_feature (1719)..(1719): n is a, c, g, or t
  misc_feature (1724)..(1724): n is a, c, g, or t
  misc_feature (1728)..(1728): n is a, c, g, or t
  misc_feature (1752)..(1752): n is a, c, g, or t
  misc_feature (1771)..(1771): n is a, c, g, or t
  misc_feature (1773)..(1773): n is a, c, g, or t
  misc_feature (1817)..(1817): n is a, c, g, or t
  misc_feature (1823)..(1823): n is a, c, g, or t
  misc_feature (1830)..(1830): n is a, c, g, or t
  misc_feature (1887)..(1887): n is a, c, g, or t
  misc_feature (1910)..(1910): n is a, c, g, or t
  misc_feature (1916)..(1916): n is a, c, g, or t
  misc_feature (1962)..(1962): n is a, c, g, or t
  Probeset Number=SeqID_14110
ggaggataggggtgagtagagagaagagggnnnnntncncnnnganncncgcctaatcncncgtnnnncgctcccccccaccccncnnnccccccacgnnccnnggcccacacaaccagcgaagccgggcaagcgacgagactgacgncncgaataaaaatggaaagcataaagtgggagagcaggggagaagagagcgccatataacacagcccacgcacagaaaaagaaagagaggatggagccaagccgcgcacgggcganggtncgttgtattagtggggtgcgcggggtgcaggcggcgggggttcgtgtgtgttctcttctcttctctccactcctgagcgaagaggtgtatatgctctggagtgtgtgatatgtcgaggangatggtcaggaacacacagaagatctccacaggggcggaggtagggtgggcnngcgatagagaggagagagagacagacgaacacataaatcgataatataacgatcacaacaacactcagaaatatatacgataanttgatnagtcatacagcactaacacatacaactcatatctatcactttatcaattcatagacataaatgatctgtctgtgtgtgcgcgatctctctcacgcgcctcgactatctccgagcacgccgacatatcacgcgagtctcagcagcgtctccgctacctnctgtggctcgatgggtcaatacagactgtgtagagttacgatgtggtgtagatggntgtttgctgttatgaatnttgtgtgtagtatagtgagatgtagtgaagagtgtgangatgnacatangtnattatgtgntatgtcgntgtggcgcgagtgtngttatgcgaaagcaggacgccggacgncgcaatcgtacttaagtatatatatgatagactatcacatgagagtgatgataacgagtcgtgaatggtagataagcgagaggctaggttacagnatgcatgcataacacagcagtgtgaacgantatgtgtcgcactagcaaacatcgatcaganaacacggagantgtgtcgtagtgtttgtgatgatctactagctactgcgcgcacatctagtactggtatctatagtgacgtatgtanacgcnccgatgatnttctcagcgacgtgcgncttcattggcgacgctgtgcgcacactgantgtgagcgtgactcnggcgatgcagcacgacgacgctagagtgagagatgcatngtgaatgaacgtacggtgtgagcgtacgcctcgctgangcgtgatgagttcaccactgctaccgatacacgcttcagacaacagctacatancatatgtgcagacgtagcgcnatactgcatanatatcacatcaagtagtggacgtgctgtcgagacgtgctncgtcgtgtgtctgtcgacgtcactcngtcgngatcgactgcgcagcgcactgtcctnctacgttcagcntgtcgnnnnntgtcgctgcgtacgatactcggncgaatgcgagtcgacgtaggcgagctacntaatctaaaantactcngggntgctgcagctacgagcgncagcaaatgggtgatctnatnatnatgatgagtagancgatngatagtgagtatctatcgactgacgcgtgacggtantaggnngtacgtggcatgatgcgtcgctgactagtgagtcnntcagctgcnatcagctcntcnaactcatgtcgnatatnggtncgccgtccttactactataaaagnacacagcagctaacgacancnctcgagaggatatattaatacgtagtgcacgtgtgtacggctgntacgcngcatgcnacctccacatcactagtctgcagcgtgacaaatgtttcacgctactgtgcgatggtncgacgtaaactatagtgagactncacacnatactagcagtacattactactagttagagcctatctgctgctagnagaca

SEQ ID NO: 4332 - DNA, 1664 bp, Glycine max
  misc_feature (144)..(144): n is a, c, g, or t
  misc_feature (727)..(727): n is a, c, g, or t
  misc_feature (766)..(766): n is a, c, g, or t
  misc_feature (981)..(981): n is a, c, g, or t
  misc_feature (996)..(996): n is a, c, g, or t
  misc_feature (1069)..(1069): n is a, c, g, or t
  misc_feature (1234)..(1234): n is a, c, g, or t
  misc_feature (1280)..(1280): n is a, c, g, or t
  misc_feature (1293)..(1293): n is a, c, g, or t
  misc_feature (1594)..(1594): n is a, c, g, or t
  Peptide Sequence Number=SeqID_7725
  Probeset Number=SeqID_14111
gtgatgtcccctccgctctctagtcctatacgatgtcggctgatatagtggaggtgaggtcaagagagaggagtgtaatgttgttcttttattcgttgttagaccacagacagcgtcggcgtcggagtagtgttctgggtccancggatatgtattaacgacgcggcactatctagtctactgcaactaactataagtttcttggtagtggggcacatgacggtgacagcaacatagaggttgtgtgtggcgggcaggagcgaccctcgtggagagggtctcatattaatcagaggcgagacgctgttggtctaataagatatgaatgacgtcatattaatgtgacatattaattcgacccgcctcgcgccccgtacatctcgccgcggcgtcttattgttgatgagtttatttataaggcgatctcacagcgccacacccgccagtcgcacggagtatggcgcatgtagtgtattatgtatacgaacattctctcgccacgcccgaccgctagctattatatactaggcagggtagagcacaacgcatcaacgtaactacatagcgtgcgagaatgggaccgatatagcggtaggcgacacgacagatgagtcgagtatataagtgaggcgttggtcgatcgtacgtaagtgagtgcgcgctgtgtgcgttgtagtgggtgagtcggtctccactacccgacgttctaatcatttattatatatantagactgattagagcgcggtggcgtgaagcaccagtcgntatatattacgtcctgctacatctgcagtgatagcggcgccgacggcttcgttaatgtttactttcgtgtcttgtttatgcgctgcttcttcgtctctgataactaatcacactatgttcgcgcagtatgtgcggcgcgtcacacgcattatataccgcctactcgtatattgttattggttcaatgtcgatgatcgcgccgcgagatcgttccncatatttctcccgcntacaccattaaaacatatataaacaacacgagctgtgctgctggtagtatagcgaagaggccggcgtgcggantatatgacgaatgtgatgtagcacactctagacctaacagatggcgcgaaacgcgttatgcacacagacacatataaatagcgcgcacggtgctgtagtcttctgcgactttatatacaacatgttacgtgatctcgctcgcgtcgatgcggacctcactgctgncctcattagtatcaatacccatacacacggcgatggtgtgttgttnaccgcatgataantaatagaatatctcttcgtccaacaatgatcacttcagatatttcggcggcgtcgcatgtattctattagcgcgcgtcggtcagatgatcgtctacgctgttcatgtatatatatgttcatgcgtgcgtccgcgcgtcaatgtggtagtaatgtatggaatgaggcgagatacgagctcgaaataattagactgtacgcgaacatgtaattatcatatgcgaatgcgcgcggtgtgtgatatgtgcgacttctgaattatgtcagatatgttctcttatgacgatgaattcgaatgcgctnatgactacagatgactagtgtacgcacatatagctactatccgttgtatccgacactgatgcggcacgcg

SEQ ID NO: 4333 - DNA, 436 bp, Glycine max
  Peptide Sequence Number=SeqID_7726
  Probeset Number=SeqID_14112
aaagataatccgtctgcatattgcacaagctgaaaggaaggcggggaatgcatgctgggaggcgtattggctatatcatggaaataaccctgatggctccatgcctagagatccctgattgggggtagctcatgatgctggctacacctacttcatcgatacgggatccggcaagcatgtgccgagggctttattcgttgatctggaacctagggctattgatgaattaagaactggtccttacagactactcttgatccctgatctacttatttctagcaaggaatacgctgctaataacttcggaaggggacactacactgtcggaagagacatagacgaactatggcttgatcgtatgccatgaatatcagacaactgcacgggttagcaaggattcttgggtatcacatgctgcggtggtacgtctggcccg

SEQ ID NO: 4334 - DNA, 711 bp, Glycine max
  misc_feature (418)..(418): n is a, c, g, or t
  misc_feature (454)..(454): n is a, c, g, or t
  misc_feature (460)..(460): n is a, c, g, or t
  misc_feature (463)..(464): n is a, c, g, or t
  misc_feature (469)..(469): n is a, c, g, or t
  misc_feature (471)..(471): n is a, c, g, or t
  misc_feature (477)..(477): n is a, c, g, or t
  misc_feature (485)..(485): n is a, c, g, or t
  misc_feature (489)..(489): n is a, c, g, or t
  misc_feature (495)..(495): n is a, c, g, or t
  misc_feature (503)..(503): n is a, c, g, or t
  misc_feature (508)..(508): n is a, c, g, or t
  misc_feature (510)..(510): n is a, c, g, or t
  misc_feature (518)..(519): n is a, c, g, or t
  misc_feature (522)..(522): n is a, c, g, or t
  misc_feature (527)..(527): n is a, c, g, or t
  misc_feature (530)..(532): n is a, c, g, or t
  misc_feature (535)..(535): n is a, c, g, or t
  misc_feature (537)..(537): n is a, c, g, or t
  misc_feature (539)..(542): n is a, c, g, or t
  misc_feature (544)..(544): n is a, c, g, or t
  misc_feature (546)..(549): n is a, c, g, or t
  misc_feature (553)..(559): n is a, c, g, or t
  misc_feature (562)..(573): n is a, c, g, or t
  misc_feature (575)..(575): n is a, c, g, or t
  misc_feature (577)..(580): n is a, c, g, or t
  misc_feature (583)..(583): n is a, c, g, or t
  misc_feature (585)..(586): n is a, c, g, or t
  misc_feature (590)..(595): n is a, c, g, or t
  misc_feature (600)..(605): n is a, c, g, or t
  misc_feature (607)..(607): n is a, c, g, or t
  misc_feature (610)..(611): n is a, c, g, or t
  misc_feature (613)..(620): n is a, c, g, or t
  misc_feature (622)..(626): n is a, c, g, or t
  misc_feature (628)..(631): n is a, c, g, or t
  misc_feature (633)..(640): n is a, c, g, or t
  misc_feature (643)..(643): n is a, c, g, or t
  misc_feature (645)..(647): n is a, c, g, or t
  misc_feature (649)..(652): n is a, c, g, or t
  misc_feature (654)..(656): n is a, c, g, or t
  misc_feature (660)..(660): n is a, c, g, or t
  misc_feature (663)..(663): n is a, c, g, or t
  misc_feature (666)..(666): n is a, c, g, or t
  misc_feature (668)..(669): n is a, c, g, or t
  misc_feature (671)..(673): n is a, c, g, or t
  misc_feature (677)..(677): n is a, c, g, or t
  misc_feature (679)..(679): n is a, c, g, or t
  misc_feature (681)..(689): n is a, c, g, or t
  misc_feature (693)..(693): n is a, c, g, or t
  misc_feature (695)..(698): n is a, c, g, or t
  misc_feature (700)..(700): n is a, c, g, or t
  misc_feature (702)..(711): n is a, c, g, or t
  Peptide Sequence Number=SeqID_7727
  Probeset Number=SeqID_14113
attgggtacccgggccccccctcgtcgaaggattcgggttcatgtacacgcgacgcgcccgggtggaagcccgcgctcaaacgtaaaatcctaatgagcgcgctccgatttgggttcaagcgcgccgatcgggtttggttcatgaatcaggacgacatgaaggattcgatccgcgagaacgcgatcaagccagaaaaggccgtcttcatccgatcgtgtggggtcgattcgtccgagttttcgcccgacgccgtgcccgacgaagcgttggcggccttgcgcgccgagttcggcgcgaccggagacacccggttcgttgtctgcgttggccggatgacgtggcaaaagggcgtgcgtgagtttgtcgaagcttccaagatcgtcggcaagaccgtgcccggggccctgttcttgcttntgggtgaaatccaaaaagacagcccggacgttgttnatgaanctnnttacncnatcccnaacccgantttngttggntggacttnctaancnacttctgnnctnttganatnnncgntntnnnntntnnnnttannnnnnntgnnnnnnnnnnnntntnnnnttntnntttnnnnnnttttnnnnnntnttnntnnnnnnnntnnnnntnnnntnnnnnnnnttntnnntnnnntnnntttntgnttntnntnnntttntntnnnnnnnnntttntnnnntntnnnnnnnnnn

SEQ ID NO: 4335 - DNA, 418 bp, Glycine max
  misc_feature (290)..(290): n is a, c, g, or t
  misc_feature (301)..(302): n is a, c, g, or t
  misc_feature (306)..(306): n is a, c, g, or t
  misc_feature (309)..(309): n is a, c, g, or t
  misc_feature (311)..(311): n is a, c, g, or t
  misc_feature (318)..(318): n is a, c, g, or t
  misc_feature (321)..(322): n is a, c, g, or t
  misc_feature (358)..(358): n is a, c, g, or t
  misc_feature (366)..(366): n is a, c, g, or t
  misc_feature (369)..(370): n is a, c, g, or t
  misc_feature (372)..(373): n is a, c, g, or t
  misc_feature (395)..(398): n is a, c, g, or t
  misc_feature (401)..(402): n is a, c, g, or t
  misc_feature (415)..(415): n is a, c, g, or t
  misc_feature (418)..(418): n is a, c, g, or t
  Peptide Sequence Number=SeqID_7728
  Probeset Number=SeqID_14114
gagttggtattgccaccggtgttcgattactgtagaaaggttttggaggcgggagatcaaatagttgcgagggatttgtactgggaagctgtttgtgagggtggtagcaaggcggaagacttgttgctggagtctatagaaaaagacccgtttgttggagagccatatgtggtgatgagtcaggttgatttgacataagatagattcgaaggatgttgactgcacacctgatagggacgttagtctcatggcgaatgagttaattctgtatttcttcaataattccctcntatgctgaaanncatnttntntgctttnttnnttttcttttattacctttttttctcttcttctcttntccttttnctnncnntttttttttctctctttttttnnnnttnntttcttctccttnctn

SEQ ID NO: 4336 - DNA, 346 bp, Glycine max
  Peptide Sequence Number=SeqID_7729
  Probeset Number=SeqID_14115
gaagaacctggtggtaaagaaatcaccttgaagagagtgctctttaataattgccaggaggcttttgaaggtgcttaatgtcttacggaggaactaaaaggggtgactgaacctgatcggaagatggagcgtactgacaagggaaggctgctcaagctacgtacccttggaaatatccgtccaattggtgagctatagaagcagaagatgggtcctgaaaagattgaccattacattgatcacgagctcgtaggattcccatacagcaaatcttgcccaggcgacgaaaatgacgaagccatatgtcagtacttcaatactatttggaagcatttccgatgaaagt

SEQ ID NO: 4337 - DNA, 2060 bp, Glycine max
  misc_feature (1)..(147): n is a, c, g, or t
  misc_feature (1978)..(2060): n is a, c, g, or t
  Peptide Sequence Number=SeqID_7730
  Probeset Number=SeqID_14116
nnnnnnnnnnnnnnnnnnnnnnnnnnnnnnnnnnnnnnnnnnnnnnnnnnnnnnnnnnnnnnnnnnnnnnnnnnnnnnnnnnnnnnnnnnnnnnnnnnnnnnnnnnnnnnnnnnnnnnnnnnnnnnnnnnnnnnnnnnnnnnnnnnnggagatatatttaaatattccaggttcgtccttgactctacaacattccattttcataggaaaagccaaaactgaagctcgaggaagataactacgatgaaacaagaggaatggatgattacgacagcgttgcttcgtgctgtttgtatggaacccaaaactgaagcgcgaggagctaaaagtagcaacgagggatgagagaacaagaggattggaggattacgacagcgctgctaacgttgttgttggtgtttgtttcttcttttccggcgttgagttacggagttgttcctcctcgtactctgctcaataagctgtctcagggcagttatctcaccactcaggagcaatggttcaatcaaaccctcgatcacttctctccctatgatcaccatcaattccgtcaacgttactatgagtttctagactatttccggattcctgatggaccaattttcttggtaatcggtggtgaaggtccatgtaatgggataacaaatgactatattggtgtactggcaaagaagtttggagcagctatggttactcttgaacatcgctactatggaaagagttccccatttaattctttggagacagaaaatttgaaatatctttcatccaagcaggcactctttgatttggctgtttttcgtcagtattatcaggattccttaaatgcaaagcttaatagaacaaaaactgaaaacccctggttcgtttttggtggttcatatgctggagcactcagtgcatggttccgtcttaagtttccccatttaacatgtggaagtctggcaagttctgcagttgttcttgctgtttataactacacagaatatgatcatcagattggtgagtcagcaggtgctgaatgtaaagtagaattacaagaaactactcaactcattgagcacaaacttgcaaccactggaaaggaaatgaaggcctcttttgatgcaggtgatctagaaacagatagaggactttgttgatttcttagccgatacttcttgctatagcatttcaatatggacatcttggtactgatgggcagacatatgatcagcaagtacttggaaagaactgctatggatcgtggacaattcaggtcgattaatactacattcgagattaacgtgaaaatgagtactctaatgtcaaagggaaccccaaaaaacttacgctcgatgaaaactataagtatacaacgtgggattttagaccaagaggataggaggattattacaggcggtgttctctttgttgatggtgtttgcttcttaatttttccgacggtagagcaatcggagttgcttccttctcgtactatagctcattaatgctgtctcagggatgcttagtccaccactctacggagcaatggtacattcaaacctccaatatacttttttcaaatggtacacatgttccttcgcgccatgcctccaaacaatctccatcaattcatatgccttactacaacgttaattgttaaaattgtgcccactgttctgattgtggaggatgtcttcaatttcatttttccattgaaggtaatgagaaaaacttgcacctctcctgatgcagttcacaaagtaaggcaaaagatttcagaacatatggacttgtggttatctgaatgcgtcgaaggcagaagttttatatgatcactattattttaacctcgcacgatgtgaatgatgtaataatttactataacttatttcatccttcataagcattatatatttataaatagatataaaaaaaaaaaaaaaaaaaaggagtataggacccgtgagggggagagctgagaaatgaaatttannnnnnnnnnnnnnnnnnnnnnnnnnnnnnnnnnnnnnnnnnnnnnnnnnnnnnnnnnnnnnnnnnnnnnnnnnnnnnnnnnn

SEQ ID NO: 4338 - DNA, 1946 bp, Glycine max
  misc_feature (1)..(1): n is a, c, g, or t
  misc_feature (59)..(59): n is a, c, g, or t
  misc_feature (102)..(102): n is a, c, g, or t
  misc_feature (153)..(153): n is a, c, g, or t
  misc_feature (211)..(212): n is a, c, g, or t
  misc_feature (259)..(259): n is a, c, g, or t
  misc_feature (363)..(363): n is a, c, g, or t
  misc_feature (373)..(373): n is a, c, g, or t
  misc_feature (388)..(388): n is a, c, g, or t
  misc_feature (390)..(390): n is a, c, g, or t
  misc_feature (395)..(395): n is a, c, g, or t
  misc_feature (427)..(427): n is a, c, g, or t
  misc_feature (436)..(436): n is a, c, g, or t
  misc_feature (451)..(451): n is a, c, g, or t
  misc_feature (482)..(482): n is a, c, g, or t
  misc_feature (513)..(513): n is a, c, g, or t
  misc_feature (538)..(538): n is a, c, g, or t
  misc_feature (550)..(550): n is a, c, g, or t
  misc_feature (552)..(552): n is a, c, g, or t
  misc_feature (567)..(567): n is a, c, g, or t
  misc_feature (603)..(603): n is a, c, g, or t
  misc_feature (677)..(677): n is a, c, g, or t
  misc_feature (679)..(679): n is a, c, g, or t
  misc_feature (766)..(766): n is a, c, g, or t
  misc_feature (812)..(812): n is a, c, g, or t
  misc_feature (817)..(817): n is a, c, g, or t
  misc_feature (848)..(848): n is a, c, g, or t
  misc_feature (901)..(901): n is a, c, g, or t
  misc_feature (972)..(972): n is a, c, g, or t
  misc_feature (1158)..(1158): n is a, c, g, or t
  misc_feature (1266)..(1266): n is a, c, g, or t
  misc_feature (1367)..(1367): n is a, c, g, or t
  misc_feature (1400)..(1400): n is a, c, g, or t
  misc_feature (1726)..(1726): n is a, c, g, or t
  misc_feature (1758)..(1758): n is a, c, g, or t
  misc_feature (1767)..(1767): n is a, c, g, or t
  misc_feature (1789)..(1789): n is a, c, g, or t
  misc_feature (1824)..(1825): n is a, c, g, or t
  misc_feature (1827)..(1827): n is a, c, g, or t
  misc_feature (1845)..(1845): n is a, c, g, or t
  misc_feature (1887)..(1887): n is a, c, g, or t
  misc_feature (1894)..(1894): n is a, c, g, or t
  misc_feature (1921)..(1922): n is a, c, g, or t
  misc_feature (1924)..(1924): n is a, c, g, or t
  misc_feature (1926)..(1926): n is a, c, g, or t
  misc_feature (1928)..(1928): n is a, c, g, or t
  misc_feature (1946)..(1946): n is a, c, g, or t
  Peptide Sequence Number=SeqID_7731
  Probeset Number=SeqID_14117
ngtggcgcagcacactgcatgagacgtagctactgacatttactgtctcagactgacancgcagctgtgcagagtagctatcactgcttcacacgtcgatcngactagtctggattcagatgatcagtctcgtcaccgctctcatgcgtggcncatcacagcatgcgcgggaccaggctcacctgcgatctatctgctgcgtgagagcatnnctgactagcacacacggcaggacgtgtcgcatagtcgagtgccacgncgtagtggacgcagagtcttctacgttcatgcaactgggcagatacatacacacatgcagtgggtcagacacagtgtcgcatagatgtagagcatgatcgctancatgtgtgantatagaatcatatangngacanagatggacgtcactacacaatcagtagtaggnctacggtantcaaagcatgtatantaatgatcagtgcaagagacgcaggagcagnacatgcatgcagagagtcgatagtgagacgncgacataatgtggtagtgtactctntgtacacagtantncgcgagtgatgtgantcattggacactgtcaatacagcatcatgtaagatntacgttgtgatatccatgtaggagacagaattagacggcgagtgcagagaagcagaaagagaacacgcacacananactcattgtaattgatatgatgtagttgagtgtgagcatcatacacgtcgacgacagaatatgcaatatcagacgcacggtggcggnaactgtctcttctgcatactatctagcatagtcatcacacctcacnatcantgcacgcgacgtcacacgatgatgacactangagccgacgagaatatgatagatcagtagcgtcgtatgatgtggagtactagnggcgagctgtggcatacgtacgagagtaggatgtgtgaggtagtactatattcggagtgacgcgatcatancagctctcttgcactgtgacatgatatatgtagtcatgtgatctatgagtgagtcagcagcagtaggtgagtgtcgtgtgatacattatagactgagctcccgtagcgctgcacaatgtcagaatagcagtgcctcgtactgtgactgtcggaagtagagatgatgaggacgacagagatatatanatatttctgtgtaaagttctgtgtgcgtaacttatctattgatactaaaggctgatattagtgtttcataatagattctgtgtgtgcgcgttggaatcgtctgtcttnggtactgagtattaagtatcattgttcctgtacatgaattattaatatcttctcatcttgtgtagcatatattgcagtcgctcgctctcttgtactcgatntcttgtgctgtctcaacctattgtagtgtgcangctgtagagttgaagatgtgtctatagacggcactctcacacgctgcagatatatacatgtaacaatttatagatatatcattatattcttctctgaagcgtgtcgtgggggtgtctgtgcagtgtcgtcgatagttatatcaactctttctcaataactaggatcagtagacagagggacgtgagtcagtgatagagagttgtatgattaataacatatataattataatgactgactatattacacactcctcttgatcaagtagtctgagtcgaggtgcatgtagtagcagggctcaatgtataggtgtgagcgagacataantagtgcgatgctagtgatatggtacgtggagngctgctatntacgcagggtcgaggcggctgnggggggggagagcggtggtgtaggggggggtgttnntnattcgtgttataatctcntcatctatgttgttgattacattaccttctaggcgtgcctgnttattgnttcattaaaaaataaataataaaaaanntntntntactcactaatactacan

SEQ ID NO: 4339 - DNA, 521 bp, Glycine max
  misc_feature (508)..(508): n is a, c, g, or t
  Probeset Number=SeqID_14118
atagaggaacgagcccaatcccgattcctactccgagacaggtgtacggcgggagcgggaggaagcgccggcgatggcgaccccggcgaaggaggaggcggcggcagggcagagagacgagctcgccgactcgctgtccgagctcttcaccaacgtctccctcatggtccgcggcgagctccagggaaccaacaaccagctctcgctgcttgaaaagatgaaccaacgcgtgacagaggagtacagtaaccacggagatgttgcatccggtctgcgggtctttgtagaacagctgaacgagaaaaaccaacggtttgacgagtacacaacgcagatcgacgcgatagaccagcaggtgagtgagtttgaggcagtggtgtccatgcttgataagcatgtctccctcttggagaagaaagtgaagtccgcatatcacattgctcccacacaatgattcgtctcccaagcatgttgtatatcatccctatcatcttctgtattctctacnataattgagcata

SEQ ID NO: 4340 - DNA, 554 bp, Glycine max
  misc_feature (6)..(6): n is a, c, g, or t
  Peptide Sequence Number=SeqID_7732
  Probeset Number=SeqID_14119
tttttnttttttttttttttttttttttttttttttttttttttttttttttggacaaaataatagttaatttaaaattatgttaggaaatgttataacaatattctataaaaaaaaatttgcatactcagcaaccctagaatagtccttattcaaacacactttccacatcctcggcaaccctctggcgaataccccatcgcgctttcctaatccttacctttattctgtcttgccacaaaaggcccacaaacgaaatcccccaccatgacaaaaagccaataaagccgaacaaacgaggacgacaccacccagtggggcagcaaaggatcccacacccggacgcaggggggcagcaaaggaccaggcaggaggacgcaggggtgagaaatcagaaaaaaaaaactcggacgaagcaagcaagagacaactaattaataaaaaaaagaaacaaaaacggaagaaccaagaccaggcggcagcacgaggaaactaattaattaattaaagaaacaaaaacgaaatttcagtgtctatgccgcaatacctcgcgc

SEQ ID NO: 4341 - DNA, 1449 bp, Glycine max
  misc_feature (76)..(76): n is a, c, g, or t
  misc_feature (249)..(249): n is a, c, g, or t
  misc_feature (556)..(556): n is a, c, g, or t
  misc_feature (589)..(589): n is a, c, g, or t
  misc_feature (1241)..(1241): n is a, c, g, or t
  misc_feature (1342)..(1342): n is a, c, g, or t
  misc_feature (1417)..(1417): n is a, c, g, or t
  misc_feature (1427)..(1428): n is a, c, g, or t
  Probeset Number=SeqID_14120
taagacgtggtagtcatcgtgcactagtaatcataacttatgtgagtatacacataacaattaagtaatcccgcgnatagcaccacccaccacacttgggtaccttcgctcggcacgctcgtcgcgcatcgcgcgacacactcacatgtgtacgtgtctgttagtagggtaggtagtgcattacgagatcacatagagcgtaacagcatacagtacatgatactggagcatagatactatctagatgtntatcgtccgtcctctgtcgcagcgcacaggttatccacatttaacaggagagacatgatatctggtatcaaacaggagtatctattgtgatagatgtagtgcatcattctgatcaagggtaagagtagtaaatatcacgaagtatgaatatattcgctcggagttcactcagatattaatctctagctctcctcaccgccaagtggccgcgaccagccctactgtcgctagttgtggagtagtaacgcagcaaagatactctcactgcattcgatcagatgcgactcggtagtggtcgggattaatncttcaaacaacaaccacatgcaccggagcacangaacgtctagtcgctcgctcgctggctacgtacagcttgtgttagattcgcgccgtgtagatgaggttaagtacataaaactgatcacaacaactaagagacgacggtaataaagcgacagacaaatgcgcgcgagcgtcgagacgcgcggcgtagggagggaaagagaacagatacgataggaagataggtgatgatcacgtagatgtagatgagtgacatagtgaggtatgtaaatgaatatgagttagatataatagcctacacgactctttatatggatatagatccgcaggtgagaaagacaatagaatatagcacaagacgtaatttataatagtgatgaaaaccccgacacgagtgatgaaatagtgataccagaaacataggcaaaaaaatcaaacgggaaagtcacagtacagacgacgcaacgatgttgtaacaaccccctgacctctcgcctagttcgcgccaccggcgccgccctgctgttagttgtttgcctcactctcgtttctccctcctcgttttatttgatatatttttgtcttaagacgatagacgaagataattagagtacatagatatttacatcacccctcgcccgattgtcgagccgagaaccacacgggggttagccttgttatattangttttcatccaatatatattgctgatattagtattttatgagcaccgcaaatacgctgggggatagggtatcacgttcgctgtctggtcgtggtgctggtntgctctctttgtgtttacttgatattatttcttgttttttatttcatctattttgtatcatatgtattcgtattnttgtgttttnntgttttgtgtggtaatctctt

SEQ ID NO: 4342 - DNA, 700 bp, Glycine max
  Peptide Sequence Number=SeqID_7733
  Probeset Number=SeqID_14121
gcaccactgggccctgatcatctctttcctctattataagccatgtacattatcagcacctggagaacacatgtttgactcctgctggggaggatcaatctcaacactggacttcaactcagaccccgacaagaccatcagaccaacaccatggtaccatgctgagaaggtctgttgggtacgaatcaacgcagcccctccacccgtgaatgcggaacaccgagtggcagggtctaaccctgaaactgggatagtgaacaaggggtggagaccagaaggtacaccaggggcaggggcgaccttgaggaagtatgtggctgcacgcacttgcacatggagattccatgaacagtacccttgcaccaaactgttgtagacaaggctgatgctacccacactgtcatcaacctttcataccatgaatgggctgaccctcaacaagagcgcacgcctcgacattatctttcatccactacagcatgcattgctagaggaggcatctcggatcgccaaagcacaggcagcagacattggcaaccgatacacagagccagtgattctgtacaccaaaaacacccaacagggaacgaaggagatgccataacgcgagagctcggatattaccggccaaagtcaacgggaagtcaatgcgtcgggtgggcaatgcacgaaacgctaccgctgagccctgatgaagggc

SEQ ID NO: 4343 - DNA, 1428 bp, Glycine max
  misc_feature (1)..(1): n is a, c, g, or t
  misc_feature (8)..(8): n is a, c, g, or t
  misc_feature (105)..(105): n is a, c, g, or t
  misc_feature (123)..(123): n is a, c, g, or t
  misc_feature (270)..(270): n is a, c, g, or t
  misc_feature (360)..(360): n is a, c, g, or t
  misc_feature (499)..(499): n is a, c, g, or t
  misc_feature (590)..(590): n is a, c, g, or t
  misc_feature (640)..(640): n is a, c, g, or t
  misc_feature (696)..(696): n is a, c, g, or t
  misc_feature (705)..(705): n is a, c, g, or t
  misc_feature (719)..(719): n is a, c, g, or t
  misc_feature (800)..(800): n is a, c, g, or t
  misc_feature (967)..(967): n is a, c, g, or t
  misc_feature (1012)..(1012): n is a, c, g, or t
  misc_feature (1213)..(1213): n is a, c, g, or t
  misc_feature (1291)..(1291): n is a, c, g, or t
  misc_feature (1328)..(1328): n is a, c, g, or t
  misc_feature (1367)..(1367): n is a, c, g, or t
  misc_feature (1402)..(1405): n is a, c, g, or t
  misc_feature (1407)..(1408): n is a, c, g, or t
  misc_feature (1411)..(1411): n is a, c, g, or t
  misc_feature (1419)..(1421): n is a, c, g, or t
  Peptide Sequence Number=SeqID_7734
  Probeset Number=SeqID_14122
ncgcgtcnagcgacgcgacactgatgcagacgatgtctcgtggggggatgagagacgagaggcgatatagcgaatgtgagtcacgtgcacactgtaccttgtctnacgcacgtcacacgtgcngggcgagacgaacaggcgtgtcaccgcacgcagctgtcatctgagcggtcgtactgtacacaatccaccgcatgatatggctcgagtgtggtgcccgtgccactacactctatgcgtctcactccatatagatcgagagattatagnattatgcagactgcgtcgcacgcttacaggatgtaggtgtcgcgcctagtgtgtaataactagtgtgatgagagtgtgtcagatggagangagatagtagagtacgtagctctcgtgtctctgacataacagaagatgcagagagtggtactagtatgcactcgcatgccaacacactagacgagaagtgtatagagagagaggcgttacgtactgtatgtagtgcacntttgcactttagtatactggcatcggtgcgagtagtgaggtgtgctgtcgctttcacaacatcacaacattaatacaaattatatgaggtngcaagtgattcatctcgacatatgactccatatcacgagctatattgagngtgtagagggatgtagagaggacgatgttgatattggtcgagaagtagtcgtttgntttttgttntgatattggctctnttattattactttattcaatcactactatccatcatctacactcaatacacatagattacgtatgcattatcgattacgtngagaagagtctcgtgagattcgtgcgtagaagcgagacacgccagcgcaccatggcaggataagagtgtggtggcgggtgaatcggccgatatagagacactagcagagctataatcacgcatatagtacaggaaagacgatctgaggagaaggatggcaacctcanatataaggacagagaagaggggcgacgcttgaacggagtatatcntagaggtgatataacagcaggagacaaccataggctggcacactagattacctacatgcgagagctatttgaaggtgtgtatgaggtgagaccctggtgaggcgttgaagcatgtctcagctataagtatacatacgttggtgtggaggcactacgagtccaccgcagttacacattatatcaacacactaatagaatganggcaatcacagggagagatcgcgcccctcacatgctctcatgccgtttagcagttggtggcatttatgaggtgggtgntgagttattatgattgcttgtacttctatatgtgtangcagtgggtctctctgtcgtcggataagacctggtggcngggagaaggagaagataccgagccgggacccggcnnnnannagncaaaacannnaaaaaaa

SEQ ID NO: 4344 - DNA, 2049 bp, Glycine max
  misc_feature (16)..(16): n is a, c, g, or t
  misc_feature (27)..(27): n is a, c, g, or t
  misc_feature (38)..(38): n is a, c, g, or t
  misc_feature (198)..(198): n is a, c, g, or t
  misc_feature (224)..(224): n is a, c, g, or t
  misc_feature (296)..(296): n is a, c, g, or t
  misc_feature (307)..(307): n is a, c, g, or t
  misc_feature (344)..(344): n is a, c, g, or t
  misc_feature (522)..(522): n is a, c, g, or t
  misc_feature (549)..(549): n is a, c, g, or t
  misc_feature (559)..(559): n is a, c, g, or t
  misc_feature (620)..(620): n is a, c, g, or t
  misc_feature (637)..(637): n is a, c, g, or t
  misc_feature (750)..(750): n is a, c, g, or t
  misc_feature (759)..(759): n is a, c, g, or t
  misc_feature (766)..(766): n is a, c, g, or t
  misc_feature (857)..(857): n is a, c, g, or t
  misc_feature (871)..(871): n is a, c, g, or t
  misc_feature (875)..(875): n is a, c, g, or t
  misc_feature (930)..(930): n is a, c, g, or t
  misc_feature (1008)..(1008): n is a, c, g, or t
  misc_feature (1056)..(1056): n is a, c, g, or t
  misc_feature (1058)..(1058): n is a, c, g, or t
  misc_feature (1061)..(1061): n is a, c, g, or t
  misc_feature (1091)..(1091): n is a, c, g, or t
  misc_feature (1106)..(1106): n is a, c, g, or t
  misc_feature (1108)..(1108): n is a, c, g, or t
  misc_feature (1138)..(1138): n is a, c, g, or t
  misc_feature (1212)..(1212): n is a, c, g, or t
  misc_feature (1214)..(1214): n is a, c, g, or t
  misc_feature (1262)..(1262): n is a, c, g, or t
  misc_feature (1280)..(1280): n is a, c, g, or t
  misc_feature (1283)..(1283): n is a, c, g, or t
  misc_feature (1368)..(1368): n is a, c, g, or t
  misc_feature (1405)..(1405): n is a, c, g, or t
  misc_feature (1473)..(1473): n is a, c, g, or t
  misc_feature (1521)..(1521): n is a, c, g, or t
  misc_feature (1542)..(1542): n is a, c, g, or t
  misc_feature (1556)..(1556): n is a, c, g, or t
  misc_feature (1601)..(1601): n is a, c, g, or t
  misc_feature (1615)..(1615): n is a, c, g, or t
  misc_feature (1638)..(1638): n is a, c, g, or t
  misc_feature (1643)..(1643): n is a, c, g, or t
  misc_feature (1646)..(1646): n is a, c, g, or t
  misc_feature (1650)..(1650): n is a, c, g, or t
  misc_feature (1669)..(1669): n is a, c, g, or t
  misc_feature (1720)..(1720): n is a, c, g, or t
  misc_feature (1746)..(1746): n is a, c, g, or t
  misc_feature (1749)..(1749): n is a, c, g, or t
  misc_feature (1876)..(1876): n is a, c, g, or t
  misc_feature (1878)..(1878): n is a, c, g, or t
  misc_feature (1905)..(1905): n is a, c, g, or t
  misc_feature (1969)..(1969): n is a, c, g, or t
  misc_feature (1971)..(1971): n is a, c, g, or t
  misc_feature (2008)..(2009): n is a, c, g, or t
  misc_feature (2011)..(2011): n is a, c, g, or t
  misc_feature (2049)..(2049): n is a, c, g, or t
  Probeset Number=SeqID_14123
ttctttattttttttntgttctgacgncgttttatgtnctgtcgtgtgtagtttgtatgtcatagtgtgttgggggcggagtgcgtgctgcgagggatactctgtgtgatgtctacatctctgctactatctactctctattgttgattgagctgtacacattgtatgcgccgcgctgtgaccgtcatctatattgtncacaagagcacatgtataatgttttntatgatataatataatagatagtgataatgatagctgatacagagtggatctcgactcactacaagcttgtntcgcacatgtngtcacggtcgcatggacgctctgacgctacgtgtcgncggcaagcaggtatctgagtcatgcgacgtgacgcgactacacccagcgtgcgctcgcgtgcaggagcactaccggctgcgtgcgacctcgtcgtgcgcgcgtgcgcgcctcctgataattgggtagtcgtatcgtgtacttgctcatttatgcgtgtgatgcgtgagatcgatcggntgttgataggtagtctcgttgtcgtgncgcgtgcgtntgcgtcagtctgcgctcgccgtactcctccactctcgcgactctctcggacggcgtcgtgntgcgcgtagctgtgcgngacggtgtgtcgtgtggacggcgctgtgtcgtcggcgttctactgctcgtgctacgcgacatatatatactcatcacatatgatctatcacaaccctatgacgacgtactaanacatattanctcgcanagtcagtgatagagtgctgatcgcgtgagacgcagcgagtagacgacagagaggagaggtatgatgaatagcagatcgagtcagtggtggngagctggctggtangtgntgatgataatagtcgcgctcgagtgatgtagcgatgcgtgtgtgccacatactancgtagtcatagcgatagtgcgtagactgtgctcagcgctcacgctctgtatcgttatgtcatctgatgagcgtaccgngcgtgagctgatgactgtaactgcgcgatatagtagtatcatcgtcgntncangctatgtgaactgtacgatcgcgaccggtncgttcagcgtatganancatcgcacgtactgcgctcatatctgatgntcagcgtagctacgtgacgctgacatcgtacgagatcgtaatcgacttctcagtcatacgcacgggcgccgcancngacgactctgtagtgttactgaagacggcgtcgtctgattatagatanatatagataggctagacncgntcgtcgaggactacgcgcatgctgatacccagcaactacgctatagacatcatcggcactgcgcactgagactgagtcgtacgtntgtcgtcgcgactgatcatggacgacgtgtctgcggntcgattcgagttcgtacgacgcagcgctttgcatcaactactcgtagatataatcggactcgcaagangaagcgcgacatacgcatctggacagtgtattctcatctcgtcatcgngtctgatcgtgtgtgatgacntcgatcatacttantccgtctactcttacacttgtgagtgtcagttcgcgcgcagcgancgtctctacgatgngatgtctgacgatgtagtatatntgatnagnaganatgagagtcgaatccacgncatgctatcgcacagcgacagtgccagatatatcaccgatcagacgtgctnacataactgctgactcgctgctatcnacnatcaccgatacatcgtgcagctcgagtcactcaaaccgacagcgatcgcagctcacgatgatcgtactcagtcgatgtctcatagctataaactatctcatcttagatgagtgcatgcgatagacgncntacgcatcagcgtcatcgctatatcgntcgggactgtcacttatcctagcagtacactggacgagcgtgttcgagcggatcgctgattacngngtgagtgcagcagcgtcagacgacgtctagtatgtcnntngtcgcatacgcgctctgactcagcaactagtcgacagn

SEQ ID NO: 4345 - DNA, 1951 bp, Glycine max
  misc_feature (25)..(25): n is a, c, g, or t
  misc_feature (33)..(33): n is a, c, g, or t
  misc_feature (41)..(41): n is a, c, g, or t
  misc_feature (49)..(49): n is a, c, g, or t
  misc_feature (56)..(56): n is a, c, g, or t
  misc_feature (58)..(58): n is a, c, g, or t
  misc_feature (79)..(79): n is a, c, g, or t
  misc_feature (88)..(88): n is a, c, g, or t
  misc_feature (95)..(96): n is a, c, g, or t
  misc_feature (117)..(117): n is a, c, g, or t
  misc_feature (144)..(144): n is a, c, g, or t
  misc_feature (207)..(207): n is a, c, g, or t
  misc_feature (241)..(241): n is a, c, g, or t
  misc_feature (256)..(256): n is a, c, g, or t
  misc_feature (264)..(264): n is a, c, g, or t
  misc_feature (285)..(285): n is a, c, g, or t
  misc_feature (311)..(311): n is a, c, g, or t
  misc_feature (316)..(316): n is a, c, g, or t
  misc_feature (318)..(318): n is a, c, g, or t
  misc_feature (321)..(321): n is a, c, g, or t
  misc_feature (338)..(338): n is a, c, g, or t
  misc_feature (377)..(377): n is a, c, g, or t
  misc_feature (411)..(411): n is a, c, g, or t
  misc_feature (432)..(432): n is a, c, g, or t
  misc_feature (482)..(482): n is a, c, g, or t
  misc_feature (520)..(520): n is a, c, g, or t
  misc_feature (532)..(532): n is a, c, g, or t
  misc_feature (549)..(549): n is a, c, g, or t
  misc_feature (557)..(557): n is a, c, g, or t
  misc_feature (568)..(568): n is a, c, g, or t
  misc_feature (575)..(575): n is a, c, g, or t
  misc_feature (587)..(587): n is a, c, g, or t
  misc_feature (615)..(615): n is a, c, g, or t
  misc_feature (642)..(642): n is a, c, g, or t
  misc_feature (749)..(749): n is a, c, g, or t
  misc_feature (772)..(772): n is a, c, g, or t
  misc_feature (788)..(788): n is a, c, g, or t
  misc_feature (853)..(853): n is a, c, g, or t
  misc_feature (862)..(862): n is a, c, g, or t
  misc_feature (914)..(914): n is a, c, g, or t
  misc_feature (970)..(970): n is a, c, g, or t
  misc_feature (1041)..(1041): n is a, c, g, or t
  misc_feature (1043)..(1043): n is a, c, g, or t
  misc_feature (1147)..(1147): n is a, c, g, or t
  misc_feature (1173)..(1173): n is a, c, g, or t
  misc_feature (1310)..(1310): n is a, c, g, or t
  misc_feature (1406)..(1406): n is a, c, g, or t
  misc_feature (1461)..(1461): n is a, c, g, or t
  misc_feature (1496)..(1496): n is a, c, g, or t
  misc_feature (1598)..(1598): n is a, c, g, or t
  misc_feature (1660)..(1660): n is a, c, g, or t
  misc_feature (1678)..(1678): n is a, c, g, or t
  misc_feature (1853)..(1853): n is a, c, g, or t
  misc_feature (1924)..(1925): n is a, c, g, or t
  misc_feature (1930)..(1930): n is a, c, g, or t
  misc_feature (1933)..(1933): n is a, c, g, or t
  Peptide Sequence Number=SeqID_7406
  Probeset Number=SeqID_14124
ctgatcatggtgcatgggtacagtncgcgtcantctatcgnagccgtantctgatngntgacgtgctgcttagcctatnctcgtatcngtcttgnnttgcacgagtgctgtcacganctagtacagcacagactctaatagcanaagataattcagcgcgaccgctagcagagatctcgtcacgcagccggaaatagtactaggcanggtgcgatcaacccgcgacgaggtcagtgagacnacagtaaacagcagncccatagntgttgtgtagtcgtcgatatnagtcgcagatgtactcgtcgctacgnttgancncgncccaccagtaatctgtntacacttagcattcatgtagtggaaatacgtttagttanagagtacgactgggcattagaggatggcgcatgnatgagagtatgacacgtatgntcagcacgtgcgtctatcacaagttgcatgaaggctatcttatcccaganacagagtcgagtatagaaacacttgagtacagtcatancagtagaggacnaccctctctcgagtagntatagtcnatcgcactagnaagcaantagtcgcatcgnttatcgtcacgtgcgtagagagatagtntgtgtagagttaaacactacaatatangcgtcaagcacaggaatgttttctgctagtgatcgcgcaccatatcatcatagtagtgcggtacgtagcagctgtacacctgcagcgtgtcgtatgagtagtagagngtacaatactcatctctctctcnatgtgcgtgccactgntggaggagtagatctaaccataatatacagaggcgctcagatctagctcgcgcgcgacgatggcngcagcgctntagaaagcgacatgagtaccgacacagcacagcaatagcctcatatcgatgntgctagtccggtgtgttatactaagcgagagcgcatagtacggagcgatacagtgnagtgtacacatgcgagaatgtggagtgtgatgttacacgtattaatggtagtcgtcggaacaactacaacncntctcacatgcaacatcgctccagcgagtgagcatcgagacactatactggtatatgttctctagattgtagatatgtatctatagaaacaatctggttaatgancaagccgcagacaactgatcgtgcantgcaagtgtgtgggctgcctgcagatgacgcatacacgtgagaatgtagcgagagtcctcacgctcgaatacggagcgcagagcgtcttgtggatagtatgcgatacatgagaggagagaggcgttgacgcttgtanttctgagtagagatatgtacaccacttgcaactaggaaggagaatacgtggagcaagaggcgtattcgttagtgcatagactagttatatcatggngcagtagtagcgtgacgtagctcatatatagcagtgtctgaattggacaggcatnggatgatgacgacaatatccactagctctagaatngaaactttgatactcttcagtggaagagcgggctagcataatcttcacgcacagcagcagcactctataggagtacaggtagaagctacgtagcatataganctcgtcggcagaatatagaggcatcaaataatgtgataaagacaggaaaatatagtgtaggntggtactcgtaacagaangcgtagaatgtaagacgacacacgtagcgtggcagtacccgctcttcgggctgcgcctactcgcggagagagtatatcctctacactctatgtatatcctaaagttaatgcctggcgccccggccctaaacgggtggtgtgatgcgagcaccttgcactatattatttatatacncgcagagtctagggtgtatgacagaatagcataagagttatatgtagtcgcgaggagatgtatggggaggnnggggnganagtgtggtggtcgaaact

SEQ ID NO: 4346 - DNA, 666 bp, Glycine max
  misc_feature (655)..(655): n is a, c, g, or t
  misc_feature (666)..(666): n is a, c, g, or t
  Probeset Number=SeqID_14125
tcagctacgtaggccccccccccacaagcctcatctttcctcaagttacagagacaaaagcgaaaaaatgagtgattcttttttggcaaaaagtccatctagtcagattgctcctcttcaaagaactcctagagcacttgacgcagttagtcccaaagttggtattggaaagagaagccacgacatcaccagaccaacaattgagactgagcctaataagattcccacagggattattagaccaaacactccaaaaaagaacggcttctatagtgattatcttcaagattacaatcccaatcccaagaccatgagtttcaagtctccaactgctggagctttgaagagagagataacagacagaacttcaaggagttactcaagcacttctttcatcaatcctatggtcagtggaagaacttcaaatagacagcctgaaaagggaagaaatagcacttttggtacttatgagacgggcagaacatcaactagaccagaccccattgagccacaaagacgtgaagcatcagctgtgagaaatgctcaagttaatgatattaaaattcctgttgaaacagctcctgatcaaaactttgcaactggtgaaacagaaagaagagctagagatgccaagagagatgatatcagaaacagnatttcaagatn

SEQ ID NO: 4347 - DNA, 1649 bp, Glycine max
  misc_feature (24)..(24): n is a, c, g, or t
  misc_feature (26)..(26): n is a, c, g, or t
  misc_feature (89)..(89): n is a, c, g, or t
  misc_feature (290)..(290): n is a, c, g, or t
  misc_feature (325)..(325): n is a, c, g, or t
  misc_feature (478)..(478): n is a, c, g, or t
  misc_feature (529)..(529): n is a, c, g, or t
  misc_feature (584)..(584): n is a, c, g, or t
  misc_feature (610)..(610): n is a, c, g, or t
  misc_feature (639)..(639): n is a, c, g, or t
  misc_feature (731)..(731): n is a, c, g, or t
  misc_feature (733)..(733): n is a, c, g, or t
  misc_feature (758)..(758): n is a, c, g, or t
  misc_feature (772)..(774): n is a, c, g, or t
  misc_feature (833)..(835): n is a, c, g, or t
  misc_feature (860)..(860): n is a, c, g, or t
  misc_feature (865)..(865): n is a, c, g, or t
  misc_feature (870)..(870): n is a, c, g, or t
  misc_feature (893)..(893): n is a, c, g, or t
  misc_feature (944)..(944): n is a, c, g, or t
  misc_feature (1066)..(1066): n is a, c, g, or t
  misc_feature (1081)..(1081): n is a, c, g, or t
  misc_feature (1197)..(1197): n is a, c, g, or t
  misc_feature (1391)..(1391): n is a, c, g, or t
  misc_feature (1448)..(1448): n is a, c, g, or t
  misc_feature (1579)..(1581): n is a, c, g, or t
  misc_feature (1595)..(1596): n is a, c, g, or t
  misc_feature (1598)..(1603): n is a, c, g, or t
  misc_feature (1606)..(1607): n is a, c, g, or t
  misc_feature (1609)..(1609): n is a, c, g, or t
  misc_feature (1611)..(1613): n is a, c, g, or t
  misc_feature (1615)..(1616): n is a, c, g, or t
  misc_feature (1633)..(1634): n is a, c, g, or t
  Peptide Sequence Number=SeqID_7407
  Probeset Number=SeqID_14126
cacgtccgtacgtatgatactaantntcatacatcgcctctctctccgtcgtatgtgtcgtatcgtcgtgtctatgtctataagtacgncgtcgagtgtgagagacacacacgagaagacgactgactcacgatgaggaggagtacgaatgccgagacagcgcgcagacaagttgaacagtacacccaacacgacgtctgtgtctctcgcgctgcgcgtgtatattagagctcacgtgtcatatgtatatagatagatgacaaacatatgtgagataagtctaacggtcncgcgcgcgcgcggcggctagtcagtgcgatgtgtngtgatggatgaggtgttatttgctccttaccatatctcctcaagaactagatgagcagttgttgtgtcacgtgttaccaccacccatcatcactataccttctcatttgtctcctatatagtgtagtgttcgagagctgcatcgatcaccacncacccatatttcgttccactcgagcgcatgtgtgatcggagtcggtggatnggatatgtcgtggggagcgagcgaagaaagtgaaagaggagccatccacaacctnatctcgcattgcgtgagatgttgtgnggtcgtgtgtgtgtgtggtatgaggattnacacttagttcaccacacctaccataatcatctagctatagatactattgcacccagtcgactagatctagttcttatcttacaacaaacanangatatagtgtataggtagacaggcnatgaagtgatgtannntagcatagtgtgtggacgagaagagagcagcacattgagcagagaatgagaaggatgcnnncgcgcgggtgcgtgctcgcagtgtnggggntgcgngcgagcgggtctgtgtatgagtnttgtatgatgtatccatttcacgactagcctcactcagacctccacgtctnatttagtacttgtagatgagtgttatgagtatgagaacgcagataaattataagtttacagtgtgttgttgtgtgtgtattatacattttgattgtatttatatatatatcttatataattntctctcatctccctnctatgtctcactattgtgttatgttatcttaaatgtgtctataatatgtaggtgtttagtcttccaccatacataatatatttacatttatttctatataggtataggacgtatcnatgcatatatcataaaatggcataattatcatcacattatgattcagtatagcattactatcacaccacacatctcacgcgtatgcgtctgcttgcgtgtgtgtgtcgttggtactcattcacaaatttattattaaataatccgatattatatgataccgtatcgttttcttcactataatatatttctcatntttatccgcctctctcacgtagtcggcacagcgcctcttgtctcttgttctacgatnagcttcttatgatttgaagtagattatgtgcgacgcatgagtggtggtatatcagctggtgttcgggctgcgtggtgtggtattgagtgtatgtagagaggagtggtgtgcggcgcactgagagccaagannngtgggcgggggcgnncnnnnnnggnngngnnngnncccacagacgcacaccnnccaacaaaccaaaaa

SEQ ID NO: 4348 - DNA, 1463 bp, Glycine max
  misc_feature (1)..(1): n is a, c, g, or t
  misc_feature (5)..(5): n is a, c, g, or t
  misc_feature (28)..(28): n is a, c, g, or t
  misc_feature (79)..(79): n is a, c, g, or t
  misc_feature (119)..(119): n is a, c, g, or t
  misc_feature (206)..(206): n is a, c, g, or t
  misc_feature (303)..(303): n is a, c, g, or t
  misc_feature (574)..(574): n is a, c, g, or t
  misc_feature (650)..(650): n is a, c, g, or t
  misc_feature (911)..(911): n is a, c, g, or t
  misc_feature (913)..(913): n is a, c, g, or t
  misc_feature (1357)..(1357): n is a, c, g, or t
  Probeset Number=SeqID_14127
ntttnatgtctcatcgtcaggagctatnacactcgcgtagcgcagcatgcggcgcgatacagagtgtatcatatagttntgatgtgacagaatatgacgcacgcgcgtcgtgactgcanggcgtgaaggtaacgtatatatatatatccgtctatgtcgccgatcgggagtgtgtgtgtatacgatacgatagatcaacgtagatngtgttatgtgtctatcgcagagctgcgctcggcggctgcatcaatatacatttatcagctcgcgcggtgcggcatacgcgcgagagcgatccgcagntaacgcgttgatgaggtattagcaatatatagcagagacacagcagtcgccggcgagatagaagaatagtatatgcaatgtgatcatagttgttgacagcatcatgtgtgcgtggtggatagagtcgagataactacactggacagcactctcagcggtgcggcgtgagaataatagacagtgttctcgtcttatcgcgtagacactatatgtaatagcgtgtgtatcgtagtgcgagcatattctccgacgaagagtcctatacgactantggagattacacattatgcgtgcacggtgcgcgtggtgtatgatgcgtcttcacaccactatatgaagcgcgttcntatggctctaatctatctacattcctatgcggttctcgcgatattgtgttatcgtagtggtgttaccgacattaataaccgtcggcacgaacaatcgcacgactgctgtgtatcatacggttacgtattaggagtcgggtatacgaatatcgtatcaccgatccgcttgtatagtgtgggagtcgtggccgtaagacgagtattgatttcgatgcgtgctgcgagcgagcatgataatatgtatacacaaacaggcgacgncnatagaaagcgtatcaggtgaggtgcgtccctgttgagtcctgagcgtatcagtaccgccgtcaattattcgcacgtctgtcgatcttgcgtctacgctatcaccatcgtgtgtgcagcagtagacgggcgcacatactcgcattaagaagcggaacgtcactcgtatacaatcgtggtgctgatcgcccacgttgtcgcttaagctcgctgtgtgctacgtccgctcttgttgttgtcaccccttcgcttttacgatagaggcgcgatgctatatcgcggacaggcacgattctaaaactctatcatattatcagcgcgtggagcgctgttaggggtgcggcgtcggataatatacgacatattgcactctggcagtgcgactcataatgttatttctttatcgtatagctatgggtaagataacggttataacggtgcggtcntcttccgtgtcagccgcggtcggtactggtgggtgggccgtgtggccaaaacagtgtattcttggcagtgcctggtagtaatagaagaggatagtgcgggtcacca

SEQ ID NO: 4349 - DNA, 1419 bp, Glycine max
  misc_feature (51)..(51): n is a, c, g, or t
  misc_feature (75)..(75): n is a, c, g, or t
  misc_feature (88)..(88): n is a, c, g, or t
  misc_feature (135)..(135): n is a, c, g, or t
  misc_feature (171)..(171): n is a, c, g, or t
  misc_feature (300)..(300): n is a, c, g, or t
  misc_feature (438)..(438): n is a, c, g, or t
  misc_feature (452)..(452): n is a, c, g, or t
  misc_feature (878)..(878): n is a, c, g, or t
  Peptide Sequence Number=SeqID_7408
  Probeset Number=SeqID_14128
ctaggagacataagatgtgtgtattgtgacatataacactcaagtgttgtnttagagacactgtacacagatgtnggtgattggagcntgtgtagaggatgttgtacagaggtcttgtagagcgaagaggtgtgntgtgaagatgaacgtatattgtgttaatgttggcgnaaacattatgttgttagcgagctgttgtttgatatacacaagagtgtgttatggtgagagcacacatagaaagaagcatagagaaaatggaggtgtgatagagatgtagtaataggtgagagtgagtangacgtagagcgtagatgtactagatgctcaccagacgcgaaagatgaatggcgagagataggcgaaaacgatgttgattagtacatacagaaagtagagggcgagtcatacgaagctgtgagaaagcggtcggcgcgntaaggaggatgatnatagtaagagaaatataagtgtgtatgcaagggagatcggcaattgagcgcaaggcagggtatagcactttgtagtatacaagacacaaagtagtaggagaggtctgctcataactacatatcattcatataacgacagagtatgatggggtaataatagactaaatagttaggtcaaacataataagtcaatgcatacttcccctattgttttcactttaccgtgtattataagacgtgtattaacataattacaacaaacatcacaataatgtagcaattgaatatgtaggcggcgcccacccccccgcactatgttaacttacacaagagaagagagaagacagaagaagtgagaggtggaggaggagggagaccgcctatagttacacacccgcctctccgcacggagtggaccaaacgacnagacagcaaaacaagaagaagtctataataaagagagtcgaccgcgatatgtgttatatccaagaccaacacaaataaacatcgcacaaacaccacaatgagagtagcgcaggcggcgcggattagtatcagatcgtctacacgaagagaggtaaagaaaacaagacatgcagcactgaattgtcgccccgaagttagaccccccctttgttggtctcacccacatggaggttatatgttaagttcaggagaggaagaagttaaacaagaggaacatagatgatatagaagaaagagaaaaaacgaaaatatcagtgcgaaagttgttatatctatttcccaccacaccacccaagtggcgcccattgttaggagaggacagcagcaataggaggtaggcgagatgtgggggtgggttggcggtgcgtgctctggtctgcagtaagagagagagatgtgcggtgttggtcgccgcccgtgcttttattaggaaaattgtgtttatgaaaggtagtgatatatacacacacacggtccccac

SEQ ID NO: 4350 - DNA, 525 bp, Glycine max
  Probeset Number=SeqID_14129
agaaaacctaatttctcaaatttgatttcgcaccaaattttcctcactaaaatgtctggtcgtggaaagggtggcaagggtttgggcaagggaggcgccaagaggcacaggaaagttcttcgcgataacattcagggtatcacgaaacctgcgattcgtaggttagcgagaagaggtgatgtgaagaggatcagtggtttgatctacgaagaaaccaggggggttctgaatattttcttggagaacgtgattcgagatgctgtgacctacaccgagcacgctaggaggaagacggtgactgccatggatgttggtttatgcgctcacgaagcagggaaaagaccctcctacggttttggaggctaaagaatttaacccttcttttcttggtttccaggataaaactttggttcctgttgaatttgctttgtgtttttagtttaagttttgtttatttttcagacaatctcttgttttgcgtaaaaaattttccttttaaaatttaatggatttccttcccctttt

SEQ ID NO: 4351 - DNA, 1610 bp, Glycine max
  misc_feature (40)..(40): n is a, c, g, or t
  misc_feature (56)..(56): n is a, c, g, or t
  misc_feature (164)..(164): n is a, c, g, or t
  misc_feature (177)..(177): n is a, c, g, or t
  misc_feature (183)..(183): n is a, c, g, or t
  misc_feature (258)..(258): n is a, c, g, or t
  misc_feature (276)..(276): n is a, c, g, or t
  misc_feature (310)..(310): n is a, c, g, or t
  misc_feature (458)..(458): n is a, c, g, or t
  misc_feature (474)..(474): n is a, c, g, or t
  misc_feature (492)..(492): n is a, c, g, or t
  misc_feature (504)..(504): n is a, c, g, or t
  misc_feature (720)..(720): n is a, c, g, or t
  misc_feature (736)..(736): n is a, c, g, or t
  misc_feature (738)..(738): n is a, c, g, or t
  misc_feature (741)..(741): n is a, c, g, or t
  misc_feature (744)..(744): n is a, c, g, or t
  misc_feature (746)..(746): n is a, c, g, or t
  misc_feature (749)..(749): n is a, c, g, or t
  misc_feature (835)..(835): n is a, c, g, or t
  misc_feature (1019)..(1019): n is a, c, g, or t
  misc_feature (1072)..(1072): n is a, c, g, or t
  misc_feature (1194)..(1194): n is a, c, g, or t
  misc_feature (1216)..(1216): n is a, c, g, or t
  misc_feature (1408)..(1408): n is a, c, g, or t
  misc_feature (1434)..(1434): n is a, c, g, or t
  misc_feature (1483)..(1483): n is a, c, g, or t
  misc_feature (1582)..(1582): n is a, c, g, or t
  misc_feature (1586)..(1586): n is a, c, g, or t
  Peptide Sequence Number=SeqID_7409
  Probeset Number=SeqID_14130
ttggtttttgtttcctgttctttgttgggttgtgtcgaanccgggaggagccacanacactacaccctcgcctacacgatgtgctgtcctacgttctcactcatgctgttctcgcgtcgagagattgacgttgtacaatcgagcttatcttatacatatattgnctcggtgaagaancataangaacatacttctcgtgcctgtatataaagagtgtgtataattgtgatttattaatatcttaacatttctctaccnaccttgcacaacagccanacgcgcggcgcaccatgtctcccctctctttcgntgtcttcttctcttccttcctccgtcgcgcgctggcgcacaccgcgcggcgacacacacgcggagtcaagacatctctgggggcgtccatgcgctctctctcctcacataactctccagttctactcgctcttgactcacattctttntatatgtatcgtgtgnaattatcactatctatanttatataataantatcatggcatatgtgtctagattcaatcatatatattataatatcgtctcggtgcagatcatcaatattatgcatattctggatacacacaccactatctataacacacaacagatatcacaggcgacacacgacgcgtgcgctcgccgtgcgcctgcgcggtgtgcgtgggtgtgttatgatgtcgcacatattgagggaagatatatacaccngtgtgcgtaatcttantnaantantntancttaaataaatgtgggtacccacaccaaatactgatattataatatgtacgactagaacaccgcacgtcatctccacactccaccntcttctgcacctccgctgcatactctcacactactcacggctgtcaggtgagaaacaaattaacggcacgctagcagcgccgcggagcgagcgagtgttattactatactctagctactactaatagaatatacatatgtgctcacccgacgacgcaccatcacacacgcgcgcacgaacacanaccgagtgcgtgtacgcgtcctatctattatacatactacaatctgtcactanacgcgcgcacccaggccacacgaccgagacatcagcgactgtcgtgtcatcgttctatcaacactcgtcatgatctctatacacatcatgatactaatgtggtgtatgcggcctgtcacatnactctctcctctctcctactcnttacatcctcagtctacacgcacccgcatgtgcgtgttatatatatctaaatcatatatacacatacattgcgttgtctactacacacgtactatatacgatctgtatctactctctctctctcactatctgcgcgttctgtgtgactcttgcggtgcacatcacaacaacatcatctcttgctctatatcntaatactgtgctgcttgtctgtgctnttgtgtcacttcctctcactgtctgtgtcgtgtgcctgcgtgcttgtcntgctcgtcatcacacgatgcgcatgctgtggcgtcgcgagcccgtcagtagatgaacaacacaacctcgtcgagtgctatcgtgactcacacaacctantcangcgtacccgtagatacgacaccag

SEQ ID NO: 4352 - DNA, 595 bp, Glycine max
  misc_feature (231)..(231): n is a, c, g, or t
  misc_feature (249)..(249): n is a, c, g, or t
  misc_feature (303)..(303): n is a, c, g, or t
  misc_feature (319)..(319): n is a, c, g, or t
  misc_feature (323)..(323): n is a, c, g, or t
  misc_feature (326)..(326): n is a, c, g, or t
  misc_feature (344)..(344): n is a, c, g, or t
  misc_feature (349)..(349): n is a, c, g, or t
  misc_feature (365)..(365): n is a, c, g, or t
  misc_feature (381)..(381): n is a, c, g, or t
  misc_feature (397)..(397): n is a, c, g, or t
  misc_feature (407)..(407): n is a, c, g, or t
  misc_feature (409)..(409): n is a, c, g, or t
  misc_feature (424)..(424): n is a, c, g, or t
  misc_feature (433)..(433): n is a, c, g, or t
  misc_feature (437)..(438): n is a, c, g, or t
  misc_feature (445)..(446): n is a, c, g, or t
  misc_feature (456)..(456): n is a, c, g, or t
  misc_feature (458)..(458): n is a, c, g, or t
  misc_feature (466)..(466): n is a, c, g, or t
  misc_feature (469)..(469): n is a, c, g, or t
  misc_feature (471)..(472): n is a, c, g, or t
  misc_feature (479)..(482): n is a, c, g, or t
  misc_feature (504)..(504): n is a, c, g, or t
  misc_feature (507)..(507): n is a, c, g, or t
  misc_feature (512)..(512): n is a, c, g, or t
  misc_feature (520)..(520): n is a, c, g, or t
  misc_feature (526)..(528): n is a, c, g, or t
  misc_feature (532)..(532): n is a, c, g, or t
  misc_feature (564)..(564): n is a, c, g, or t
  misc_feature (579)..(579): n is a, c, g, or t
  misc_feature (583)..(584): n is a, c, g, or t
  misc_feature (589)..(589): n is a, c, g, or t
  misc_feature (591)..(592): n is a, c, g, or t
  Probeset Number=SeqID_14131
aaaaaactacttatcttcttcaccacgttcggcctttcttttttcacctccttcccaatccaatccaatccgaggcagtgttctctctaccagcatgcggtttttccagagcgtgaggtgagggagtcgtggaggttaccgttgtgcatgagatgatagacgagaaggaaacggcgtcgtttggggtcgaacctaaagggaggccgagtccatgagcttgacggcgacggnatcgccggccgtcgtggngcggcggcggagggggtcgttcgttcacgcttgcggagtagtgtgcgcgtgtcnaaaaacgagaagagancggncanctggttgtaaagagaggnaggtnacccggccaacaccanaaccaccaccgctctnctccttacctcccggnagaccatggncngcccaccgaactccntcccgctgncttnngtcaccnncaggctttcncngcaggganacngnntatcccnnnnttgatgcctccctccgcccgancgnttctnccttcggnccctcnnncaanctgcttccacttttcttattggcaaaccgccnaaccttcctttcccnagtnncccgncnntcg

SEQ ID NO: 4353 - DNA, 2899 bp, Glycine max
  misc_feature (2673)..(2899): n is a, c, g, or t
  Peptide Sequence Number=SeqID_7410
  Probeset Number=SeqID_14132
cgatctcgatttgaggacgatcgaacaatttcctttataccacctgatgggtcatttgatttgatgacatataggctcagtacacaggttaagcctttaatttgggtggaagcaagtgttgaaaagcattcaaagagtcggattgagattatggtgaaagctatgagtcaatttaaggaacagaaaaactactttctgagacaacgacgacgttgtatagcagtccttcttcttctttctgtgttgacggtggcgttgatctgattggaattcaggatcaatggcaggggcagcctctgctctgttcctcctcgacatcaaaggccgcgtcctcatctggcgcgactaccgcggcgacgtctccgccctcgacgccgaacgcttcttcaccaaactcatcgaaaaacaggccgatccgcaagctcaagatccggttgtgcacgacaacggcgtgacctacatgttcatccagcacagcaacgtctacctcatgatagccaccagacataactgcaatgccgccagcctcctctttttcctgcaccgcatcgtcgatgtgtttaagcactactttgaagaattggaagaggaatcgcttcgggacaatttcgtcgtcgtgtatgagctacttgatgagattatggactttggctaccctcagtacaccgaggcgcagattcttagtgagtttattaagactgatgcttatagaatggaagttacgcagagacctcccatggctgtgactaatgccgtgtcgtggcgcagcgaagggataaactataagaaaaatgaggttttcttggatgtggtggagagtgttaatatacttgtcaatagcaatggacaaataattagatctgacgtcgttggggctttgaagatgagaacgtatttgagtggtatgcctgagtgcaaacttggtttaaatgatagagtattgttagaggcgcaaggtagaacaaccaagggaaaggctattgacttggaagacataaaatttcatcagtgtgtgcgtttggctcgatttgaaaacgatcgaacaatttcctttataccacctgatggatcgtttgatttgatgacatacaggctcagtacacaggttaagcctttaatttgggtggaagcaaatgttgaaaagcattcaaagagtcggattgagattatggtaaaagctaggagtcaatttaaggaacgtagcactgccacaaacgttgagattgagttgcctgtgcctgttgatgcaaccaatcctaatgttcgaacttcaatgggatctgcatcatatgcacccgaaaaagatgcgttaatctggaaaattagatccttccccggaggcaaggagtatatgttaagagcagagtttcatcttcccagtataacagatgaggaagcaactcctgagagaaaagctcctatacgtgtgaaatttgaaataccatattttactgtttctggaatacaggtaagatatttgaagattattgagaaaagtgggtatcaggctcttccatgggtgagatacataacgatggctggagagtatgaattgaggcttatttaagaatttgtatctttctttggtgctggaattccaccaaataatcgtgccaacttccatgatcaatggttttaaactggtggatgggagagggactcttgagtaaaattagagtttatttggcctgatcatatctcctcttgcgtcatgatagttttggcaacagatcgtaaattgctcattgtccgtaaagttcataacttcaagtcaggaattggcaagtgtaaggctgtatcttctgtgtaagtcctttttgttcaaatctgtttgttgggaaaatgtctgatttttttttcctcttgttttcttttcttttatttacgatctgtcaatctttgccattgtcttcaatttgatttatttgtaagagaattattagcttttgtattactaagattgaatattttccccatctttatttgtattcataacctgacccatcttgtgtattaatatggtgccatatccctccctttctgaacaaaaaccatgtatttttttaccattcattcaaaaagttgattgcaggtcaatggcagaaaagaaaaaaaaaaaaaaaaaaaaaaaaaaaaaaaaccaaaaaaaaaaaaaaaaaagcttatcgataccgtcgacctcgagggggggcccggtacccaaattcccccccaaagagaaaccaaataacacggcttttcctggccgccctttttaaaacccctggacaggggaaaaccccggccgccaccttaccctcttaccctttggaaaaaatcaccccttttccccattcgggggaaaaaaaaaaaaagccccccaccgattcccccctttcccaaaattttgccaatccatgaatgggaaagggaaatattggacccctttaaaatttttgtaaaaattccccgctaaatttttttgaaaaacccccccccttttttttactgccaaaggccgaaattccatgttcttcccacactcggtatacccgctcacaacgcccaccaaatcttcccccaatcttaactcccccaccacaccaaacactgcgcgatactactaattgctactttaaccctagatcacagaccgatgcaattacttcatccattttcacagaaactggatgnnnnnnnnnnnnnnnnnnnnnnnnnnnnnnnnnnnnnnnnnnnnnnnnnnnnnnnnnnnnnnnnnnnnnnnnnnnnnnnnnnnnnnnnnnnnnnnnnnnnnnnnnnnnnnnnnnnnnnnnnnnnnnnnnnnnnnnnnnnnnnnnnnnnnnnnnnnnnnnnnnnnnnnnnnnnnnnnnnnnnnnnnnnnnnnnnnnnnnnnnnnnnnnnnnnnnnnnnnnnnnnnnnn

SEQ ID NO: 4354 - DNA, 1667 bp, Glycine max
  misc_feature (1)..(33): n is a, c, g, or t
  misc_feature (38)..(44): n is a, c, g, or t
  misc_feature (166)..(166): n is a, c, g, or t
  misc_feature (246)..(246): n is a, c, g, or t
  misc_feature (661)..(661): n is a, c, g, or t
  misc_feature (737)..(737): n is a, c, g, or t
  misc_feature (981)..(981): n is a, c, g, or t
  misc_feature (1073)..(1073): n is a, c, g, or t
  misc_feature (1095)..(1095): n is a, c, g, or t
  misc_feature (1102)..(1102): n is a, c, g, or t
  misc_feature (1158)..(1158): n is a, c, g, or t
  misc_feature (1168)..(1168): n is a, c, g, or t
  misc_feature (1233)..(1233): n is a, c, g, or t
  misc_feature (1345)..(1346): n is a, c, g, or t
  misc_feature (1358)..(1358): n is a, c, g, or t
  misc_feature (1429)..(1429): n is a, c, g, or t
  misc_feature (1440)..(1440): n is a, c, g, or t
  misc_feature (1455)..(1455): n is a, c, g, or t
  misc_feature (1487)..(1487): n is a, c, g, or t
  misc_feature (1502)..(1502): n is a, c, g, or t
  misc_feature (1518)..(1518): n is a, c, g, or t
  misc_feature (1554)..(1554): n is a, c, g, or t
  Peptide Sequence Number=SeqID_7411
  Probeset Number=SeqID_14133
nnnnnnnnnnnnnnnnnnnnnnnnnnnnnnnnnccccnnnnnnncctggttgggctggtgttgccgtttggacagcgccgtcatctctcccccatgctctactatatccaacaatcattacaacaactatattttctctaaatgatacatacacgttcactacatncttacttcttattccctcactacaatctcatatactctggtgattctcatgtctactattagaccaaacaataaatatgnatcgcatttgtattgaaaccatgcactttaactccacgcacccacacccactcagtcccaacgcaaaaaatatcaagtacaaagcgcatgaacaaaatagacaaaaggttattatagaattatacactttatctaaatagacaaaattcgcctctagcataggaagtagatatctctctagtataatctacacgatgagttataagtactataatagcggcagaatgtgagcgcaggactggagggacgagcaagtaaaaaagtaaatgttcagtaaagttttcatataaatgtttacctattactcgaagtagtgattggtgaacaaaagcgcgatacctctcctatagggcccgcccgataatattgtcccacataccctatcttgctacgagtcgacatattacttccttcncacactttgtactctttaattagtatgaactagatctcctaatacgacaattattaacacaccatcacgaaacagngtgagactcataaacaataagtgacaagagttcacactcttgcacgatttagtatagaatggctagcgtctatgtttattcaactactgttattaatgcctgacgcaaccagattaataagccccacacgcacctcactaattggcacatccagacaaacatacacatacatagagagaaaataatgcatgtatgtctagctgttttacataattcacatatatatatcacgactgtcggtagntcgttataactcatatatctcgactcagatatatgcagtacactacgactcataccgcgcggccttactgcgttctgagtacgcactctcantacacgcagtcatagttgtcanccacganacgttagtgcacacacactagctctctgtcgtcaagatctgcgtatacgctatgancgatacatcnctcagcgaacgacagtagatcatacatcctatctacccagatccacacacatcacacagtctctnatgtacccacgctctacacagtctacacgaaagcactagcccgtaccaatttttcacacataaagagatctatatatttgctgttactcactctgctaagtagaagtaaaanntatctctctctngtgctatgttgtcatggggtatcacgaggaaatgagatcattttaataggctgtgcatcacacgccaaccncgtgtgaactngcgtctatcatctgncgacgcgacgtgaccgcgcgcatcactactcnttctcttcttctcgntattatccctatattntaatatacatcaagatatcatctaaaaactacgagnaatgattgttaatatctctccgtcgccctacatcttatactgtttcaacatataatcgcacgtctttcattaccatacaactcacatatataaacacatgtatcactctcaag

SEQ ID NO: 4355 - DNA, 438 bp, Glycine max
  Probeset Number=SeqID_14134
aatagaatctctttgacaatcgacttagaagcttccatgaacaacgctcgagatctcgcagtcgtctctacttctgcaattgtcggtgctttgatttcagctcttgcgtttcgcttcttctcatcaaaccctaagccccgaagatctgcttccaccgaaatctccgcagtttccagaagattccctggtctcgatccttacagccctttgaagcgaaatgggtacttatcatgggatgattatttcatggcgattgcattcctttcagctgaaagatcaaaggatcctaacagacaggtcggtgcgtgtttggtgagccaaaatggtgtgattctcggaattggctataatggctttccaagaggttgctcggatgacagacttccatgggccaagaaatccaaaactggggacccattggagacaaagtacccatat

SEQ ID NO: 4356 - DNA, 1553 bp, Glycine max
  misc_feature (20)..(33): n is a, c, g, or t
  misc_feature (35)..(40): n is a, c, g, or t
  misc_feature (43)..(45): n is a, c, g, or t
  misc_feature (47)..(47): n is a, c, g, or t
  misc_feature (50)..(50): n is a, c, g, or t
  misc_feature (53)..(53): n is a, c, g, or t
  misc_feature (111)..(111): n is a, c, g, or t
  misc_feature (116)..(116): n is a, c, g, or t
  misc_feature (123)..(124): n is a, c, g, or t
  misc_feature (185)..(185): n is a, c, g, or t
  misc_feature (189)..(189): n is a, c, g, or t
  misc_feature (272)..(272): n is a, c, g, or t
  misc_feature (296)..(299): n is a, c, g, or t
  misc_feature (323)..(323): n is a, c, g, or t
  misc_feature (332)..(332): n is a, c, g, or t
  misc_feature (337)..(337): n is a, c, g, or t
  misc_feature (389)..(389): n is a, c, g, or t
  misc_feature (393)..(393): n is a, c, g, or t
  misc_feature (415)..(415): n is a, c, g, or t
  misc_feature (465)..(465): n is a, c, g, or t
  misc_feature (500)..(500): n is a, c, g, or t
  misc_feature (663)..(663): n is a, c, g, or t
  misc_feature (823)..(823): n is a, c, g, or t
  misc_feature (828)..(828): n is a, c, g, or t
  misc_feature (877)..(877): n is a, c, g, or t
  misc_feature (926)..(926): n is a, c, g, or t
  misc_feature (942)..(942): n is a, c, g, or t
  misc_feature (1386)..(1386): n is a, c, g, or t
  misc_feature (1406)..(1406): n is a, c, g, or t
  misc_feature (1465)..(1465): n is a, c, g, or t
  misc_feature (1500)..(1500): n is a, c, g, or t
  misc_feature (1553)..(1553): n is a, c, g, or t
  Peptide Sequence Number=SeqID_7412
  Probeset Number=SeqID_14135
tgtagtgtggtgtggccccnnnnnnnnnnnnnntnnnnnnttnnntnttntanattattattttactttttatcaaccccacatgcccacttccacatcacattaatttanatatntgtctannaataagaaaataacaactacgaggcagcgaggcgaactggacaggagttcatggtgtgtanatanacatgctacgctatatgagatgctagtgagacgcgcacgcgcgctgtgtgagcgagccagaaagaagcatatgcgtgtgtgcntgtgcttatttcttcattatggannnntataaagtaagatgtgacttattnctgtcgcgntaggntgtgtgtgagtattgtggtggtgtggtggctaccgccccggttgtgattgtnggtngtgcattgtggtgtggaactgncgtgcgtggagttgaaggggaggctgtgtgagcattggcgctggtgcgtngtgcgcttgttggtcaatgaatttaccgacaatanattacaaaaattgcacgacattataatagtatatatactaaactctccttaatcatgaagtgacattcagtgatggataatgaagtacaggcatgaataggcgacgaaagaaagtgcgaatcttgcagcatctaacatatagataaagatgtattaatgtganagacatagtttagtaggactgacgggcgcgctgtgatggatggatgtgaagataaaatgatgtttatattagtagaacaacaacacagcaccaggcgacagcacggacatgcagcctcacgctattcatagcaggactgatgataagactcatccacgcntatgngaggatagtgatatatatgaaatgtgtgtacaagagatgagcttataanaaacaaatatcgatgtggatcattacagtggtaggcatggacaataaanggtatcgatactaganatgtgcgtaaccatacatacgatactcctggcctcgaccatgccctgagtatagatcatgtgatatggcgtggcatgtgtcggtgctcactactgcgtgtatactgagcctcgcgctgctgcctggtgcgatccgcgtactggagcacttgcgaatagtatggcataatgcatagcaaacaaccgcgttatgtccttgagtgtcgctcagtactatggtgctatcatatgtggttcacaactacccgtcatcaggaactcgagacgagtgagtgtagcgagcgccacggcgagcgcgtcgacacacaccacgagattgatgcacgtgttatcgctttggtacatcgtcctgcgcatctcagcacgaccagcggccggtgtacgggactcgcgcctgcggcatgtgcggctgtgcgcgcgtggcgcggggtattggcgacgtcgncacgagacgcagtcctaggncgtcagccgtgtgtctctgctctcttcactggcgttctctccgtgtcatgtggctgcgncgcgtacgcgtagtctcgcatcactcgctgttacnccactccgtacgacaccggcctattgtctacagtcatatgtctgagcaactan

SEQ ID NO: 4357 - DNA, 441 bp, Glycine max
  misc_feature (22)..(23): n is a, c, g, or t
  misc_feature (32)..(33): n is a, c, g, or t
  misc_feature (248)..(248): n is a, c, g, or t
  Peptide Sequence Number=SeqID_7413
  Probeset Number=SeqID_14136
actcggcggtgggcggctcgcnntctagaacnnatagtgtatccccacgggcatggcaggtaccgcgggtggacttcttttctctctcaaccctgccacactactgagattactacaacgcaggcagcagaccacaccgtacggatgattcctgccatccccaagggttacaccacgcgaccggaatgcttaccgggaaaggacgacgtaccactccgccccagggtaccctcacacagggaggatanccctccgcaggcgtatccagcacaggggtaccctccaccctacgcgcctcctcagtacgctcagcctccgccgcaacaacaccagaattcatctggcccgggttgcttagaaggatgtttggctgctctctgctgctgttgcctgttggatgcctgcttctgagaaagaaaagagaggttgctttgcacaaat

SEQ ID NO: 4358 - DNA, 481 bp, Glycine max
  Probeset Number=SeqID_14137
acgatttggggaacgcatggtccatcgacctcatcctgggcggcgcggggatagagaaaaaaattggtggcgccgttgagcgatttttggcggagattgtgtggggaggagcattggccggcggtcgcgggcggcgaggtagcaggcgttcagagcgcttcgcggctaggtgttcctcggcctggacctcgccggacgggggctatattttttctgcctctttcccatcttctggtcattaatctttctctctttttctttgatttcacctctgcgagatggtggcgctgtaacctcaaaggcatcggcggcgtgctacactgtgtggatgaggtccagcaaggtgttccaaggcatgttggcttgttcgtctacgacgtcgcggacgagctggcgttccgggtcgacaaccctcatggacgtccacagtgctctgctcctctccatcaggccgcagatgtgcttgattaaatcgactgaa

SEQ ID NO: 4359 - DNA, 776 bp, Glycine max
  misc_feature (5)..(5): n is a, c, g, or t
  misc_feature (7)..(7): n is a, c, g, or t
  misc_feature (9)..(9): n is a, c, g, or t
  misc_feature (17)..(17): n is a, c, g, or t
  misc_feature (21)..(21): n is a, c, g, or t
  misc_feature (48)..(48): n is a, c, g, or t
  misc_feature (54)..(54): n is a, c, g, or t
  misc_feature (60)..(60): n is a, c, g, or t
  misc_feature (63)..(63): n is a, c, g, or t
  misc_feature (68)..(68): n is a, c, g, or t
  misc_feature (77)..(77): n is a, c, g, or t
  misc_feature (85)..(85): n is a, c, g, or t
  misc_feature (105)..(105): n is a, c, g, or t
  misc_feature (218)..(218): n is a, c, g, or t
  misc_feature (225)..(225): n is a, c, g, or t
  Peptide Sequence Number=SeqID_7414
  Probeset Number=SeqID_14138
catgncnangttccgangaanggccggagccaccattatgagtagtcncatagncccagnttnccttngctccggtngtagtggngaatggacggatacattccncaggaacagtatgccagattacgccaagctgaaattaccctcactaagggaacaaaagtggagctccccgcggtgcggccgctctagaactagtggatcccccgggctgcagnaagcccnttcataccacacttatcagagtgccttacccggagcttttgcctctggcccttcaccggagcttttctccgaaattggaattttgtagcataaaggaatgattaagtacaccatgatgtcacccttgtaccgtcttccagccttcttcggagggtgaagttgacgacatttataattgtagagtcatctgcattcctagctcagagacatacctgctgaaaaagcacttcctgttactcgaatgttgcaaacgctgaatcggactttttggtttgaatctattggtttgggtcttgagctctgttttcgaacccacgcctctcagtgatcatgataacgacgagatgaaaggacgcgcccaggtatatgtatgaaacgtagaccctagtaaatgggttagcgagggtagtcaactcgaactcacctatcaggaacccatttataccgtcgagccctcggcatacagcagatttatgataacagccactatatctcgtgtgatggggggaatgcacgtactctcgtctcgagggggggcccggtacccaatt

SEQ ID NO: 4360 - DNA, 1419 bp, Glycine max
  misc_feature (8)..(8): n is a, c, g, or t
  misc_feature (55)..(55): n is a, c, g, or t
  misc_feature (57)..(57): n is a, c, g, or t
  misc_feature (114)..(114): n is a, c, g, or t
  misc_feature (163)..(163): n is a, c, g, or t
  misc_feature (214)..(214): n is a, c, g, or t
  misc_feature (281)..(281): n is a, c, g, or t
  misc_feature (364)..(364): n is a, c, g, or t
  misc_feature (496)..(496): n is a, c, g, or t
  misc_feature (613)..(613): n is a, c, g, or t
  misc_feature (617)..(617): n is a, c, g, or t
  misc_feature (654)..(654): n is a, c, g, or t
  misc_feature (686)..(686): n is a, c, g, or t
  misc_feature (831)..(831): n is a, c, g, or t
  misc_feature (1158)..(1158): n is a, c, g, or t
  misc_feature (1191)..(1191): n is a, c, g, or t
  misc_feature (1205)..(1205): n is a, c, g, or t
  misc_feature (1285)..(1285): n is a, c, g, or t
  misc_feature (1332)..(1332): n is a, c, g, or t
  misc_feature (1340)..(1340): n is a, c, g, or t
  misc_feature (1367)..(1368): n is a, c, g, or t
  misc_feature (1394)..(1395): n is a, c, g, or t
  misc_feature (1398)..(1398): n is a, c, g, or t
  misc_feature (1404)..(1404): n is a, c, g, or t
  Probeset Number=SeqID_14139
cacgtcangagctgagaggcacgtactgcatgtcgcaccagacgacgcgtgcgangngcgcgtagtgcacgcagacgctcggcatacgagcgtagcacaccgcagtgggcgagntgcatcgcgcatcatacgcgtgtcagtgtatccgtcatgtgtgatagcnagcgacgccacggtgcgtaggatgctcacgagtcacacacaatcagtgtgncgcgccgtggtactcacaagtatgcacgcagctacgactgacgcatatcgtctctcatatcatatantcactgagatagagttcagacatcacggccgtactgcgaccgacggtccgtcgtacaatcactcgcgactcactcgtcatagncgacgcaggcgcccgaccagccaacgccgtcactagcacaactccgcgaccgagcgacgctgagcagcgagcgcgacaaaccagagagagcctgaacgaagctacggaggcagcgcggaatcagtatcgtcntctagatatcactgagagggtgggcgcgacaaccaccagcacagcacacgcaagaggaagggtggggtgtggtgctacttaactacatccatcatcttcctacacaacgcgatgatngcgngggagagtgtgagtatagtacgtggatacgcatcacncgttcaactttttctatcctcctatcatattnatctctccatctcatccacctacattctttttatcccaatacttacagagagcagcaagtccgcatagtcgcattcggtgcaccgccgccagagttacatataccgccctactcatacacaagcgcactagcatatcacgtctgnctaccttgtactctattgtgtgcgtgtacaaccagtgttgtcggtacataggcgagcgcactatggtgacgctcgcttatggttagttatattgacgcgtgcgcaccctcatcacgctcgtccctctctcttctctcgtgcggtgtcgtctagagcgctggtctcacgcgtcgtctgtgctgtctgcgcttactagttgtatgtattgacatcatgtatattctatgtcatacacatatatatgagtgacatagattagtgtttaatagagacactcctgcttcacgtatctcacatcatcttgcatctcagtataataatataganatatcactgaggtgaggacagagcgaagtgtgngtgttatgttgttntactcgtctcatcagtgacatactgtcgagacaacacgacgcagacacaattgattattacgtcttccctttatttagtncctctcaccgcgaagtacacatcaaaagtacataatatatgtaatanttatattnttcactacatccctacttctattattnntccgcgtgccgcggaggtgggtgggnnggnggcgcnaacgacacaccaacc

SEQ ID NO: 4361 - DNA, 477 bp, Glycine max
  Peptide Sequence Number=SeqID_7415
  Probeset Number=SeqID_14140
agttcttgtacccttccttagcccgcaagcagagtatgcattccttccttgtccctcgccgacgcatccaccgccaagcaacctcgctacatatgcgccgttccttcgtctacccccattgttctaccaaactcgtcggccggtgagcccatacatacacacgcacaggtcggatcagaggtcggagctcgtgcacagtttgatagctgcagcctggaggctggtggcgagaggatcatcggtagccatgaacgggggcatcgggggcacggcggagggggcgcctcgcccgagcacggactggggcccgatcatcgtggcggtgatcctgttcgtggtgctgtcgccggggctgctgttccagctgccggccaggacccgggtggtggagctcggcaacatggccaccagcgccatcgccatcctcgtccacgccgtcatcttcttctgcatcctcaccctcgtcgtcgtggccat

SEQ ID NO: 4362 - DNA, 966 bp, Glycine max
  misc_feature (644)..(966): n is a, c, g, or t
  Peptide Sequence Number=SeqID_7416
  Probeset Number=SeqID_14141
ttcatgcgtccgaaaagattgtgtatattcaccaaaaaaaagaagagagaatcgtgccgaatcgggggagacagagattgggggaagtggaagtgcagggcataagcagcatcgatggaggatgtaacagagaggttctcctgctccaagcttctcgttccaaaaggagaacccattttcgtgaaggccacttggtttcccactcacttccatctcgccgtcaccgacggcatcaccgcctggcactgccacccatcggaggaggaggtgaagcagcgtgctgctcagtgggaccttcctgtttcagagtacctgaacttgtctgagcgctatttggggcttcaacaacccggctctgtctatgcattggatgatgctggtgatggccataagaggttgtcgtggacgtttgagaaggaaggaatgactctgctttggagatggaaatgcttgctgtctcctgattctaagaaaagtaatgtcgaaatattggactttctcatgggctcaaacataaatctaagggtgaatggatgtaaggttctgcagcttaacttgtacactctctttgtgtcattatgtttttgaaacaggtaatttcaggttcactgtatgacattcacttgtctgttttatgtttctcnnnnnnnnnnnnnnnnnnnnnnnnnnnnnnnnnnnnnnnnnnnnnnnnnnnnnnnnnnnnnnnnnnnnnnnnnnnnnnnnnnnnnnnnnnnnnnnnnnnnnnnnnnnnnnnnnnnnnnnnnnnnnnnnnnnnnnnnnnnnnnnnnnnnnnnnnnnnnnnnnnnnnnnnnnnnnnnnnnnnnnnnnnnnnnnnnnnnnnnnnnnnnnnnnnnnnnnnnnnnnnnnnnnnnnnnnnnnnnnnnnnnnnnnnnnnnnnnnnnnnnnnnnnnnnnnnnnnnnnnnnnnnnnnnnnnnnnnnnnnnnnnnnnnnnnnnnnnnnnnnnn

SEQ ID NO: 4363 - DNA, 450 bp, Glycine max
  Peptide Sequence Number=SeqID_7417
  Probeset Number=SeqID_14142
ttcacacaccctcgagtttcctccctctgcgtctctctcttctcgaagaaagctcgcccccacagctccacaatgatcatgtcagaggagaaccgcagagaaatctgcaagtaccttttcaaagaaggagttttgtttgcgaagaaagacttcaacctcgcgaagcaccctttgattgagtcagtaccgaacctgcaagtcatcaagctgatgcaatccttcaagtccaaggagtatgttagggagacgttcgcctggatgcattactattggtttctcaccaacgaagggattgagttcttgaggacttaccttaaccttccttctgatgttgttcccgctactttgaagaagtctgcgaagcccattggtcgtccctttggtggtggcccacctggcgatcgcccaagaggacctaggtttgaaggtggagaccgtcctaggtacggt

SEQ ID NO: 4364 - DNA, 1483 bp, Glycine max
  misc_feature (256)..(256): n is a, c, g, or t
  misc_feature (681)..(681): n is a, c, g, or t
  misc_feature (837)..(837): n is a, c, g, or t
  misc_feature (1308)..(1308): n is a, c, g, or t
  misc_feature (1430)..(1430): n is a, c, g, or t
  misc_feature (1448)..(1452): n is a, c, g, or t
  misc_feature (1456)..(1461): n is a, c, g, or t
  misc_feature (1476)..(1476): n is a, c, g, or t
  misc_feature (1483)..(1483): n is a, c, g, or t
  Peptide Sequence Number=SeqID_7418
  Probeset Number=SeqID_14143
tccttcgtattgctctctatttgtcttcatttttccgttaacctcccacgtagtagcattccgctattctttcccgttgcccgcagcgcgagtggttatctatgtttctcttgtgttctctttatgtgtctccaaaccgcaccgctaggccgggcgtgcccaatggctttatatacccttatacccagcgaatacacaccggcatattctcttggtttgttctctggtccacgctctcttgccagagcggaggcgngtattgcatgcgctctccccgacttagttctgagatagcgtgattgtcgcccagtcgcgagcccccttcccctgtgtggaccatgtgctatctctctcaacccaaactgcatattgtgctctttgttgctctctctaattcctcttccatttccgcttaatattccggtgcacgaaacatttcgcggttacttcgccgagccatttctctcctttaccttccttcctaaatacatatttctttccacattatttcgcggcgtttctcatcctggattaactaaatacatggcgtcagtattcgtacttatgactatcgtttgctatcatcccttccggtgcctcaatgttccccatgccctcgccaatgcacacggctatttcaggcaagatctctcaaactttctgtgccgctcggtgcccttncttttgctccatcgggcgctagttgagctccgactaaatgtgcttgcgatgatatgaattaatgtgattctttaacttgcggactcgtatggcatgcttgccctattagggattcttcgcagtgctatctctacacgtgtgtacccagatgtatcnaaattcgatagctcctcttcacctcgctcccaaggagctctttggacggaccgacatagcagcactgctggtgcgtcgttacttagcagaactacggcgtggacttcttgacctgtcgactactcgacgtgttaatagggtattctcgctgtcgggtcgtaatggttcactatttcatagtgcgattatacgtttgtccattcggtgatgcaaggatgttcacgttgtgtgttctatttttcagtgcctatacggtctctcaggacctttttcacgttgtactggttacagctgtccatcgtctctttctacgctacaccgcgatgccgcagatccgaaatgagtcgttgtacatcccttatacttcatactggcactgccacctatttccattatccctgtgggggaaacaacatggcctgtagggcttccaatactttaggtttgatggtgtaccctccgtctgtttgngttgctctggtatcggagaaaaaaactccttctactcctgtttcgcttttttttgtgaaaatgggtggctatgcgcgccctcgaatgttaattttattttttctttttttctttttttattnaattccctttctccttcnnnnncttnnnnnncccccttcccttttnccccccn

SEQ ID NO: 4365 - DNA, 1560 bp, Glycine max
  misc_feature (134)..(134): n is a, c, g, or t
  misc_feature (627)..(627): n is a, c, g, or t
  misc_feature (1093)..(1093): n is a, c, g, or t
  misc_feature (1268)..(1268): n is a, c, g, or t
  misc_feature (1440)..(1440): n is a, c, g, or t
  misc_feature (1499)..(1499): n is a, c, g, or t
  misc_feature (1512)..(1512): n is a, c, g, or t
  misc_feature (1560)..(1560): n is a, c, g, or t
  Probeset Number=SeqID_14144
attatgtacccccacaatataaaacttactgtctctgtcttttattagtttttttgctctcatactcattatgttttcttcttctaccttgtctcaccaaccttcacttgccccgccgtgtgctgctccccgcncgagttattatttccgtaacaacagttctcttacaatccttctctactgatattgggagcgcggtgtacagacatcttgacatacactagtccgtgtgtctgcgtcatcgctcactggcacgtgcccgtccgcctatataccggcgagtggcctcgccgcgcttaacacacacacgagtcacctcactacgatgtaaatatttagcgcctggcgccggctgctgcacgtgctagcagggtattttatgttttatataattcattaccacacccactcccatctccaacattcctcactatatggcccgttatgttattatatatcgctacattccctcgtccccccccgctcctctttatctactttcttcccaccggcctaacggattattactatagagaaccagctgcaccgcaagccccccgccgatgcgtatagtccggtattataacagcctgcttcctcacccgaacttgtaccaacttatcttcnacgcttctctcattcacataccacgccctcattattttatatttatatctgcaggtgtgcggccagccgctgtcaatcttgtgtttatttatcccccgctaacatccacggattgagtgggctcgcggtctcttttttatacgtatctcaccatttatacctccgacttagcggtatattccttcccctattggcgcgtcgcgtcccccgccgcccctattctacgccgtctccattatatatgtatgatactgtgattatatgctcgcgcgtgtggcgcctatgttgccccgatgccctatacaaacttatgaaaaaacacatcgtctacctactagctacatataatgcctggtcgcgcaaactctcgcccatatacacctactcacgaatttcacgcgtgataagcgttctgcacgactctctatatagaacctcttgattgttctcttccccagtcttgccnctatctacaactctcatctcttatgacacaccaccgcatccgcatataatgcacactatacacggcgggtgggagagcacgacattgatcacacgatcactttttgttcgccactaacttctacacagttatccgcgcgacctgtccttatatgatgtgcgcgtgcattgtcatnctctgcagctactctatattatatctctccgcgcgcgttgcctgtaatctgtaatgttagtaatgcgcgtacagcgcgccttctatatatcatcattatataacactcgtcagttgtcaatcctgttggacttcactcgacgcgccatattatgcttctatactctataatntgtatagtgtcgctattgtgcgagactcgccctcggactcatcttgtgtctgaaacgangctgatgttgtanaccagttctcaagcctcgatttttcgtgcgagtcgatcgcgactacan

SEQ ID NO: 4366 - DNA, 614 bp, Glycine max
  Peptide Sequence Number=SeqID_7419
  Probeset Number=SeqID_14145
agcaaagcaaattgatctcttgcacacaccactcaacagagctagcagctagctatagcggagccgaacagagtgcagcagagtactagagtgtgtttctcggcatgtcgacaaggctggccgcggtggtgcggtggtgcggcggcgcgcggactgagcggccgaggctgcgacgacggcgcagcggcaggacggtgcagctcggcgggcggcgcaggaacggcagccgcgggtgcaggctggccgtatcgcggctggtgcggtggcggctggtggccgagctgctgcggcccatcaggaaggcgctgcttgagatggcggccgggcggcggcacccggtggccctgccgctggtcagcttcccgttcgtcggcgcgctctcgctcccaggcaccgtcgcttgacgcgagacgggcgtccggcgagagcgcgagaaggcgattcacttcacgtgtggtgtaacgaatccgttgggagttaaccacgacgtggagtgagcccttgtccgctacaggcttgggtacaaatcaccgagtaggatacgtattggctagtttagctcctcttgtaaaccccgtgtaaactataccagatctcaaatcaataatattctc

SEQ ID NO: 4367 - DNA, 1601 bp, Glycine max
  misc_feature (51)..(51): n is a, c, g, or t
  misc_feature (341)..(341): n is a, c, g, or t
  misc_feature (1043)..(1043): n is a, c, g, or t
  misc_feature (1093)..(1093): n is a, c, g, or t
  misc_feature (1178)..(1178): n is a, c, g, or t
  misc_feature (1192)..(1192): n is a, c, g, or t
  misc_feature (1212)..(1212): n is a, c, g, or t
  misc_feature (1297)..(1297): n is a, c, g, or t
  misc_feature (1299)..(1299): n is a, c, g, or t
  misc_feature (1327)..(1327): n is a, c, g, or t
  misc_feature (1349)..(1349): n is a, c, g, or t
  misc_feature (1424)..(1424): n is a, c, g, or t
  misc_feature (1441)..(1441): n is a, c, g, or t
  misc_feature (1515)..(1515): n is a, c, g, or t
  misc_feature (1518)..(1518): n is a, c, g, or t
  misc_feature (1546)..(1546): n is a, c, g, or t
  misc_feature (1601)..(1601): n is a, c, g, or t
  Peptide Sequence Number=SeqID_7420
  Probeset Number=SeqID_14146
ttattctcctcacttcccaacccacaccccccccagcgacacttctcaccncccctccgctctcctctttatataatttgtttacctcccctcgtcgtgctgcgcgtgcccgccttctatgaagaaaggatgacgtaatcaagaagcgcgtgaaatctcttccttcgcagctgcactccagcaccattctacattctcctactcatgtccttgaagaccgaatctcttcttcatcctcgctataatagcacttagaaatccagatcctaattatagcaccccggctatccctccgcaccatcttcataggtcgtctcatcaccccacgcttattctagctngagaactcctcttcaccaccatgaatcgtaataccattatgcgctcccgctctcgcataatcagtgtttcgtgctcagacgctgcacatcaacactacgcgccagtctgtcttttatcgtttcatttcatgacaaacctctcgttgctattcctgacctatctcaccgtaacgctcaaaatattgttcgacctcgcactgtatagacccaacttgtcgctgcctcccacacccctgatcatccggaaatgtcttggtaacttctcaatgaaaccaccaaaatcgaatgcaacgcccccagtattttcgcttcctctcgccgctgacacacgccctggttttatatagggcttcctttaaaccattctggctctggaatatcgcgcttccgcccacacataccggtatcaattatcccaccccatcctcaaaccctctcggctacaacgtaactcctctacttgaagcctcttgacggtgcaagcactccacctttgtgcctaagtctccgtgaccacttcgcgtaccctctgaacgcaaccacatatatttctgtcctttcctctgtctttcacgatcttggcgtttacttatgtatatctatacctcactatctccttcggacaatcttgatacggacgatcacactggttacttcacatcctctggcgatgccaccgcgcgcgaccacacgcactcgcantctctctatgtgactcttacgcacaggctagtcatccaatagaggcatcncacttcactctacttcggtctacgactcacatcatacacatcataattatcgtcattgctgtctgctctactactaactgatacncacttataacgggngtgaattatatctctgaaanattgtgacatcctctcttacacatccgcgcaccccacgcggaatctgcacatattatatcttccgatgcacactccgacataacncncacactactgctacacagtacttccacntctcctcatcgcacacgcaccnttactatgcatgtatctatcacgcctctattagtagcgtcacagctcccgcggtgcatatctatgtatatcttanacggccattgctcatcntgtgagatacattagcacatctatctgtatcacaatgatctaggtatattttactaatatatacctctcatagnccncgattctctgagatcgtcatatctatanatgtaaacacaatcatccgcactactgactcgcctacccactcgcactcgccccn

SEQ ID NO: 4368 - DNA, 542 bp, Glycine max
  Probeset Number=SeqID_14147
tttaacttacgattgcccattaaattcagtttagtgatatgttaggtttctcttaaaagtatgtttacagtttgcacattatatttggttgaaacctagtttcaattgaaaacaacaccaaagttgtttttacaaacgcactttgcaaaatgaaatctattcaaatttaagttttcaaactttaatccaaacatggaccatatcatcaacctgtgggatgagtagacagaaaaaaaaaaatctatttgtgggtgctcgccttttccctgaccgatttaacataaagattgatgtgattcaatttgtagcaagtttttgtcggatatgtaagttctagatttggtttcgtcttgataataattaaattttaaagttaactatgaattagttttttaatttcttttataaggttttagtgtttatctttatgtattatttaaaatgatatatatatatatatatcacacacacatgcatgcaaaaaaaggactagtcgggttactcatttttcatacattggctgataaaaaaaaaatatacat

SEQ ID NO: 4369 - DNA, 552 bp, Glycine max
  misc_feature (545)..(545): n is a, c, g, or t
  Peptide Sequence Number=SeqID_7421
  Probeset Number=SeqID_14148
gttccgtatcctctagagaaccaattttgtgccaaacacaaagagagcttccgatcctgaatttgttcaagtcgttcacagaacaagaatcggtcggtcaaaatgatcatgacaaggagcaagactcaacagatgaaggaagacagacttagtggattgcctgatgaaattttgtttattattatgtctttcataatgataaaagatgctgttaaaacatgcatcctgtcaaagcggtggaggaatttgtggaaattcctccctaatcttaccttacattctaatgatttcagaagtcatagtgttttctttgaattcgtgtcgagaattttgtcttgcagtgatcaaaaccataccctgcatagtctagatttccatggtcctttctatggtaaacccattgttatgacaaatctcatgggctacgctgtctatcataatatccaacacttgaacatcaatgtcccttacaacatttctttatccgcccgtgttttctcttgtccatctttaaaatctctccgtatatcagtgtcacataatgncctaaaa

SEQ ID NO: 4370 - DNA, 435 bp, Glycine max
  misc_feature (368)..(368): n is a, c, g, or t
  misc_feature (375)..(375): n is a, c, g, or t
  Peptide Sequence Number=SeqID_7422
  Probeset Number=SeqID_14149
tcccccgttcaaaccaagctccccgagcccccaattccccaaatccgcccttcccgttcccgtcaagcacgcggcgatgccgccgaggaagaagcggggggctcgccccgccgccaaccagccgccgccgtcgccgcccaagccgcccggccccgacgcgtcggtggaggagaagctgcggtggtccgccgaccaagagttcgtacgtcggaaagctgccatcagagctattcaagcagcagagactgagagcatactctcccggctgcacttggtgcgatcctacatttccaaggagcaactagaaacacccgccttgcaattttttcaggagaacttgcccaacgtgtcagttgtacggaacgaanagcaggntgagcttgagttgaaatggaaagactgggatgatctcataaatggagaccagaggcatga

SEQ ID NO: 4371 - DNA, 1470 bp, Glycine max
  Peptide Sequence Number=SeqID_7423
  Probeset Number=SeqID_14150
gtggcccccccctgggggtcgtatgggcggggatatgtggaccgtatcccgcctctgtttgtctttttttattttcactttggcggtgtaaaccgtgtttataaccttccccgcgcggggcatgttgtttaattatttgtcaccctgtgtccccccacccctcattcctcattgacagccccgatggtttaaccatattcctccgcgtaatggtataggtcgggctatatcttaattaaggccgcgccgtcgctggtatatcccccggtatttgacaataatgtgtctcaccccccgcgtatatatattcccatccgccaatatgtattaattgtttatccggggacgattaaaataccgcggagggtgttcgccacccccgccccacaaaaaaaaccggagaaatgtggtttacgagtccgcggtggggagaaacttacaaccgtttatgaatcggcgggctgcgagtgtattatgtagtatatagacgcgcggcgaagaaaatcgcgaatgagcccgaagaacgaatactgtttgaatcgctctcgccccccgtctgtattaattgcgcggatttaatgcgaaataagcgtagcgcgcaccgcgataacaaacaccgcaggcgggcgggagcatgataaaattaagggggggtattatgtgagatagaaggtgtttgtatgagagaaacctgctgcctccccataataacatattaaaagggccgcgaggggtaagaataactcggttttcgtacaaacacatatgtgtgtgtgaatacgtctacgccgccgttttgttatcgccaactacccggcgtatcgtgtgtgttgtaaacgtaacttggtgttagtttcgactgccagcctggccgtacaagtaataagtaggatctactatattgctgtaagaagaaaacatgctgggcgtgcgcgaaaagaccgccgagacaggatgtcgggacgatatacggtcctcccctctgccttcgcacgagtttattagagccgcgacctatgtgtgcgtgtcgtcggatggatgttgggtatataaaataacgggcgggccgatagattaaataagcgcgcggcgcgggggttataaggtgtggaggaaatacatgcgcgccaggcctcgcgcgcgcggcaatatagtataatacaatgtagtgttgttgatacaaacgtatgtagcggcgcgtgatagtatcatgcattatgaatagtcggccctctgtgggcgggcgtattagctgtatagataatatatatatcgcgacgcgccgtcagatttctgcgcagcgtcatatatcgagagactgagctattaatcagcggccgcggccccgcgcgcacatgagaggactattgtagggaatgcgagtcgggcgcggcgcgccgtagtgctgatcacatctgtgccagctcccaccgcatattaaaccagcgaagttgcgacggcgcgtgcgca

SEQ ID NO: 4372 - DNA, 2651 bp, Glycine max
  misc_feature (1)..(1): n is a, c, g, or t
  Probeset Number=SeqID_14151
ntcatactgaatactgtttatcaatgtatgtcatgggctcatggctacctaaaatactgttacaaaacaaagcttcttgctactttaaatcgagtgcagatactattgaaaaatcttatactgttacaaagcttctgccaatccaacttttgtggactagtaaagtattttccactacgctctaaacttttcatctatgattctttatttaaaatataaatgatttattcctgtgcgcacatgaaattctcgtttttatgctccacattgaggaccataataaaacaagaaagataattacattttcagtgaaaagaagcctccactaacgccatataatgtactctagtccttatttgtaggataggaagtttatagcaaacaattttcagtctcagaaactgagtgttaagggaagaactcctcaaatggagacacctttagtgatccagaagttcacttcagaatctgactacttgccggtgaaaagcttgaaggatgttaagtttgttttgtggacagagacagtgaagatatggagaatagcattccctatggcactgtctgcactgtttcagtttctcacaatctcctcaacttccatctatgctggccatattggagacattgaactctcttctatctctgtttaccaaggtgtcatcagtgccatctatttttacttgttgtttggtatgtcatctgcattggtaacactttgtggccaagcttttggagcaggacaaattcaatcaacttgtatttatgttcaaagatcatggattatacttactgccacttgtataatcctcttgcctatttatgtatatgccactccaatcttaaagtttattggccaagaccaagaaatagctgatgttgctggaagatattctatacaagtaattccctacatgttttcctgtgctatagcttttcccttccagacatttcttcagtcccagatcaaggttaaagttattacgtgcatagcacttgctgttttggtcatacaaaatgtgctgctttacatcttcataaatgtatttggttggggtacaactggcttagccatggtgactaatatcatagggtgggtttatgctgcggctttggttgtgtataccattggttggtgtaaggaagaatggactggattttcatggatggcatttagggatttgtggtcatttgctaagttaagccttgcatcatctgttatgagttgcttagaccaatggtatagtacatgcattattctccttgctggtctactagacaatcctgtgattgatgttggttcctattctatttgctttaatgttcagggttggcactcgatgctgcttcttggaataagtgctgccataagtattcgtgtctcctatatacttggcaagtcgcatccaagagcagccatatactctttctgcgtgacaatgtttcagtctctcctcctcggcattgttttcatgactgtcattttcttgagtaaagatgagtttgccaagatctttaccaacagtaaggatatgattcgagctgttgctgatttagcataccttcttggcgtatcaatggttatcaatagtgcttcacatgtgatgtcaggcgtggccgtggggagtggatggcaagttatggttggttacataaaccttgcatgttattacattgttggactccccattggaattttccttggtttcaatcaacatttaggggtcaagggtctctggggaggcaccatgtgtggcaggattcttcaaatgttagtcctcttagtcattatttggaagaccaactggtccaaggaggtggagcaaacagctcatcgcatgagaatatggagcatcaacaacctccactcggatgccatgggaaatgttacatgagaaatagcaacgtttcattttactgaaattaataaaattatgtaaaaaattcatttaataagaaatgaatcttacataattttatattttcttctaaacttcaagataataacatagagtatgtttaaaagaatatggtaaaagagtgtgcagttaaatccatttatggtttacatatgtccctttactttggttgattgatctagtagaactgtagaagacgacttgtacacagtcactatgtagagttaatggacccaccaaaaaaaaaaaatgtagagtttatggagtcacgtctcaaaaaaaaaaaaaaaaaaataacgggactagtcttgtgtgaaataggttcttttttaagtaatatcctcattgtcattaattttctctatatgagtcaaagaggttattttatcaataagctagaagtaaaactaagtgggggttgtttaaatgggttcctactacacacttttttccattttttttcttcattttccattgaattcaataaaactctttctatttcttggtttcctcatatattaactttggaattttaagctttaatgttcagggttggcactcgatgctgcttcttggaataagtgctgccataaggggaattcgattgaccgcccttaaagaaaggattaaattccactgatcatccttgaagttccatgtaattatataaacttttcctgctttttctatccttacactaaccctttaattgttggaataacattaaaacct

SEQ ID NO: 4373 - DNA, 316 bp, Glycine max
  Peptide Sequence Number=SeqID_7432
  Probeset Number=SeqID_14152
ccgcggccagggtatatcctcttctgctttgccctactataggacacctgctatctggctcaaaatctgtttgcttgatgtctataaaaatatttgcaagtatgcgaataatggtttgacctcgtctaacattgctgtcattctcagagattgttacggtattgctcatgtcaatagcgtcactggcagctaaatccttcgcatcctcaaagctcacagacttgcgcctgagattccagacgacctgtaccatcttgattataggtgtgtttcaattcaagaagccatcttgagaaggaaacacaaacgtacaaag

SEQ ID NO: 4374 - DNA, 1611 bp, Glycine max
  misc_feature (29)..(29): n is a, c, g, or t
  misc_feature (957)..(957): n is a, c, g, or t
  misc_feature (1177)..(1177): n is a, c, g, or t
  misc_feature (1383)..(1383): n is a, c, g, or t
  misc_feature (1403)..(1403): n is a, c, g, or t
  misc_feature (1466)..(1466): n is a, c, g, or t
  misc_feature (1519)..(1519): n is a, c, g, or t
  Peptide Sequence Number=SeqID_7433
  Probeset Number=SeqID_14153
ctcccctcctcctccccccccctcccctnttatgcgtaatataataatcacaaacacaatcacttaaaagactgactgcctcccaccgtcgcctgggcgtgcccgtctcttttcataaaagttggaatcccccccgcggccctcgcaggtaaacccgacaacgaagcaccactatacacctagtaatatccaatacatacagaaatacacgtattacaggcattcagttatactccccatcatcacgattatgatactaccgaactcatacgatcgttatggtttcgtttcttccgttcctaacgtctcgaactagttcgttcatcacttctacgtatactcttcgttgtgttcgatctaatcgagatttacgaccagcagtcacgcaatcacgagtaacgaccgttcagctctgacgtaactaatcacgacgtcaacacatttcttcacgctatttacgcaccgcacgctcccactcatacgcgcgctcgcatcatagtacatcacctctcgaccagacaatagcatctgcactaccacagtcgctacgcctccctttatcttctcttctccctcttactccctcctcccttcctcagagtctacctctgatagctccacaatttcacctgagcagccctctatgctcacccatgaagcttcatctatttactactgcctccacctcaacctttcacattcgatcatctacaaatccttgtacaaatgatttgacgaacacttctcctttctaaaccaccgacactccgtatcctatacaatgacatatcaactctttacaccacaccacatatatacaagaccacgtatttacttaacccattactctctcgtagtatcattggacctaccacactactgataacgcgcagagacacagctcacgctacccagaacatagacgtctcacgaaacacagtcactctgtactatctnacttaagacatctacctcgctttcactcacctcataccaatacctattttggtacatgcactgatgagtacgctctcgaacaacactaatgtatacccataatccatagcgtgatagtcactatatcgagtccactatctactacactgagagcatgtaattcatcatatcatagaccgacctcgtgagacacacttactatcatgagtcaataaaactnctagttaactatacgattatatccttcatctactatgcgtcacaacgcacacacatcataatatacaaatcttgcctatcgtcagccatactcatagtctcgacacacatctctcgcattgacatatataatctatagattaatctataacagcaccattctacgactctgatatccagcttaacgctatatatcaattggtgtanctacatgcgatactagtacncgcacacgactctagacagagacctacatgacatatacactcaactcacacatgtaccatcgntcacagtatatacacacagatatactgtgaactagtcatatacagctcatagntattatcctacaacttactcccctatactgatggtcataatatgagctacactacacagcgtcaccacttctcctctttaactgtcaactaa

SEQ ID NO: 4375 - DNA, 416 bp, Glycine max
  Probeset Number=SeqID_14154
cgcacccgtgggcggatgccagaagacgacatacgggcaccttacctcaactcaaacctgaggaaataactaccataagtggtgactataatgagcctgtatcactcactacaactggattgtatatcgtgggcaccaaatacatggtcatccacggtgagcctggtgctgtcattcgagggacgaagggtcctggtggtgttactgtaaagaagaccggtgcggtcttgatcattgccatttatgatgaaccaatgactccaggtcaatgcaacatgctagtagaaaggctcgtcaattatctcattgatcacggtctctaatctatgctacatgtccagctatcgagcatattatattggcttgtgtacactttcttgcatacacctggactggaatgcttggatcgcaatgta

SEQ ID NO: 4376 - DNA, 579 bp, Glycine max
  Peptide Sequence Number=SeqID_7434
  Probeset Number=SeqID_14155
accaataatagggatatgagaaccattagcaacaatgatgtgttggttaccaattaaaaaggtgtaagatgaaaaataagaagagagcggcgacctgggcacagaaaccccggtgcctctgaaataagtacacgattcagtttgttttttttattttaattgagctcccaaattgtgtctgaattatacgataaaagtttggaaaaattcatatttgtcttttaagaaaaacatccaggtagccccagtgcagacatcaaaaaaaggaacagcccagcgccctccactacgactactactacgtgcatgaggccagatagtctaatgacggcagtacaaacgttaacaagtctaattgatactggctatactttccagtaagcagcacggaaggcgttgcactccatataaaggagctcagcgctttagggtgtcactgggcacggacattttagctactcctgcaatgcaggctcccggacatggggcagaactacatccccttgaaatggaggaccttgtccggactatcaaagtactactttgaatacggggggggggccaacgtagctgagacga

SEQ ID NO: 4377 - DNA, 480 bp, Glycine max
  misc_feature (424)..(425): n is a, c, g, or t
  Probeset Number=SeqID_14156
aaggagtaagtcctgcccggaacaccaacagcattggggtgcgtataaacacccggggttgtttcgagcaattgatagctgttgccggcattgtcccggatctttacaaccgcacccgaaacaggagggaagctgttattgtcgctgaacctgaccgaccgggtgatggtgacactggcaggcccctggttgttcacgatcccttcaatcacaacctgcgaaggcgcgttgtttaaattaacatcgatcacttttttacaggaagcaaaaaggagcgacagtatcaacaggcggtatgtatattttgtaagggttgacatgtgatcatcagaatttaaaattccaggtaatactcggaatgaatttgaacaaagccgttcgtaaagcctgtgttttttccgggtgatcgggatcatcctggaanngtaatggtataggcattctcacgaccatacaggttgtatataccgaaggtccaac

SEQ ID NO: 4378 - DNA, 664 bp, Glycine max
  misc_feature (664)..(664): n is a, c, g, or t
  Peptide Sequence Number=SeqID_7435
  Probeset Number=SeqID_14157
aaaacctgtgttgctagggttagagaagagagaatggcgagactcccgatgttcgtcgcctttgccgtccgccgcgcggccaacgccaccaccgccgcggggaaggccatctgggacgggaaggggctgctgctggtcggcggcgccacggtcgccgcctgggccttccgcgccgacctccgccgcctggcgcaccgcctggcccaccgcctgttctcagacgacgggttctccggtcgactcgactggggtctcagggttaagggacggcgcgaggacaacagaggggcgaggagacagctcgggcaagcgcaccagttctacacgcggagccacgggggggcgggcacccgctgaatcaggttatcagaatgggtgaataccgaacagagggttaggcataaatggagatacactttcggttaacaaactagtggtttagtctgcttatcatctttgaaccgtcgtctattgctgttgaatcagtgcacagaaaactagtgttttcatcctgttatcatcttattatcgctgaatctgagacttatgacgtcgtctattgctgttgaatcagtggacaaaggttatgatatatatgatgccgggatggaaatttttgcaataaatcgtcgtcatctgttgctgcttaaaaaaaaaaaaaaan

SEQ ID NO: 4379 - DNA, 1595 bp, Glycine max
  misc_feature (89)..(89): n is a, c, g, or t
  misc_feature (92)..(92): n is a, c, g, or t
  misc_feature (101)..(102): n is a, c, g, or t
  misc_feature (106)..(106): n is a, c, g, or t
  misc_feature (109)..(111): n is a, c, g, or t
  misc_feature (116)..(116): n is a, c, g, or t
  misc_feature (142)..(142): n is a, c, g, or t
  misc_feature (153)..(153): n is a, c, g, or t
  misc_feature (245)..(245): n is a, c, g, or t
  misc_feature (325)..(325): n is a, c, g, or t
  misc_feature (356)..(356): n is a, c, g, or t
  misc_feature (462)..(462): n is a, c, g, or t
  misc_feature (465)..(465): n is a, c, g, or t
  misc_feature (641)..(641): n is a, c, g, or t
  misc_feature (673)..(673): n is a, c, g, or t
  misc_feature (774)..(774): n is a, c, g, or t
  misc_feature (835)..(835): n is a, c, g, or t
  misc_feature (839)..(839): n is a, c, g, or t
  misc_feature (1169)..(1169): n is a, c, g, or t
  misc_feature (1260)..(1260): n is a, c, g, or t
  misc_feature (1272)..(1272): n is a, c, g, or t
  misc_feature (1274)..(1274): n is a, c, g, or t
  misc_feature (1332)..(1332): n is a, c, g, or t
  misc_feature (1390)..(1390): n is a, c, g, or t
  misc_feature (1393)..(1393): n is a, c, g, or t
  misc_feature (1402)..(1402): n is a, c, g, or t
  misc_feature (1442)..(1442): n is a, c, g, or t
  misc_feature (1477)..(1477): n is a, c, g, or t
  misc_feature (1481)..(1481): n is a, c, g, or t
  misc_feature (1496)..(1496): n is a, c, g, or t
  misc_feature (1551)..(1551): n is a, c, g, or t
  misc_feature (1563)..(1563): n is a, c, g, or t
  misc_feature (1595)..(1595): n is a, c, g, or t
  Probeset Number=SeqID_14158
tggttgtgtctccttctcttttcgctttccttgcgtcttcccaccgcccgccactcgccgacttatcgtcaccgtattctctctctctntanaacacaaannacanaannngagangtgtatagaaaacagtacgagagacnctaccacattnacgcacgacaaacatatcacgcacaccacattctcccgtcggacagagacatatcatccacaaccaaaccataatagaaccatagatagaanacagacaacacagccgagcgtctgtcactcgctacgtctcattcttctccctgtcttcgccgttctctctctctatatanatcacagacactctactctccactactacgnctcatctcattccttccacctccctcgtgctcccgctccatatcacctcataattattcctatatcatccacattacgtctatcgatcatcacgccacacgaaggntangagtgatttatgtgtcggtagtataagttaatgacgtagtgacgccacgccgcgacgcgccagaccgcaccaagatagacaatgagaaacaaagagaggaaaagattgtaacaagaacaccatcaacaagatgtcaacacactcataacaatgcttatatatcctgatgactgacnacaaaactacgacatacaaatgaggtgacatnctatgagtgtctgtctaatcatgtgaccaccgtcgcacttcttatatgcgtactacgcatcttctctacttctaactactcattaactacatgttcgtatnatctgctgtattaccttacagcgcagacagcatgaagtggagtctggacgtcttggacgantctngtacacatggtcgcgcggtgaagccacgcgaccacacaggaatcggaatgcacaaactgtggatccagtacttgtaacatcacacacggtgtcacagcgcgtacaatacaataatacgtgtactctatagattcagagatgtgagtgatgtgtggtggtctaataataatagacaaataacaacattaatgcgacacaccacaagcgcgcatcacacacacacctggctgtggctagcgtgtgacaactatacaccaacacagacacacctacacaactcactcatacaacagtgcatggcgggcgataatataggtacatctgtcgcgncatgaggcagacacaaactgtcaacgacacgtacaccatcacgtgcggcggaggcacatgacaccctcgatatgcatcaagacatccatcngtattgcgctcngnagtgaatcttcgtgtcatcatctgtctacacaacagcaacatacatagatcactgcgncgtggatacacacacacagcactagctcacgtcgcgacgcagagtgtgagatgactanacnaataacatnagagtgagacgacacagacaaaaatatatgcgcaactctntagtggctggtacacatgtggctcgtgtcgatctnatantataatagagttgtngtggagacatagactgaggagagaagtgagtgtgaacacaggcgagtggtgaganattgatactatnacacaacgcatcaacgtcgtgtcctgctgacn

SEQ ID NO: 4380 - DNA, 1950 bp, Glycine max
  misc_feature (14)..(15): n is a, c, g, or t
  misc_feature (20)..(24): n is a, c, g, or t
  misc_feature (27)..(28): n is a, c, g, or t
  misc_feature (63)..(63): n is a, c, g, or t
  misc_feature (65)..(69): n is a, c, g, or t
  misc_feature (71)..(74): n is a, c, g, or t
  misc_feature (76)..(77): n is a, c, g, or t
  misc_feature (83)..(84): n is a, c, g, or t
  misc_feature (89)..(89): n is a, c, g, or t
  misc_feature (92)..(94): n is a, c, g, or t
  misc_feature (120)..(122): n is a, c, g, or t
  misc_feature (124)..(125): n is a, c, g, or t
  misc_feature (166)..(166): n is a, c, g, or t
  misc_feature (168)..(168): n is a, c, g, or t
  misc_feature (173)..(173): n is a, c, g, or t
  misc_feature (182)..(182): n is a, c, g, or t
  misc_feature (188)..(188): n is a, c, g, or t
  misc_feature (217)..(218): n is a, c, g, or t
  misc_feature (237)..(237): n is a, c, g, or t
  misc_feature (257)..(257): n is a, c, g, or t
  misc_feature (268)..(268): n is a, c, g, or t
  misc_feature (277)..(277): n is a, c, g, or t
  misc_feature (282)..(283): n is a, c, g, or t
  misc_feature (292)..(292): n is a, c, g, or t
  misc_feature (294)..(294): n is a, c, g, or t
  misc_feature (324)..(324): n is a, c, g, or t
  misc_feature (343)..(343): n is a, c, g, or t
  misc_feature (345)..(345): n is a, c, g, or t
  misc_feature (347)..(347): n is a, c, g, or t
  misc_feature (359)..(360): n is a, c, g, or t
  misc_feature (364)..(364): n is a, c, g, or t
  misc_feature (375)..(375): n is a, c, g, or t
  misc_feature (377)..(377): n is a, c, g, or t
  misc_feature (379)..(379): n is a, c, g, or t
  misc_feature (403)..(403): n is a, c, g, or t
  misc_feature (412)..(412): n is a, c, g, or t
  misc_feature (473)..(473): n is a, c, g, or t
  misc_feature (561)..(561): n is a, c, g, or t
  misc_feature (602)..(602): n is a, c, g, or t
  misc_feature (615)..(615): n is a, c, g, or t
  misc_feature (685)..(685): n is a, c, g, or t
  misc_feature (693)..(694): n is a, c, g, or t
  misc_feature (699)..(700): n is a, c, g, or t
  misc_feature (702)..(702): n is a, c, g, or t
  misc_feature (706)..(707): n is a, c, g, or t
  misc_feature (709)..(709): n is a, c, g, or t
  misc_feature (714)..(714): n is a, c, g, or t
  misc_feature (717)..(717): n is a, c, g, or t
  misc_feature (743)..(743): n is a, c, g, or t
  misc_feature (757)..(757): n is a, c, g, or t
  misc_feature (806)..(806): n is a, c, g, or t
  misc_feature (820)..(820): n is a, c, g, or t
  misc_feature (824)..(824): n is a, c, g, or t
  misc_feature (826)..(828): n is a, c, g, or t
  misc_feature (830)..(831): n is a, c, g, or t
  misc_feature (833)..(833): n is a, c, g, or t
  misc_feature (914)..(914): n is a, c, g, or t
  misc_feature (989)..(989): n is a, c, g, or t
  misc_feature (1001)..(1001): n is a, c, g, or t
  misc_feature (1305)..(1305): n is a, c, g, or t
  misc_feature (1375)..(1375): n is a, c, g, or t
  misc_feature (1382)..(1382): n is a, c, g, or t
  misc_feature (1408)..(1408): n is a, c, g, or t
  misc_feature (1461)..(1461): n is a, c, g, or t
  misc_feature (1666)..(1666): n is a, c, g, or t
  misc_feature (1828)..(1828): n is a, c, g, or t
  misc_feature (1858)..(1858): n is a, c, g, or t
  misc_feature (1864)..(1864): n is a, c, g, or t
  misc_feature (1869)..(1869): n is a, c, g, or t
  misc_feature (1878)..(1878): n is a, c, g, or t
  misc_feature (1909)..(1909): n is a, c, g, or t
  misc_feature (1923)..(1923): n is a, c, g, or t
  misc_feature (1927)..(1927): n is a, c, g, or t
  misc_feature (1950)..(1950): n is a, c, g, or t
  Peptide Sequence Number=SeqID_7436
  Probeset Number=SeqID_14159
tttttatttttttnnttttnnnnnaannttttttattgtttgttggttgtgtttataatatangnnnnntnnnngnngaagannaccanaannntgtagagagagtgtcacgctcaacannngnntggatggcaacatgatacacatcttacaatcacttctcccncncatantctatagcntcacancataccaccacataacaacaccaaagagnngcacaccagacaggctctnacataccaatatcctcaccntactcatgcangcagccctncgcgnnacccactcncnactgtcttggctacatctattatactgctngccttctctgtactttgtntncnacacgttctatnnggtnttgttgtgtgntntntaaagatacagatcatgcgctagnggggactanaacgcgcgggccagcggcagagtgaatacgccgagtgcgtgcatgcgtgtcgataaatatntttatattattaccttatacatcccaatcacaatctattattgagcagccgagacacacaacactccagacacggtgcaggatgacancgacgatataacattagagtaaaacaactgtgtaacacatncactacgctgctnatatttatgcgaggaggtgtcacgggtgatgtatcatatacgcagagctcacaagcactgccgagcacantggggggnngtatnncncctnnantcaanaantcagtactctaatgcaacagactaanatactatctgagcngctacttgcgcctccacactcgtctctcttccctacctcacacctcttncgcgtgtgtccggngcancnnnanntntctctccgcgcatcgctgcacatccgtccgcgcgggcgcgcgcgccggatgggatgctgaaatcaccacagacgcctcccnactcacattgactcatcatcgacagccttccgaaatctacataacgcaaattactgtccacgctgcacgtctcgncgtctcttactnattcactgctgtatgatattatttgtgtgtcgtgttctctatagacaatatattattctatacatatcatcacacacatggacagctagatggctgcggcccgcaaccgctctactagtatattgtctgtacgtatatatataataactctcttgtacacacgcgactcacaacatctaccagaacacggatgtatatatatgatatgactaatatctctattgtgtcttgacatcccacccaccctccctccactatactgatatcactatatgctagtatatgctctatactctctttatantctacctatatcacacggcacacaaataacatatataagatataatgtagtgtgtgttgacctcttctgntcatcanatcattaaagagatgcgcccgctacncactattctctcgcgtctgccactacatcgccgtgatatatactaaaattatntatatcacctccctctcacatacatcacctctgcatcatctacatataacacatcatattaatacaacataagctctatattactaacatgttattgtgttctatattctgtgcgcgcgcacttaatacaaaacaaaagatattcgaacgacccacgcgcgtgtgtgcccgcgcgctagcgtgtagcacgtacctcaacacgctntacgtatcatatatattataatatctatgtctatatacttactgagcaccactattctaattcactgtaatgcatatacaataaatacgatcatagcgcggaccagcaccgacagacctactccctcacacaccaccacacgagcgtcaacactatatagantctctaccgcttcatcatgcacacgtgttnatgcgncgagnctcgtatantactactatctctacccacagctcgatgtgngtgtctgtgatgtntttncgatgtatcatccacatctactn

SEQ ID NO: 4381 - DNA, 331 bp, Glycine max
  Peptide Sequence Number=SeqID_7437
  Probeset Number=SeqID_14160
ctgcagagtccagtagtaaggcgaagatccagctgtacccgacgccgtactacgtaaatggcttggagccgctgatgaaccagcagactcttgagtaacattgggggaaacaccacaagacctaggaggaaattctgaataaacaacgagtagggacagagctcgaggggaaatcactagaagagattatagggacatcatataaattgggagacattctcccagctttctacatggcagcacaggcatgcttggctcgtaaccagaaactcttattcatgtttcacaaccatggcttaggaatcagttaatcaatcttgtaatgcgtact

SEQ ID NO: 4382 - DNA, 1433 bp, Glycine max
  misc_feature (1353)..(1353): n is a, c, g, or t
  misc_feature (1368)..(1368): n is a, c, g, or t
  Peptide Sequence Number=SeqID_7438
  Probeset Number=SeqID_14161
aaccccacccacactcgtccaatctttattctctgttccatttgtccccccaatccccccccgccaattttgcgttcgatcttcaatcccgctcctcctccttatatccagattattgtaccctttctcctccgtccccaaatgataagtggaactatttgttaacgatccccgccttacacaaacaataaactctttccaccccaaccagggattgcacacatatctccgcaccaaattattactctcccctactattttatattcttaccccacgattccaccaaaacatcccgctaagaaattaaaaatttctcttctccccccttatattttatatccctacccgctatcgtatctcttctagtattccagcctttattagaagccgcgggtggtttccccccccccccccccaaacaacaaataacctcttttatcacctcctctgctgcttaaatttttcccccccagcaatagagaccgcccgcgtcagaataaatattattatatgccaacgcatatcccgtttctccgcacatacggatcttttcttcttcttccccccccccagttattaatgcccgcccactagttatatacgccacccccccggtgtaaaaaacacccctgggggtgaggaaactataagaacagtcccgataaaattacggtcgttaattgtttgacccttcaccacctcgtctaacctaataacgacattataagctctgtgtgtttaaaatatcccactaccaccaaaaacatttgtttataccctccgcacccttttattatactacatacccgcgtgactttggttatgtacatgacttttgtatcttaacatccacgcggttgtaccatactacgcgcggttatatgctctatatgttacatacatgtaattctgtgtattatttgagaatgatgaagtaactacataatacgtctgtattatcatccattcacgagaatgaaagcgcgacagttaagtcatgtgacgactatattatatataataaaataaacgcggacgcgcaattaatagcgccgcctctctcggaataatagcaatgatagaattaccgccctactcgcgcgcctcacgcaaatataaaaaccatatgattagatgtataataactcgcactgacagccgacacatgctgatcgtcctaaacaactacgtccgcgccgcggtccggcggcggtatgggaacaccaacgcgtcatagacaccggcgcgtcgctgatatctcgcgcgcacaattactcgcctcgcgatatatgtgtacgcgccccgcgccgcagatatatgtacagagtaatcacgacgccgcagactgcctncgcacatgcgaatantgactatactatcacacatctgcgcgcgcaaatatcacacgaatatgtgtggtcatattagtgta

SEQ ID NO: 4383 - DNA, 1477 bp, Glycine max
  misc_feature (1)..(1): n is a, c, g, or t
  misc_feature (18)..(18): n is a, c, g, or t
  misc_feature (55)..(55): n is a, c, g, or t
  misc_feature (172)..(172): n is a, c, g, or t
  misc_feature (222)..(222): n is a, c, g, or t
  misc_feature (240)..(240): n is a, c, g, or t
  misc_feature (258)..(258): n is a, c, g, or t
  misc_feature (489)..(489): n is a, c, g, or t
  Probeset Number=SeqID_14162
ngaccgttacgccatgancgtcgactcagcacttagactcacagacgtcacgctncgcatcgtagactcactctttcaacatatacgtcagacagttacatacattacatgcgtcctagaggtaacagtggaactggagcgtactgatcgcaacgcagaaacgcatctgcgntcatctgtatgttgctgtcaaggtgtctcaatagattcatagcgccgatnctagtccgtctcgctcgnttcgttagcaatcatgcngtcggtgcaacagaccgcagagcgtatgatattataacgactgttatcattgtcctggctgcctcgcacatctaacgaacatgacaactccgcgcatctcgcagatcgtgaatctctccacgctgcgctcatacatgtcgacgtatctgtacgtcagacctggattgccttacgtacaatccagtcaacgctgtcgtgtaagcacgataccatagcacgttgaatgtgtcnatctgcatcgagccagacaacgtctaacactagaccgctaatcactcatgcaccagtaaaaacttccatgctgccgtccctccgctgcgactaatactcgcagcataatacatctcctgttcacagcctctgtgaatgtggcgtgctgcaaccggaatcactcctctaaatctaacaacgcggtacttatgcgcgcttactagactaccgtgtgtcctcgcctatccgcatcgattcacgatgcagagcactttactgctggacagagataaagagcacttcagctatgagttcatatcatgcataccggcttagagtccacgtctagtagtgagccgctcgggttcggcgtcgtctactccgggtcgttagcttatctatacgccggttcgcgaggtgaagagtctcgagccttactggggggagcgggagacgagtccgtgcagtgcgggcactgcagagatgtaactgtactcagatgcgtaacttattcagtggcagtcatgggcacgagctagcacatcatgtcaatagcaatacgcatgggtgagccgcatggcgcgtcgatccgccacggatcgctctagcagactccttcgatgttataggatcgtggtggggtatatccgatgatcaatgtgacgtgacgcacaccattcgaccgtgatcagcctgtcatgacgccgcgtcatacatactacaacgacctgcgcaacccacctttcacgcgggatatgaaccatattgtattaggcgggcggtgtccgattacagatagactaccggtactggtgataacagatacacatctgtgtcgggagaacaagcgcactcacagcgccacgcgtccgttctcttttgggaaataacgtcgctttttcctccccttctgaaggaggcgtagtcgcactcgttgtcaacacagattatatagcgagctaacgttgtggcgtgtatgagtcgagacagatagcacctatcttgccgc

SEQ ID NO: 4384 - DNA, 445 bp, Glycine max
  Peptide Sequence Number=SeqID_7439
  Probeset Number=SeqID_14163
gggggggtgataatttagtagcagtggcgggtaaagttgtgttgtagcatattcgtatagaaacaggcatcttttggtccatcatagtcacgcacttacaattcatgccacagtattgatacgcctcaagggtgttccatatgctggtagttcacgatgaagctcggatacagcatatctaggttttggttttccatgtcatggacctgtcacagggggtacatgccaagtatcagctagggttcatgtcttcatcggtcaattttggatgatctatgccaattcggtagtaatattccatctcagttggtagatgcagtcacatgtttggggtcgtattagtgaccagtggtcacagtcatatagatatccctgtcagagatttgtgaggccagttcccttaccattaaagggtggccctgtggtttcttaggggctcagggct

SEQ ID NO: 4385 - DNA, 486 bp, Glycine max
  Peptide Sequence Number=SeqID_7440
  Probeset Number=SeqID_14164
ggttgttcttcttgtgcaaattcttggttctgctgacctggcggagcgtgacgcagatcatagggctcttatgtctttgctggggctagatgttgcagctcctttcacggctttgttcaagcacattggcactcgttcaagactctagcacggatgatgtcatgcttgagaaaggtatagactttgctagagataatgttttccctatccaagctaaatagctgaaaccccaggaggaaatggaaagacacataactgctctcattacaaaagagtgtataagatgtctctgccattctattactaatgttaatggatttcctgatgagtttgatcctatagtgaagaaactgctccggttgagcggatgaaagagcttattggactcattgaagggcaagctgacttagatacacagttcaatgtatcaaatgcagatcatattgacaggacgatattatgcctttatatggcacttacatttgt

SEQ ID NO: 4386 - DNA, 593 bp, Glycine max
  Peptide Sequence Number=SeqID_7441
  Probeset Number=SeqID_14165
gacaccccacactcttctcctctatttaacaacgcccgaaaaaaaattagggttttcaatttggggaaataaaaatagggggaaatattctggagagagtgtgtagaaaatatggttgtcgatgatatgacgctgtgcatcatcgtcggctatggaggttcctcttcttctcgtttctccgatgcttatcccaaaagcaataaaactcatccaccagatgagctagcatgggcgattcttgtcttacttctatgtcaatggagaatcaccacccctccacgctcttgtcaatggactcaagtgcatcttctcacgaggaactggatttggagatgaatcgccaaatcatactcactcgtccggccgatattaacctgcccctctccgccgagcgcagcccgccggcacagccgtggaattctgagccctgtgatattctggatgttggtcttgggtactcaagatacgagactgagagtgtattaatctgaccaaagctggtaggaatgcgcgaagcgtgtagtagcctatggagtgcttggtgtctttcgtttttctttaagcctgctgtgaacgacagcccaacggcacga

SEQ ID NO: 4387 - DNA, 1399 bp, Glycine max
  misc_feature (38)..(38): n is a, c, g, or t
  misc_feature (42)..(42): n is a, c, g, or t
  misc_feature (63)..(63): n is a, c, g, or t
  misc_feature (225)..(225): n is a, c, g, or t
  misc_feature (229)..(229): n is a, c, g, or t
  misc_feature (974)..(974): n is a, c, g, or t
  misc_feature (1183)..(1183): n is a, c, g, or t
  misc_feature (1235)..(1235): n is a, c, g, or t
  misc_feature (1251)..(1251): n is a, c, g, or t
  misc_feature (1254)..(1254): n is a, c, g, or t
  misc_feature (1319)..(1319): n is a, c, g, or t
  misc_feature (1351)..(1351): n is a, c, g, or t
  misc_feature (1355)..(1355): n is a, c, g, or t
  misc_feature (1359)..(1360): n is a, c, g, or t
  misc_feature (1368)..(1374): n is a, c, g, or t
  misc_feature (1376)..(1376): n is a, c, g, or t
  misc_feature (1378)..(1378): n is a, c, g, or t
  misc_feature (1380)..(1380): n is a, c, g, or t
  misc_feature (1384)..(1385): n is a, c, g, or t
  misc_feature (1388)..(1391): n is a, c, g, or t
  Peptide Sequence Number=SeqID_7442
  Probeset Number=SeqID_14166
cgtagtataatgtttatgtatacgcgctgggagtagtntttncgtgtatggcaggagtgatanaggatcggtggtattagaatacatacacatcacaacatactatatatacaaaacgcaggactatacatacatatatagccgataaacatacacaggccaccatctcatcactgagatttttctatgtagatatcgtatagatagaggttcaagcgtattcgntatnattcgttattgtgtcttatttccgatacccacttttcgtattgatcactatgatctataatacagatgcacccgggagcgtacgtctacatgctgcgttacgggtgggcgtcgcgcgagcgtggtctaggcacggcggagtcgtgggtgtggttataactaatatatagttattattttatataaagaatacacattatgtgttttgttatgcacttatactgtatcaatttgacgttatgtttagatatgtgttatattgattatgtattctggatatgtaatattacgagcatattgcggatgttgaatttgtgtatgctcacagttggtacatcacgtctagctatgtgtttcggtcgcgattggtagcgtgtcgtgttcgctcttatttagtgtctgcagtcgtgtcttttatcatcttctcttatataatcttagttcttattatgttatttattgcttttatctcgacgtcatccagatttcttatttcgctatgtctctcacctctctattttgtggcgagagagaggcatttaaagacagcgatgtgctagacaggaaaactcataggcggtaggcgagaaggtggagagagagagagggccaagaatggaggaagatgagataacaacacgtaatctcatcaatgtatattattcattcacaaatgttgggtcgacacagtggtactcatgcatatagttatggatgtcgtagttgtatgtatcactattgcttantcctttatataacattgttttagtctctactctctttttttcttcttctttctcactcttctttctctcatcttgttattcatcactatattctgctgtcttgttctctttctttatagacaatattaacacatgccgcggtgtagttaggagatgaatatgtacatatggtgtgtgtcgaggaactagataggtgggggataaaagtngtggtttgactgacagggaaagaacatatccctaatagaagctatgaagtgnatgtgctacaaaagtntanatataattacaaataatataagaagtaatgagatagttagttctattataatcttgtcgaaactnaggatggggctaaattactattgtcaaccaanggtntagnnatgaaaannnnnnngngnanaggnnttnnnnggggaaca

SEQ ID NO: 4388 - DNA, 663 bp, Glycine max
  misc_feature (617)..(663): n is a, c, g, or t
  Probeset Number=SeqID_14167
tcagctacgtaggccccccccccatgaatttcagttttggaaaattgtggtgactcatacattatcctttaccagccaacacatatacactaacaagaaccctctagttggctgtgcatcctctatatacctatcataacacaagcagcacaagcctatcagagtcaactatcattccatagaacccaagcccctacactcctgagagatcattcatagtcatcacatccaaaacaacaggaacgaaacaccttgctagaaagggtttgtcatgatcatacattattactggctactgtgccttatcggcttatcataaccttatctgattttattgaaggatgaatctatgataagccttagattatgacaaaggcagcccttgaaaacggctctgattctacagaaaagctattactgtacttataatatactataagccaaggaagctcagaatcttgtcagatctcaacttgaaatttttgaaaagatttttaaaaggtctttgagatgaacaacaaccaataaggcctccttcatgatccaaagttcgctgctccttcaaaggaaagaaccagctgctggaggaatccttattagctgctacaagaccttcnnnnnnnnnnnnnnnnnnnnnnnnnnnnnnnnnnnnnnnnnnnnnnn

SEQ ID NO: 4389 - DNA, 473 bp, Glycine max
  Peptide Sequence Number=SeqID_7443
  Probeset Number=SeqID_14168
agggttttgaagcagcgagagagaggtttctttcgctttcgctcgattatcgcgcccatggcgaaaccaagccgtggccgtcgttctccttccgcctccggatcctcatctcggtccagctccagatctcgttcccgctccggttcgagtcggtccaggtctctttcttcttcgtctccttcccgtagcgtcagctcagggagccgcagccctcctcgtcgcggcaaaagttctgctggggctgctaggcgaggtcgctctcctcctcctccaaaaggagcatcttcaccctctaagaaagctactacgcctattcaggaatcacttgttctccatgttgattgtcttagcaggaatgtgaacgaaggtcatctgaaagagatatttggaaactttggtgaagttgtgcatgtagaacttgcgatggatcgagctgttaatcttccaaaaggatatgcttatgttgagttcaa

SEQ ID NO: 4390 - DNA, 1715 bp, Glycine max
  misc_feature (25)..(25): n is a, c, g, or t
  misc_feature (28)..(28): n is a, c, g, or t
  misc_feature (51)..(51): n is a, c, g, or t
  misc_feature (54)..(54): n is a, c, g, or t
  misc_feature (191)..(191): n is a, c, g, or t
  misc_feature (205)..(205): n is a, c, g, or t
  misc_feature (208)..(208): n is a, c, g, or t
  misc_feature (268)..(268): n is a, c, g, or t
  misc_feature (381)..(381): n is a, c, g, or t
  misc_feature (394)..(394): n is a, c, g, or t
  misc_feature (445)..(445): n is a, c, g, or t
  misc_feature (453)..(453): n is a, c, g, or t
  misc_feature (775)..(775): n is a, c, g, or t
  misc_feature (928)..(928): n is a, c, g, or t
  misc_feature (1031)..(1031): n is a, c, g, or t
  misc_feature (1033)..(1033): n is a, c, g, or t
  misc_feature (1202)..(1202): n is a, c, g, or t
  misc_feature (1324)..(1324): n is a, c, g, or t
  misc_feature (1342)..(1342): n is a, c, g, or t
  misc_feature (1419)..(1419): n is a, c, g, or t
  misc_feature (1447)..(1447): n is a, c, g, or t
  misc_feature (1455)..(1456): n is a, c, g, or t
  misc_feature (1460)..(1460): n is a, c, g, or t
  misc_feature (1462)..(1463): n is a, c, g, or t
  misc_feature (1469)..(1469): n is a, c, g, or t
  misc_feature (1493)..(1494): n is a, c, g, or t
  misc_feature (1497)..(1498): n is a, c, g, or t
  misc_feature (1500)..(1501): n is a, c, g, or t
  misc_feature (1509)..(1509): n is a, c, g, or t
  misc_feature (1513)..(1513): n is a, c, g, or t
  misc_feature (1545)..(1549): n is a, c, g, or t
  misc_feature (1556)..(1557): n is a, c, g, or t
  misc_feature (1570)..(1570): n is a, c, g, or t
  misc_feature (1577)..(1577): n is a, c, g, or t
  misc_feature (1600)..(1600): n is a, c, g, or t
  misc_feature (1629)..(1629): n is a, c, g, or t
  misc_feature (1636)..(1636): n is a, c, g, or t
  misc_feature (1646)..(1647): n is a, c, g, or t
  misc_feature (1669)..(1669): n is a, c, g, or t
  misc_feature (1671)..(1674): n is a, c, g, or t
  misc_feature (1676)..(1676): n is a, c, g, or t
  misc_feature (1678)..(1681): n is a, c, g, or t
  misc_feature (1687)..(1688): n is a, c, g, or t
  misc_feature (1694)..(1694): n is a, c, g, or t
  misc_feature (1705)..(1705): n is a, c, g, or t
  misc_feature (1715)..(1715): n is a, c, g, or t
  Peptide Sequence Number=SeqID_7444
  Probeset Number=SeqID_14169
catggccagcggagtcagagtgtcntcngaaccatctaggatacactgacngcngcgatgctgctcagcggagccgagagtcgagcgagagtatagtatagtatcgatataaattgccgtactacatatatcgcgcaattgcgtcgcgtagagtaccatgagtatgagagaatacgaagaggacgatgcgnaggagatcgcttcngtnctgcgacatgcgcgcgcgcgcacggtcgacagagaggcgcggctcttagatgatcgcggncgacatgcgacgtgtggccgcgaagcgcgcatcagggtcggcgcagcgagagcggtgcgtctcgagcgcgagcgagcacagacatcatcttactatcgccgacacgagttgtncacgcgacatcantagaccgggagcgctacagcgactcgcgaatctcgctgctacgctcactancaacgacnaatatacagccttgtggcatcttcgtaatagatgacatataatcagactcatcatcatgacgcgtggagcaggcgccgacagtgtgcagacagtgagagggaagcgcagacacggtctcgataaatacgagacgagcggtgcacgacgtcaggaagtgcagtacacgcagagagttgtgagatagatcgtagctgacctcgcgtatgtacgtcccctcagaacgttgtcaactctgtcgtcgtattcggtctagatatgtagatatcatcatcaatccaactcccatactactacccaataactattgctgcaggggcacanacgacacaactgtacgagataagagatgatgaacgagaagaccgtagtcgagtatgatgagggagcgaagggaggagaagaaacatgagacgctgtgtagattcgcacgcgacggcgtggccatcactggaggtacataatataagactatanaactatcatatacacgacatcgtttactcagcctttatctagctattttgaatacgatatcagttactatcgcctacctcgtgcgccgcctgctatgcgtttntnttggtgttgtcgggacgtcgagtgttcagatgcgtactattcgttgcgtttacagtacacgcagacaactgacacaacgatataccgcacagcgcgccgatgctagcgtagcgtcggtgtccatcggtacgtggcggccagggacacgttgaggggcgtgcagaggacngtagagagcgcgcagagagtgggtagtataccatgcgtggtattatacttcccgtgttcaacagcctcactgtatcaatgtactacgtcggctacgagatatatagactatacaccgcgatncataccacgtcagatcanatatgagatatcgcaatcacgcacagaaatcacaagactccatacctccacagcatattcgtaggcaaacgtctttntacatacactagaagactatcacgtacngtaaaaannaatnanntaaatncatatatcccaccaaaacacatannaannannaattatanatanttacacaagaatccaaaacaaccagcaacaannnnnttgccgnngtctcctgctgcntctcttntctcgctccccgtccctcccgcntcgggggcaaacaccaaacacaaaacacncacaccngaacaaaacnnacactaacaccacagacacagnannnnanannnnaaaaannaaaaanaacaccaaaanccccaacccn

SEQ ID NO: 4391 - DNA, 443 bp, Glycine max
  Probeset Number=SeqID_14170
acgtaaggataatctgatttgcttggcctccatttccattctgttctttaaagttcaccaaagatctcttctaaaactttgctctcacctctctcctaaagctagggtttcgcacagcctccttgtttccggcggtcgccaccgtcatctcaggtgaccgccgggccttctctcttttttttctttttttcgtagtctctgtgtcctcgtcgtcgtctcctcctctgtctctctgcggctgcttgatgcgacgacggttgtccggttcagatccggagctttgcttgttttagggtcagatctcggaggttgcagcacttgaggacggtgctccgctcctccttacctctgtttcttcgtggccagttgaggctctgtccggatggttttgtatgccgtcgttgtgtttaggcttgagtggtggcgcgtggtggttgtgggtg

SEQ ID NO: 4392 - DNA, 1531 bp, Glycine max
  misc_feature (26)..(26): n is a, c, g, or t
  misc_feature (42)..(43): n is a, c, g, or t
  misc_feature (74)..(74): n is a, c, g, or t
  misc_feature (119)..(120): n is a, c, g, or t
  misc_feature (122)..(122): n is a, c, g, or t
  misc_feature (124)..(124): n is a, c, g, or t
  misc_feature (130)..(130): n is a, c, g, or t
  misc_feature (152)..(152): n is a, c, g, or t
  misc_feature (162)..(162): n is a, c, g, or t
  misc_feature (200)..(200): n is a, c, g, or t
  misc_feature (246)..(246): n is a, c, g, or t
  misc_feature (256)..(256): n is a, c, g, or t
  misc_feature (267)..(267): n is a, c, g, or t
  misc_feature (275)..(275): n is a, c, g, or t
  misc_feature (386)..(386): n is a, c, g, or t
  misc_feature (418)..(418): n is a, c, g, or t
  misc_feature (547)..(547): n is a, c, g, or t
  misc_feature (581)..(581): n is a, c, g, or t
  misc_feature (630)..(630): n is a, c, g, or t
  misc_feature (739)..(739): n is a, c, g, or t
  misc_feature (743)..(743): n is a, c, g, or t
  misc_feature (892)..(892): n is a, c, g, or t
  misc_feature (968)..(968): n is a, c, g, or t
  misc_feature (1007)..(1007): n is a, c, g, or t
  misc_feature (1128)..(1128): n is a, c, g, or t
  misc_feature (1337)..(1337): n is a, c, g, or t
  misc_feature (1339)..(1340): n is a, c, g, or t
  misc_feature (1348)..(1351): n is a, c, g, or t
  misc_feature (1356)..(1357): n is a, c, g, or t
  misc_feature (1360)..(1362): n is a, c, g, or t
  misc_feature (1368)..(1369): n is a, c, g, or t
  misc_feature (1374)..(1378): n is a, c, g, or t
  misc_feature (1381)..(1381): n is a, c, g, or t
  misc_feature (1383)..(1383): n is a, c, g, or t
  misc_feature (1385)..(1385): n is a, c, g, or t
  misc_feature (1531)..(1531): n is a, c, g, or t
  Peptide Sequence Number=SeqID_7445
  Probeset Number=SeqID_14171
accacttatataaccaaccaaataanaaaacaaaacaaacannacaaacaacaaaaaaacaccacaaaaacacnaaacaacaaaacacagaaacaccaccacatctaccttctcacacnnananaccacnacaaccaaccaaaccaacacanaaccaccganaacaaaaatccaaacacacaaccccaccataaacaacntaatacataccaacccacccacgacccgactaatacccacaaccanactaagaaanacatactcccnccaaatcncaatacttctcactccgaccactcctcacacaatccctatcacccaacctctactctccatcaataactaaacaacaacacatacctcctcgccgttcgactctaagatcnatatgctctctgtcgccttcttcaatttcatnatacagcaccaatcttatgtccattctctctcaaccgcccgctcgcagatttacattattttgtgggagggaggggagggatgacgtctggcatgattaaattttctcatggcgttccgtctcgctccncacaccgactcctcgcctgctacactggtttatnctcgtgtttgtgggcgcttcgtgatggggcagtactcgtgtttctgttnatatttctactacactgatcacaccacatatgctctctattttatctcatacacctccgtctttatgttattctgatgtaaggggttatgatattgggtgctgtcaacnatcngtgttgtgacacttagtttggatcattctaatcatattatctctagtagctattcccacgccttataatatgcttgcatgggtgaactgagtgtaactatctgggttcttagatctgttctttgtgttctccttcgcacctcatctccnacactcgtgcgttattctcttctttattattatatatagtctcgttgttctccgtattgttgtgtgttgtgtgtgnccgcaactaatctgtgtggtgtgtcatcaacttgtgtgncgtgttattatgttatgttgtggggtgtttgcttttattatcctcaccaccacccccccccctcgcgtaagtgcgtggtgttgggtggtgattgtttaatataattctctgcgtctctccncttctgtatgttactatattgtgttgtgtgtgtgtggtgatgaatagctgatattattgtgatataatatttcatgctggcgtgtcttgttgtgatttaacgtatacatatctttctgttgtgcctgacgctgttgcgtgtcggtggtgtcgcttgtcctgttctttatatctatgttgtgaggtgttgtatatgatatgtgggtgtgngnnattgggtnnnnccctnnggnnnttaacnnagggnnnnnaanananaaaaagaagtggtgtgggtgtgtgtgtatgtttgtatgcacctccgcggcctctcaccactcttcggtgtgtactgtgtgcgactcatagtctcttgtcgtcgttgatgtgtcgtacttctctacgcatctcgtctctcgtcttgn

SEQ ID NO: 4393 - DNA, 2271 bp, Glycine max
  misc_feature (124)..(124): n is a, c, g, or t
  misc_feature (178)..(178): n is a, c, g, or t
  misc_feature (324)..(324): n is a, c, g, or t
  misc_feature (473)..(473): n is a, c, g, or t
  misc_feature (573)..(573): n is a, c, g, or t
  misc_feature (613)..(613): n is a, c, g, or t
  misc_feature (617)..(617): n is a, c, g, or t
  misc_feature (625)..(625): n is a, c, g, or t
  misc_feature (649)..(649): n is a, c, g, or t
  misc_feature (669)..(669): n is a, c, g, or t
  misc_feature (710)..(710): n is a, c, g, or t
  misc_feature (813)..(813): n is a, c, g, or t
  misc_feature (839)..(839): n is a, c, g, or t
  misc_feature (929)..(929): n is a, c, g, or t
  misc_feature (1008)..(1008): n is a, c, g, or t
  misc_feature (1061)..(1061): n is a, c, g, or t
  misc_feature (1109)..(1109): n is a, c, g, or t
  misc_feature (1171)..(1171): n is a, c, g, or t
  misc_feature (1224)..(1224): n is a, c, g, or t
  misc_feature (1293)..(1293): n is a, c, g, or t
  misc_feature (1306)..(1306): n is a, c, g, or t
  misc_feature (1333)..(1333): n is a, c, g, or t
  misc_feature (1359)..(1360): n is a, c, g, or t
  misc_feature (1405)..(1405): n is a, c, g, or t
  misc_feature (1430)..(1430): n is a, c, g, or t
  misc_feature (1474)..(1474): n is a, c, g, or t
  misc_feature (1503)..(1503): n is a, c, g, or t
  misc_feature (1509)..(1509): n is a, c, g, or t
  misc_feature (1515)..(1515): n is a, c, g, or t
  misc_feature (1517)..(1517): n is a, c, g, or t
  misc_feature (1532)..(1532): n is a, c, g, or t
  misc_feature (1534)..(1534): n is a, c, g, or t
  misc_feature (1622)..(1622): n is a, c, g, or t
  misc_feature (1636)..(1637): n is a, c, g, or t
  misc_feature (1657)..(1657): n is a, c, g, or t
  misc_feature (1672)..(1672): n is a, c, g, or t
  misc_feature (1698)..(1698): n is a, c, g, or t
  misc_feature (1706)..(1706): n is a, c, g, or t
  misc_feature (1740)..(1740): n is a, c, g, or t
  misc_feature (1744)..(1744): n is a, c, g, or t
  misc_feature (1758)..(1758): n is a, c, g, or t
  misc_feature (1761)..(1761): n is a, c, g, or t
  misc_feature (1776)..(1776): n is a, c, g, or t
  misc_feature (1785)..(1785): n is a, c, g, or t
  misc_feature (1791)..(1791): n is a, c, g, or t
  misc_feature (1806)..(1806): n is a, c, g, or t
  misc_feature (1816)..(1816): n is a, c, g, or t
  misc_feature (1828)..(1828): n is a, c, g, or t
  misc_feature (1837)..(1837): n is a, c, g, or t
  misc_feature (1841)..(1841): n is a, c, g, or t
  misc_feature (1851)..(1851): n is a, c, g, or t
  misc_feature (1859)..(1859): n is a, c, g, or t
  misc_feature (1880)..(1880): n is a, c, g, or t
  misc_feature (1899)..(1900): n is a, c, g, or t
  misc_feature (1902)..(1902): n is a, c, g, or t
  misc_feature (1904)..(1904): n is a, c, g, or t
  misc_feature (1907)..(1907): n is a, c, g, or t
  misc_feature (1918)..(1918): n is a, c, g, or t
  misc_feature (1935)..(1935): n is a, c, g, or t
  misc_feature (1942)..(1942): n is a, c, g, or t
  misc_feature (1948)..(1948): n is a, c, g, or t
  misc_feature (1957)..(1957): n is a, c, g, or t
  misc_feature (1965)..(1966): n is a, c, g, or t
  misc_feature (1984)..(1984): n is a, c, g, or t
  misc_feature (1986)..(1986): n is a, c, g, or t
  misc_feature (1990)..(1990): n is a, c, g, or t
  misc_feature (1995)..(1995): n is a, c, g, or t
  misc_feature (2002)..(2002): n is a, c, g, or t
  misc_feature (2022)..(2022): n is a, c, g, or t
  misc_feature (2026)..(2026): n is a, c, g, or t
  misc_feature (2029)..(2029): n is a, c, g, or t
  misc_feature (2058)..(2058): n is a, c, g, or t
  misc_feature (2067)..(2067): n is a, c, g, or t
  misc_feature (2089)..(2089): n is a, c, g, or t
  misc_feature (2102)..(2102): n is a, c, g, or t
  misc_feature (2110)..(2110): n is a, c, g, or t
  misc_feature (2119)..(2119): n is a, c, g, or t
  misc_feature (2122)..(2122): n is a, c, g, or t
  misc_feature (2126)..(2126): n is a, c, g, or t
  misc_feature (2168)..(2168): n is a, c, g, or t
  misc_feature (2190)..(2190): n is a, c, g, or t
  misc_feature (2193)..(2193): n is a, c, g, or t
  misc_feature (2204)..(2204): n is a, c, g, or t
  misc_feature (2222)..(2222): n is a, c, g, or t
  misc_feature (2224)..(2224): n is a, c, g, or t
  misc_feature (2233)..(2233): n is a, c, g, or t
  misc_feature (2235)..(2235): n is a, c, g, or t
  misc_feature (2248)..(2249): n is a, c, g, or t
  misc_feature (2267)..(2267): n is a, c, g, or t
  misc_feature (2271)..(2271): n is a, c, g, or t
  Peptide Sequence Number=SeqID_7446
  Probeset Number=SeqID_14172
tctgagtacgcacgtattataacatactatcatcttacaaataattattattggattagatgactcgagagagtattcatcatcacatcgtatatcacgataatacagatctctctgtctgtantcagccaacgctacacactcgtgactgtctaggcatgctgtagcgcagtcacanaatgatataacagcatagacatacactacacatcgtactacggcacacagtactgtctacaacatcatatacttcggacacaagtacgtctttatgagcaaagatatgcaccgatcacaccagacactcgctcgcgatagcatcgnctcacgatgtccatgcatgagatcgataacacatctcagatacgatgtatatggggcgctatatgtatgtagactactcatattcaatggagtgacgcgcgacctccgtcgacagtatgcacggctccgtgatcgcgactaaagctgcncacgcagtcgggaagacatacaatgactagaatgtgacagcgaggcgtgtggcgcacggcgagctggcggcgcggtgcggacacgttgtatatgattcgngtgcacatgtcgtgtagatcagtgcggcagtgacatcatntatnagtgttcnagtgaacggcgcacagcatgtagngctgaagcattaaccttatnacgtcagcagatgcactattatactacgaactgcgtgattnctgagctagtgacatcgaacgatacctacgcgttgtgtagcgaatgtgtgacgatatatcatatatcactgacatgatatatacgagcgccgctactgcccantatcacaagtcacactgagccgacgngcgacactgacattatctatatgatgtcaccgtcagagcgacgtctcgattcgcagtgcagagttgtcgaatgtgatatcatatatgcantgaatgatgagatcactagttatctatcaccgacaggcagacgtcgatagctgagtgagtcatacatctgagcggtacnccgcgacgcgaataccggaccagcgctgattcatagtcatatatacacacttntcgcaccatcacttcgaagctcataccatggatctcacgatgtgaccnactcggttgatatactcgtggcggcatgcgacgaatcgaacgtgcatatagctgcacacgantagtatacactcacgacactcgcctgctgtcgtactatatcggatatgatctncgatacactacagcgacgaactgcattatatgtatcttgcgccgtcacacgcacgctccatgatcgcgngagagagcgacanagcaacgcagatgctttcatactaccntatgcatcagatcatcagctgcatanncgcagctacacatctcgctcatcatctatgccgcgtctatgtacngctagcacgtacggcgacgaggctnggcgtcactagtatatacgtaggacgagcggcagcatgacatancatgtattcgatcgtcaatagcgtagacnatgcgntcgtanantgcacgactaggaantnacgtttgagcgacgtagtatgtacgcagtgatgcgactgatatgtatagacgtgagcgcgacacagcatgacagtttatgtcatgatnttactcgaatagtnnagtatatcgactacgtagtngcacgactgacgcgnactgcggatctactagtcaatcaatncagatcgnctcgactagattatgtgctgcgatcgcgcgtgcnacgngcagtgtgtatgcnctntcgtgcatgctcaanacgcacatnaatgtnatatgtcattgactncgttactcgntagcgcactgcngcaatctanacgnacgcgggcgntgaactancactgagtgaatcgctgcgtnctgtgtaatgtacgatatnntnanacntcgctacacgnctagggattatactacngtcactngaccgnactgtgctntatgacgnnatgtgagtcgctgacgtngncgcncgaantgcggtntgctatgatacgtatggaancggnacngtgtgtgatcgacaggactcgcgtcaggncgacgatgnatctcgtatgctgcacgtacantacagcacgagancgtcgatncgagagaantgntgtnctcgtactgttagacgcgtacgcatcctccagtcatcattangcatacgtagcggagatagcancangagctagtgcnaggatacgactatgaatngntgaaccagnanaggtatactgtcnngtggtgactggtcaaatncagn

SEQ ID NO: 4394 - DNA, 1526 bp, Glycine max
  misc_feature (5)..(5): n is a, c, g, or t
  misc_feature (12)..(12): n is a, c, g, or t
  misc_feature (58)..(58): n is a, c, g, or t
  misc_feature (96)..(96): n is a, c, g, or t
  misc_feature (122)..(122): n is a, c, g, or t
  misc_feature (131)..(131): n is a, c, g, or t
  misc_feature (134)..(134): n is a, c, g, or t
  misc_feature (177)..(177): n is a, c, g, or t
  misc_feature (221)..(221): n is a, c, g, or t
  misc_feature (225)..(225): n is a, c, g, or t
  misc_feature (252)..(252): n is a, c, g, or t
  misc_feature (254)..(254): n is a, c, g, or t
  misc_feature (262)..(262): n is a, c, g, or t
  misc_feature (264)..(264): n is a, c, g, or t
  misc_feature (269)..(269): n is a, c, g, or t
  misc_feature (309)..(309): n is a, c, g, or t
  misc_feature (314)..(314): n is a, c, g, or t
  misc_feature (331)..(331): n is a, c, g, or t
  misc_feature (348)..(348): n is a, c, g, or t
  misc_feature (387)..(387): n is a, c, g, or t
  misc_feature (420)..(420): n is a, c, g, or t
  misc_feature (578)..(578): n is a, c, g, or t
  misc_feature (767)..(767): n is a, c, g, or t
  misc_feature (872)..(872): n is a, c, g, or t
  misc_feature (1134)..(1134): n is a, c, g, or t
  misc_feature (1136)..(1136): n is a, c, g, or t
  misc_feature (1154)..(1154): n is a, c, g, or t
  misc_feature (1172)..(1172): n is a, c, g, or t
  misc_feature (1179)..(1179): n is a, c, g, or t
  misc_feature (1226)..(1226): n is a, c, g, or t
  misc_feature (1272)..(1272): n is a, c, g, or t
  misc_feature (1301)..(1301): n is a, c, g, or t
  misc_feature (1349)..(1349): n is a, c, g, or t
  misc_feature (1352)..(1352): n is a, c, g, or t
  misc_feature (1369)..(1369): n is a, c, g, or t
  misc_feature (1372)..(1373): n is a, c, g, or t
  misc_feature (1382)..(1384): n is a, c, g, or t
  misc_feature (1407)..(1407): n is a, c, g, or t
  misc_feature (1417)..(1417): n is a, c, g, or t
  misc_feature (1421)..(1422): n is a, c, g, or t
  misc_feature (1432)..(1432): n is a, c, g, or t
  misc_feature (1454)..(1454): n is a, c, g, or t
  misc_feature (1466)..(1466): n is a, c, g, or t
  misc_feature (1475)..(1475): n is a, c, g, or t
  misc_feature (1477)..(1477): n is a, c, g, or t
  misc_feature (1479)..(1479): n is a, c, g, or t
  misc_feature (1491)..(1491): n is a, c, g, or t
  misc_feature (1506)..(1506): n is a, c, g, or t
  Probeset Number=SeqID_14173
cttgncgagctnatgatgtacgcggtgtgttgatttgagctgagtgtgacggtgtacntccgtgtatcgcacggagtgctggtgatacagtgatcnagcagtcatagtatatacgatagctngtcagcgangcnactgcagtcgtgtcgatgcacgatcggaagtgcgctgtcacgncgcgactcacgctctgtgctctcgtgacgcgctgtactaccatncacncacagcactgagatgtgcacgagtacngntgagagtngnacacnagtcgcagaacaggacgggtcaggggttagctggaaccantgatnaatgcagtgcggtgcangggatgagtacagacanatatgtcgcagatgacgatgctagatggtagagctatgnatatctccgatgtttcatatctgtgatagagcncgttggagtctgcattgagtggcgtcggacacgtgtggcggggtcaggcggtgggtagacgagtggtgtatagtagcgtactatatactactctcatatactatcatgtgactgatatagtgcggcatatgtaatggaggagtctcgcgggagcatgnacaggatgtgatgattgtgtattgttgatctacgcgtcgacgttgtgactcgaccgctcggtacggatcgcgacatgccgtgtgagtgtctgcattgctatccgctgcgtgctgggcggatgtggtgtagcatcacataccagattctcttctgttcctgattgtatgtacggggcgcgacagtatagntgtgatcgtcttctctctccctcacgcgatcggctcgatccgtattcaacgggtggcgggggatcagttagaagcatgagtagaggagagaggttaggtatgtgntggtttgtcgagtagtgttttatctagttcgtttgtctccttttctctcgcttcctttctcactcatctcgttactaagtaccatggtcacactgtagatattatattacatctctatatagtacactgtgaagagagggtgtgtttaatattagttttagagtagtttcatcacaacacatacaaacgagcttgtagttgtgttgtttgtgttgtgtggcggtgtagacaaaccttcgcttcagctatgctccatagcgtngncgagcagccccgctcccngcctcgtccgcaggagcncccagcngccagcagagacgccagccaagaggacggccgccgcctcagagatgncgacccgagaaagagcacatcctcccaaccccgccgcacgcgcgcnggctgtcccgactgacagagcctcaagcncccacacccgacctctgagagtgatgagtagagacagagcgtatagtngtnttcaccatctaaaaatntannaacagcacnnnaccacgagagagaggcacgccancacgggcgcngggnngcgaggggtnttggtgtgtgtaaacaacacanagcgcgtgcganaaaagggangngngagagagggagnggggccgcccgccgncccgcgcccacacccccccc

SEQ ID NO: 4395 - DNA, 1608 bp, Glycine max
  misc_feature (342)..(342): n is a, c, g, or t
  misc_feature (495)..(495): n is a, c, g, or t
  misc_feature (950)..(950): n is a, c, g, or t
  misc_feature (1068)..(1068): n is a, c, g, or t
  misc_feature (1079)..(1079): n is a, c, g, or t
  misc_feature (1161)..(1161): n is a, c, g, or t
  misc_feature (1207)..(1207): n is a, c, g, or t
  misc_feature (1240)..(1240): n is a, c, g, or t
  misc_feature (1284)..(1284): n is a, c, g, or t
  misc_feature (1399)..(1399): n is a, c, g, or t
  misc_feature (1401)..(1401): n is a, c, g, or t
  misc_feature (1475)..(1475): n is a, c, g, or t
  Peptide Sequence Number=SeqID_7447
  Probeset Number=SeqID_14174
ctcttccccccccaccagtgtgtcggccatgactcccgcagcgtaaattttaaccagaattgggttaccggggcccccccctcgcaggtcgcttgcacatccgatccagctcccctcctatgtcctctttgcacgcaccagatatcttaccggagggacgcattcctgggcgccccgctcacgcgctctgcgggcggcgtcttacgcccccactatataggtagggccctcagtgtgcagcgccccaatatcacattgtctgccgccgttactgtgagcatgctatcagcaatctatcgttaccctcgtctcggccgtaattaagtatgggaccgctccatnaaagaagggtggtacggcctctcaaaagacattaggtcgatggagtccccgccatccgggcatcctccggtcgagacatgcgtagacccgccgggtttgcgcggcggagtggagccctttctttcgtttgtcatcgccagccaactgatgacntcatgaccatcggccctctctccattagtgagaggttagcaaatcaaccaatctggtgattgttggctcgtcttgtggctcacctggggttgtctgcctcatcctccatagataatacctccctctgcgtgggtttcctcctcgtgtgattatgtctatgcattctcatcgctcccgcgcggtgcctccgtctaccagcttcgtacgcggccccctcctcctgcctctgtacttttcctccactctcaatggtagcggctcgttgaggtatagcgagcgctgtgcgcctctctctctctgtctacgcgtcgcctcaactcccatatctatcgtcctggcgtcgtcgatcacctgtctttctacccctcctgcttcatcacccgcactataccgccaccgtgcaggatctatatcaggctaactgatgcttgtcgagcgaatggctctcgcgcctnttgacgttggtgtcgctcacgcgcactctcgttagttccgagtctcgcgacgattagtatgcagttatcgtattctgcgatcctctgatctgtatgcacagccgcgctcggagctacnttggcgcccanattctacgaagagctgttgctcactcgccacgcagcgaatatgatctatgctggagcgtacatgacgacacaccctctcatnactcagcagaggtgcacgctcatcacacgtactgctgacgtacctntcgtgacatcactcgctctctatcgggacgatngagcgtgtagttctgcaccgatgacgaagtgggatcttcgcgtncgccgacgagatgatgacatctattcacgacgtcatctcgctacacgactgaagctctcgtctactggatcgccttagatcttacgcagtatcacgcctacatactctcctaggntntgacgctcggcatggtgctgctgtcctcgtacacaaccgacatcgagggctttcacagagtgatgcaatgtcancagaccgacacgccagtcaccgtacacatgctgcgtcgatgctactatacgttacgtcgacgcgctgacagtcagtcttacttctgaaaaagcactgcgggacgcgtttcgctcagcgcgtagcgcgcctctg

SEQ ID NO: 4396 - DNA, 1213 bp, Glycine max
  Probeset Number=SeqID_14175
aataaaaataatccttaacgggttcacctttctccttctcaatctcaataaagacatgttttttggcggcggatttcctggattccctggtcatggtcacggtcatggtcatgatgatgatgactcatcaagaggagaagtagataataaggaattttatgaaattcttgaaattcctcaaaatgctggacaagacgaaatcaaaaaggcttatagaaagaaggtcatcaaggcccatcctgataagggtggtgacgttgaagaattcaaaaaacttcaagctgcttatgaagtcctgagtcatcccgaaaagagagaaatctacgacaaatacggtcttgatggcttgagagaagatggtggcagtggaatggatcctttcgaaagcatgtttggaggcatctttggaagaggtggcggaagaggaaagcaacaacaacaacaaagaaaagtcaagcctattgttaaggacttggttgtcactctggaagaagtatatgtaggaaagatgaagaaagtcacttttgacagacaaagaaactgtcaagaatgcgacggaaagggaggaaaagatgccaaaaagtgtaccacttgtaagggtgctggtatggttgacaaagttgttcaactcgctcctggtttccttacccaaacaagaagtcactgtaccacttgtaaaggtgaaggaactatctatgaaaagcaaaacgtctgcaaatcttgcaaaggtgataaggtcaagaaagagaccaagactatcgaagtccccatcgaaagtggtgctcccaatgagtgccctatcagcttcagcggtgaaggaaatgaaattcctgatgttttggctggagattttattgtgagactcatcattgagccccacaagagattcgaaagaaaaggtgctgatctctactataagaaaaagatctctttatatgaagctttaactggatgtgctttccacatcgaacatcttgatggcaaaaagattcttgtcagcacttatcaaggtgaaatcctgactcctggttgcaagaaacaacttaacaatcttggtatgcctttctataaggatgctatgagtcatggtaacttgtatattacttttgaagtcgagttccctaaagccaatcaactcaaaaatgccgctgatctcaaaaatgttttaccagttcctaaggatttactcactaatgttgacagaaccaagtct

SEQ ID NO: 4397 - DNA, 1369 bp, Glycine max
  misc_feature (81)..(81): n is a, c, g, or t
  misc_feature (148)..(148): n is a, c, g, or t
  misc_feature (159)..(159): n is a, c, g, or t
  misc_feature (186)..(186): n is a, c, g, or t
  misc_feature (189)..(189): n is a, c, g, or t
  misc_feature (238)..(238): n is a, c, g, or t
  misc_feature (269)..(269): n is a, c, g, or t
  misc_feature (292)..(292): n is a, c, g, or t
  misc_feature (366)..(366): n is a, c, g, or t
  misc_feature (408)..(408): n is a, c, g, or t
  misc_feature (421)..(421): n is a, c, g, or t
  misc_feature (442)..(442): n is a, c, g, or t
  misc_feature (512)..(512): n is a, c, g, or t
  misc_feature (534)..(534): n is a, c, g, or t
  misc_feature (549)..(549): n is a, c, g, or t
  misc_feature (835)..(835): n is a, c, g, or t
  misc_feature (858)..(858): n is a, c, g, or t
  misc_feature (910)..(911): n is a, c, g, or t
  misc_feature (948)..(948): n is a, c, g, or t
  misc_feature (971)..(971): n is a, c, g, or t
  misc_feature (1197)..(1197): n is a, c, g, or t
  misc_feature (1296)..(1297): n is a, c, g, or t
  misc_feature (1318)..(1319): n is a, c, g, or t
  misc_feature (1329)..(1330): n is a, c, g, or t
  misc_feature (1352)..(1359): n is a, c, g, or t
  misc_feature (1364)..(1369): n is a, c, g, or t
  Peptide Sequence Number=SeqID_7448
  Probeset Number=SeqID_14176
tgagctttgtgtataattaagctactgctgagatgtgacagagcaacacgtctctatgagagtatgttattatagttcttnttttatgtcatatagttgtatagaattaggtagtgacacgaacgaggctatcaccgagacataggangtagatggtanagttggatttgtgccatagcgtgatgncgnggtgagcagtgtagatacatgtcaccgatcacgtccgtcgtcggccgtngtgccgccgctcggcgctttgtacagtgacnagcctacgcatgatgaggtggantccatagcgagtgacggcgaggatgttacgcgatacgagtcgatgacacgacggtatgatgtggtctcccactntcgcgatgtgcggtgcgcgtcgcagttgggagtgtgcatagnagacgacgaggancgtgcgacggtgtgtgtgganaagaagaagacgccgaggaggcatcgtgtgcgtgaatgggtagctggtgcacttgagtatgctgtgaganggatagtaaaagtagagtaggncaaatctatgaggtncgtagcgggtcatggcgatacgttatacaacacaatacacagaaggagagaagacgagagtcgcggacacaagttaatgcccgagaccggagcaggttcgacaaagaatagataactggttggaggatgagctggcgagtcgcgcctcgcgcagcaaaagtggagttgcgtactgctgttcatcctcacattaccagaaagctagaactcacgcactctttatcatctttattttcctcgtctcatgtcgttttctagtacaagcatgtgatagatgaggactgtngagaagaaagagtagagataganggagagaaacacttctagtgcaaataacaaacagaaaaaaagggaagagganngtttgagagacacacgtctgtcctcgccacgaagaangaaattttgaaatatagagcggntatggggtggtggagggaggggagggagaaagaggagtgttgacgtacgacgagacgtccggcgtaggttggagctatgcggaggaaatcaataggatcaaagtactgggtgtgttctggtaatgtggatgtagaaggagttaataatggaagaataaatattaatgaaatagagaaataaatagtacaaatcaaaaggccgggggaaggcacaagagaccagtcntgtgttctctccttcgcgctccctcgcttgtggggtggggccgtgtggggtggcggcttcgtcgggcggggggggacgcggcggcgtgtgtagggggtnntggggggggggggggggggcnntcggtggggnngaggggtgtggggggggggggnnnnnnnnccccnnnnnn

SEQ ID NO: 4398 - DNA, 1360 bp, Glycine max
  misc_feature (206)..(206): n is a, c, g, or t
  misc_feature (325)..(325): n is a, c, g, or t
  misc_feature (418)..(418): n is a, c, g, or t
  misc_feature (533)..(533): n is a, c, g, or t
  misc_feature (572)..(572): n is a, c, g, or t
  misc_feature (588)..(588): n is a, c, g, or t
  misc_feature (713)..(713): n is a, c, g, or t
  misc_feature (813)..(813): n is a, c, g, or t
  misc_feature (1259)..(1259): n is a, c, g, or t
  misc_feature (1328)..(1328): n is a, c, g, or t
  Probeset Number=SeqID_14177
aaagtgaattcaacatgacaggatgaaatagcagtgctccgctcgacaattcatagcacgcgatcagcaggagctgtcggcgacatggtgtaatacgcctgcgtgctgcttcatgctctacgtcacctactctacgtctcacctctcgcctgccgcacctgccacacttccgtgagtgcaaatcctcacggtcacactcactcatnctatctctgcgacgatataattatcgacatgttcacacgatattagagcagtcgtatactagctatctggattaggttgactcacgattatatgacgcacttctcagacagtacatgtntctcgcgaagctattgaatagccggcgtgtgctccgttagagggctgaacgcggaagcgacgcgtcgcgttggtgataccggtgacgatagcncatatgcagtgatagacccggtcgtgtagagttatctgctcagtctgtacagctgacaagcgtaagaaactctcatcaacgatcttcaggctcgtgatccagctacatcgcctancgactggagcaatcgtagtactatacgtatctgctatcnatggttgggcgtgagntcagattctcgaatatcagaatagtactagcagtcaccagagatcatctctaacattgtccttactggcgatatcgacgcacaccacatagatacgttcgtcactgcgtgctctcacacgtgccncctcatcttcatgctcgtacgctcgccagtgcacgtcctgcccgtcgcgtgaccgtggagtcatacactgccacatcttactaatatctactgtcacgtncttaatcaccactgattcatagtaaggagagatgggtagtacagaagagacgcatagagtgtgtattagtcttataataaacgagtgcgtcctctctcgctcggtcgcacaactctgcgcaagtacccgacacacgtctcccgccgtcgcgcggctcgagcgcagtatcaatagtgagagtggttgtgagatagaagcgtatctactgtataacttgatgcagaggttgctaaatatgccggactatatgagtctcgctacaagtgacaagctacccctgctgatagacatgggctaaaatagtaatgtatacaaccagtgtcaccacatacaacaacccatccctcccgcgccccgtgccgccgagtgccgcatgacacaccccacccagcgagcgcgcgagcgacctacactcctactaccacgaacactcatacacactacangcgaatgctatcgccgatgaatatgtataacatcgttatctcgcccatgtactacggataagacatctnttaacgatcttagacatagcatcaaccatctc

SEQ ID NO: 4399 - DNA, 1601 bp, Glycine max
  misc_feature (1)..(1): n is a, c, g, or t
  misc_feature (21)..(21): n is a, c, g, or t
  misc_feature (24)..(24): n is a, c, g, or t
  misc_feature (95)..(95): n is a, c, g, or t
  misc_feature (228)..(228): n is a, c, g, or t
  misc_feature (243)..(243): n is a, c, g, or t
  misc_feature (250)..(250): n is a, c, g, or t
  misc_feature (256)..(256): n is a, c, g, or t
  misc_feature (437)..(437): n is a, c, g, or t
  misc_feature (442)..(442): n is a, c, g, or t
  misc_feature (451)..(451): n is a, c, g, or t
  misc_feature (640)..(640): n is a, c, g, or t
  misc_feature (722)..(722): n is a, c, g, or t
  misc_feature (757)..(757): n is a, c, g, or t
  misc_feature (881)..(881): n is a, c, g, or t
  misc_feature (960)..(960): n is a, c, g, or t
  misc_feature (967)..(967): n is a, c, g, or t
  misc_feature (1022)..(1022): n is a, c, g, or t
  misc_feature (1068)..(1068): n is a, c, g, or t
  misc_feature (1136)..(1136): n is a, c, g, or t
  misc_feature (1145)..(1145): n is a, c, g, or t
  misc_feature (1150)..(1150): n is a, c, g, or t
  misc_feature (1245)..(1245): n is a, c, g, or t
  misc_feature (1257)..(1257): n is a, c, g, or t
  misc_feature (1272)..(1272): n is a, c, g, or t
  misc_feature (1277)..(1277): n is a, c, g, or t
  misc_feature (1352)..(1352): n is a, c, g, or t
  misc_feature (1363)..(1363): n is a, c, g, or t
  misc_feature (1365)..(1365): n is a, c, g, or t
  misc_feature (1412)..(1412): n is a, c, g, or t
  misc_feature (1416)..(1416): n is a, c, g, or t
  misc_feature (1418)..(1418): n is a, c, g, or t
  misc_feature (1420)..(1420): n is a, c, g, or t
  misc_feature (1430)..(1430): n is a, c, g, or t
  misc_feature (1458)..(1458): n is a, c, g, or t
  misc_feature (1533)..(1533): n is a, c, g, or t
  misc_feature (1539)..(1540): n is a, c, g, or t
  misc_feature (1547)..(1548): n is a, c, g, or t
  misc_feature (1556)..(1558): n is a, c, g, or t
  misc_feature (1560)..(1561): n is a, c, g, or t
  misc_feature (1563)..(1564): n is a, c, g, or t
  misc_feature (1567)..(1567): n is a, c, g, or t
  misc_feature (1569)..(1569): n is a, c, g, or t
  misc_feature (1572)..(1572): n is a, c, g, or t
  misc_feature (1576)..(1579): n is a, c, g, or t
  misc_feature (1581)..(1584): n is a, c, g, or t
  Peptide Sequence Number=SeqID_7449
  Probeset Number=SeqID_14178
nggatgtgatgcagtgagtgngtncgtactgatctcatgtacactagagatctgatagtattctagcatatcgcatctactcagtctcacctcgnctgttcgctgctcacgctaacactctatatttctgtcctctgagcttggatgagtgcactgtgcttccgctgtcacacacgttactccatctctcgtcatagctcctagcttactatgaaacgtgcacgtagncgtggttgtctgtcntattatncaccgntctgtgcatatgttcattccgattctacacgtagcctgcgtcgaatatacacagtcttgcatccccgtcgtctgccacatcacgcgctgcgctcgtggcgttcgtgtgtcgtgtgtggtgttctcaagctgagctgcgcgcggcgccggcactgcagtgttaacatcatacctcactattncttanttctgttcnattgtatttgtcgagctcaactagttccgtactctctttcgcacttcgctgtctgttgtctctgtggtcgtacccgtgtcgaggacaataacataacactgacactgcgcgctctgcaccgagactgtagcggcgcttgtcagttcgcgagactcaattgtgacagcgtcacaccgagtgtgctgcgcntgtctcgagtgggtctgtaacgagcgccgacctcacgtcaggtcgcacaaccacaagcctagtcgtgccgtctcatcccgcntcgccaccgccctgcgccacggtcgcgtcccatancgcccagcgacatcgccacaacatagtcactcaccccgcccagcgacactacgcttctctaccaaacgcgcgagtcgcgtctcgcgcgatctttcgaacacacacaggtgtacaggggcatganccacaccacaaagaggaagactactgggagtgcattggaccacaggaaggagaaggagagggacaggcgcggtgagcanataggancacacgccgccagcgtcgacacaacacccggagccgtgcagcgcaagcccgccanacgcgcacgacggcgatctcctctgtcgtcgcgcacgcctctccgnctgcgctcctgcgtggcgtgctctcgtgttgcggcagtagtggggtacatcagaaagacactgcctgnctccggtgncgagngacgggttgtgcgcgtgaatcgccattgctatctactgcgggcacgagaagccgcttggtgtgtctttactaataatcattgtcacacacattcngagcaaccgttncgacattttttatanaatanggtttgtcttcttgagcgtgttgagtttgggttgtgttgtgtcgagtgtgtacgtggtgttgcctgttgtccgtngtatatctttntntttttcttaccatttatatatatatatcacttatcatatctcaatantcanantntgtatagtgntggggtatcgatatcaagtgtgtatatnttatgtatgaatctcgttagatataatattaatatatatttgtatttattttgccattgatgttgcgggggggantgggtnnaagtaannaaagaaannnannannagngntangttnnnngnnnngggggggggaaaaaaaa

SEQ ID NO: 4400 - DNA, 574 bp, Glycine max
  misc_feature (388)..(388): n is a, c, g, or t
  Probeset Number=SeqID_14179
gcacaagatgcgtgccactggtggcaagaagaacgcatggaggaagaagagaaagtatgaccttggtcgccagcctgctaacactaagctgccaagcaacaagacagtcaggaggatccgggttagaggtggaaatgtgaagtgtagggcactgagattggatactggaaattactcctggggaactgaagctgtaactcgcacgactcgtatactacatgtggtttacaatgcctcacacatccagcttgtgcgtactcagactcttgtgaaaagtgctattgttcaggttgatgctgctgcattcatacaatgctaccttcagcactatggtgttgagattggtaggaagaagaagacagctgccaagaaagaaactgcagacganggtgctgctgctgttgctgtggaagaatccataaagactaatcatctgcatataaaattggataatcgccagacagatcgtaagcttgatgctcacatagatgagcatgatgatggtggccatttactctcatacatctccttctaacctagtcaatatagcacaacagacatctacattgtacaa

SEQ ID NO: 4401 - DNA, 1336 bp, Glycine max
  misc_feature (19)..(19): n is a, c, g, or t
  misc_feature (32)..(32): n is a, c, g, or t
  misc_feature (72)..(72): n is a, c, g, or t
  misc_feature (75)..(75): n is a, c, g, or t
  misc_feature (88)..(88): n is a, c, g, or t
  misc_feature (155)..(155): n is a, c, g, or t
  misc_feature (352)..(352): n is a, c, g, or t
  misc_feature (475)..(475): n is a, c, g, or t
  misc_feature (807)..(807): n is a, c, g, or t
  misc_feature (809)..(809): n is a, c, g, or t
  misc_feature (812)..(814): n is a, c, g, or t
  misc_feature (816)..(816): n is a, c, g, or t
  misc_feature (821)..(821): n is a, c, g, or t
  misc_feature (1089)..(1089): n is a, c, g, or t
  misc_feature (1091)..(1091): n is a, c, g, or t
  misc_feature (1288)..(1288): n is a, c, g, or t
  Peptide Sequence Number=SeqID_7450
  Probeset Number=SeqID_14180
aattaaaaaaatttattanaaaaatataaagnaaaaatttatattaaataaataaaattcttccttgtgggntcncggtacactgccnccatactatccccaaccaccacctctaccatcctccacataacatctatactgtaaaattaccaccngcaaaacacacccaagactacccactgtacatctcctcttattctcttcttctcttctcttctttttcttatatctcttattcttctactactattatatcatcatctatatataatagatatattaacaacatcactacatcacatgtatcttctactctctcttttctctcttataatatttctatcctttcacnaaattctatctttactttattattatttatcttaattttctactgaacatacacatatcctaaccatcttcagtcttcatccgctaacacaccccatccgcactataaactcaccctatcccnatccgcctcacttcacaaatctatccacatataaccaacatacaatacattatctaatattacatctatcttcactcctctaaatacaattattatcatcttccacccacatacacccaaacactctataaacaaccacattaatacacttacatactctactatctatctatatctattttatatatatatcaattaaaataaatatatatatgtatatatatttaaacaaatataactaacaagaccacattctcaacaaatatatatatatacaacatagaaactcaccacccttccctctaacatatacatctctcctcccaatgctntnctnnncnctctntactgccctcacacactcacataataacaataacactaactcttctcaaatttcttaatatacaaatacacttctattatatatatattcacctctatacctcctctcctaacttcatatatatacttctttcatctctcacacttctatatcgttcttctctacctctatcgtcttcctcacatcctaacctatcacactatctcatcactacatataaagcacactccttaccaaacaacataatacactcatatatacatatacntnctcaattcttatactatattacatcatcctcaacctcatctctataattatcacttattacacctcatcttctcttatacatcatatacatctctccactcgcttctcctccaccatctctctccctcttcctcacttctcaattctctcccttccctcaatacacacccacccatacaccatcaacatacataccnctctctcaaactccattctgtcatcatattaatattataacacataag

SEQ ID NO: 4402 - DNA, 529 bp, Glycine max
  Probeset Number=SeqID_14181
tcagctacgtaggccccccccccccgaagatattatagctgatggcgattctactacaaccacaagtgagattacaatcgaagccttcttttctcaacttggaggcaagcgaatggacgaggttttactaaagaaccagaagtctcatgagaaaaaaatcagtcaagccttagtgcctgacatgaagaaaaatgcagctaacatcagactcgaaaacctcatatactacaaaaaattgggcgctggacagtttggttctgtatatttagttcgagagcggagtcatgacgagttcatggctcttaagtgtgtatcaaagtcgcaagttgctgaagctcaactagaaaagcatatccaacaagaaaagcaagtcatggaagcgatcaattttccatttgttatctctttcattcgatcttttaaagatgacaacaatgtatatttcttggaagaatacgtcaaaggaatggagctcttcgatgctattagagagatcggtattctggatacttcacagtctcaattctat

SEQ ID NO: 4403 - DNA, 2004 bp, Glycine max
  misc_feature (1)..(1): n is a, c, g, or t
  misc_feature (21)..(21): n is a, c, g, or t
  misc_feature (39)..(39): n is a, c, g, or t
  misc_feature (60)..(60): n is a, c, g, or t
  misc_feature (66)..(66): n is a, c, g, or t
  misc_feature (70)..(70): n is a, c, g, or t
  misc_feature (84)..(85): n is a, c, g, or t
  misc_feature (93)..(93): n is a, c, g, or t
  misc_feature (103)..(103): n is a, c, g, or t
  misc_feature (131)..(131): n is a, c, g, or t
  misc_feature (136)..(136): n is a, c, g, or t
  misc_feature (166)..(166): n is a, c, g, or t
  misc_feature (180)..(180): n is a, c, g, or t
  misc_feature (183)..(183): n is a, c, g, or t
  misc_feature (189)..(189): n is a, c, g, or t
  misc_feature (199)..(199): n is a, c, g, or t
  misc_feature (202)..(202): n is a, c, g, or t
  misc_feature (218)..(218): n is a, c, g, or t
  misc_feature (224)..(224): n is a, c, g, or t
  misc_feature (237)..(237): n is a, c, g, or t
  misc_feature (266)..(266): n is a, c, g, or t
  misc_feature (284)..(284): n is a, c, g, or t
  misc_feature (287)..(287): n is a, c, g, or t
  misc_feature (305)..(305): n is a, c, g, or t
  misc_feature (311)..(311): n is a, c, g, or t
  misc_feature (322)..(322): n is a, c, g, or t
  misc_feature (328)..(328): n is a, c, g, or t
  misc_feature (346)..(346): n is a, c, g, or t
  misc_feature (363)..(363): n is a, c, g, or t
  misc_feature (390)..(390): n is a, c, g, or t
  misc_feature (392)..(392): n is a, c, g, or t
  misc_feature (408)..(408): n is a, c, g, or t
  misc_feature (411)..(411): n is a, c, g, or t
  misc_feature (423)..(423): n is a, c, g, or t
  misc_feature (442)..(442): n is a, c, g, or t
  misc_feature (453)..(453): n is a, c, g, or t
  misc_feature (529)..(529): n is a, c, g, or t
  misc_feature (569)..(569): n is a, c, g, or t
  misc_feature (576)..(576): n is a, c, g, or t
  misc_feature (582)..(582): n is a, c, g, or t
  misc_feature (625)..(625): n is a, c, g, or t
  misc_feature (637)..(637): n is a, c, g, or t
  misc_feature (653)..(653): n is a, c, g, or t
  misc_feature (679)..(679): n is a, c, g, or t
  misc_feature (703)..(703): n is a, c, g, or t
  misc_feature (709)..(709): n is a, c, g, or t
  misc_feature (716)..(716): n is a, c, g, or t
  misc_feature (741)..(741): n is a, c, g, or t
  misc_feature (794)..(794): n is a, c, g, or t
  misc_feature (798)..(798): n is a, c, g, or t
  misc_feature (812)..(812): n is a, c, g, or t
  misc_feature (823)..(823): n is a, c, g, or t
  misc_feature (839)..(839): n is a, c, g, or t
  misc_feature (857)..(857): n is a, c, g, or t
  misc_feature (860)..(860): n is a, c, g, or t
  misc_feature (867)..(867): n is a, c, g, or t
  misc_feature (869)..(869): n is a, c, g, or t
  misc_feature (930)..(930): n is a, c, g, or t
  misc_feature (993)..(993): n is a, c, g, or t
  misc_feature (1020)..(1020): n is a, c, g, or t
  misc_feature (1135)..(1135): n is a, c, g, or t
  misc_feature (1146)..(1146): n is a, c, g, or t
  misc_feature (1165)..(1165): n is a, c, g, or t
  misc_feature (1167)..(1167): n is a, c, g, or t
  misc_feature (1264)..(1264): n is a, c, g, or t
  misc_feature (1282)..(1282): n is a, c, g, or t
  misc_feature (1284)..(1284): n is a, c, g, or t
  misc_feature (1293)..(1293): n is a, c, g, or t
  misc_feature (1350)..(1350): n is a, c, g, or t
  misc_feature (1408)..(1408): n is a, c, g, or t
  misc_feature (1415)..(1415): n is a, c, g, or t
  misc_feature (1425)..(1425): n is a, c, g, or t
  misc_feature (1448)..(1448): n is a, c, g, or t
  misc_feature (1469)..(1469): n is a, c, g, or t
  misc_feature (1516)..(1516): n is a, c, g, or t
  misc_feature (1623)..(1623): n is a, c, g, or t
  misc_feature (1640)..(1640): n is a, c, g, or t
  misc_feature (1740)..(1740): n is a, c, g, or t
  misc_feature (1768)..(1768): n is a, c, g, or t
  misc_feature (1837)..(1837): n is a, c, g, or t
  misc_feature (1855)..(1859): n is a, c, g, or t
  misc_feature (1965)..(1966): n is a, c, g, or t
  misc_feature (1975)..(1975): n is a, c, g, or t
  misc_feature (1980)..(1980): n is a, c, g, or t
  misc_feature (1986)..(1986): n is a, c, g, or t
  misc_feature (1994)..(1994): n is a, c, g, or t
  Peptide Sequence Number=SeqID_7451
  Probeset Number=SeqID_14182
ncagtacggtcagtcgtggcngctgtgatagcagtcagnagctgtcgctgtagatgatanacgtantcgntgtgctagcatatnnacagctcngttacgcagntagctgccggctaggcagtgcacgggancgagnatgacgagtgctagtcagcgatcgtatcgnatgatgacattatntantactgntgctgacgancgncgtcgatggtagttancgggcnacagggggtagtngagtagtatctcagtcatgaggaacgaangtcgatcagtgatcggantgncgtcgctagtgagtcagnggtatncgtctgtcagnacagtngatcagtgactgaatgtngtatcacgctcgatacnagagttattggcatcaatagtagcgangnatcgtagacgacaganctnggtaacgtgctncatcacgtatgaatagtancatgtcaagcnatactactatcagcgtaggatgtagatacgttgtgattgatgatgtatgtatgcgtagatcgcgcgtcgacgcgcntcgtgatcatagtcagacagtattcgagcattgatagtcnaatggtntgtgantacactatgagtcagtgatcagtcgcgcagtgtcgatgtcatnacgtgtgtctanacgtgtagctcccatncgacgactacagacgacgcctcgaantagtatagtgttgattgagtaaangatcgngagatgntgtgcatgtagttgagtcatgatgntcgagtatctgttgctagtaatctgattatagagttctgtacgtggcagcacngtgnatcacaatgtcgcntgttgatcgtnggtagtcttcagtcgngcgtaggtcatcgtcgtngtnatattgntnatcacgtaatcggatagtcgacgatgattgtatgctgcgattgcgtgtactagtcatgtcntataatcactcatgtcatcgagcagacatacatggccactcatctactgttcggcagcagagnacgagacgtacgtagtacacagggtgnttatgcgcgatcaataacatgacgtctctaatcgtgcgcgtcatcgtgtctgagctgcgtgcgtcggtatgtctgatgagcatatcagatatgcgagagactcagtgtgcgagtnaacgtgctagnatagtagtaagtgagagangncgcatatactgtacgtatcaacatgtatgatcatgtgtacagaccacgctacatgcacgcagacgaggagtgcgtcgacacacgcctcgccgggatnagtgcgcgagacgcgcantnacacaactncggccagcatgcgctcgagacgtacgatactagcgtcagacgcacgacgctggatgnagtgagcagcacgtcgacagcacgcgagacagcggcatgatagtgagatgccttggtncatgtgnttgtggatgngcacgcgtcggagcgtgctggangatcacgacacgagagcactntgtctgagtgcatcgtgtcggcactcgtgtgctgtgctatctacgtngcgtgttattgatgatgtgatcgtagtgtatgattataggagcagcagacgtgctcgcaggagcgaacgacgtctcacacgcgcgtgagtacagtcgtgtggcgtgnatctagtatcatagcanagtaaatgatatcagtcatctgatatgatcatgtagatcagacaagacacatcgacaggattaatagtcgtcgttagcgccggcaggatgctcagctcanagatgcagagatacacacgagctcagancgcagtccatcgtgatagtacgagcgcactactgggttctctgcgagtgcgcatcatatatacgttcantaatggcggacgtcaatnnnnnctctcttcacaaccattacactccacagatgtgtctgttcgtatagcagtgcgacgcgtgactgtctgtctgtcagtgtatggtacgtgctcgctcgaagtttccnngtccgtccngttcncgtatnacaccgcntagcactata

SEQ ID NO: 4404 - DNA, 1374 bp, Glycine max
  misc_feature (12)..(14): n is a, c, g, or t
  misc_feature (94)..(94): n is a, c, g, or t
  misc_feature (198)..(200): n is a, c, g, or t
  misc_feature (266)..(268): n is a, c, g, or t
  Probeset Number=SeqID_14183
tttttgcacacnnncggaggggggggggaacgaggcaaagccgagggccaccagctagcccatcatcaacggtcaacaaggaaagtgggtggtnctcgcccgttgtggatgcgcggtcgttcttaggcatgtgagcggaggcgtgagaggtaggtaacaagaagttaataccaaggcgaggaacaacaccacgtaccnnntcgatctctggagccggtggagcgggtcggtcagagaggggactggggtggacgagtgtgtagccnnntgcgctgctcatatatatctcgctcctccataaattcactattattcataataaaacactaaatgggcagatataaaacatctaccaccatcatacacctcctcctcacctctccccaccccctccaccctctatagtcggactacaatactcttattatattgtgcggtccgcgggatacgacagcatacacgcggctctcgtcaaacagcccgattcgaatgctaaatagaaagagtatttttagtctgtttgatttttttccgcactttgcttcttagaattgcttaggcgttttatctgttatctagtaaatgtttgtatatgtagagaggcagtattatggatgatgtgtaggttatttttatgtcgtcgatatataacgagtcaattagagagagatgacgatagtaatgtcaataaaagactgagagataataaagcgctcacgtcaacgcaccgcgcacaccacactcactacctgcacagcgcgcgccgcgcggcgcagcaacacctgctgcgtgcagacctaacaagagcagacaaccacttaccacatgatattgtagcagtgtatatggcgtcgccgcctcgagtatcctctcttttcactccatacaccctcttccttcgtgcggctaagctctaatcactattgaacacacgacatagaatatcacaccgcatgtcctgtgctttctttcatataagatactcctacaacaactgcgagcgaggcagtgtattatacttggtaatgttttgtgataaaatatcactatcaccacacctctacccgcccatcgcgtttattttctctgcagtgccacgccccccgccacccaccatcatccaacgcacgcgtactatacacaattgacacatgcgctacgtacgatttgataatatacaagtgtatatagactccttgccacactacccgtcatcatccccaacagacaaaaagagtggatggagggttacaatattataaataacccagccctctacatttcatctacaccaccgctcttttgtatacttatgccgtctctccattctatgaccctcgccccatcctgcgcacctctctacgttgttgtgtt

SEQ ID NO: 4405 - DNA, 826 bp, Glycine max
  Peptide Sequence Number=SeqID_7452
  Probeset Number=SeqID_14184
taatgcacgcacaccacacatccactcacaccacggaatgcacaacaagctattctgacacacccacccacgaagcccacgccatcacacatccatggccggtgcgagcaagcatgccatccgcgcggacagcgagcttggcggatgcccgggcagggagcagggcggccgcgcgggcaaccagcttggcggatgcgcgggcgacgagcatggcagacatgtgggcggcgagcatggcgcgcggcggtgagcttagcggatgcgcgggcgacgagcatggggacgtgcaggcggggagcatggcgcgcggtggcagctcactccaccgtcgactgctcagcgcaggagtgcggcggcttcttccctcgggcgcgcggcggcctcttcgctcaggctcccagcggcctcttccctcgagcatggcgcgtgaaggccactatagaggagctccttcctccggcgtcggccaaccgacgctgcttggcgcgcggtgttgccgctctctctctctaggaaccagcaagcacggccgggcagtgatgcggataccagggtcgggcgagtggcacggacgcgcgtggcagtccggtggcggcgagtagtaccaggcgagcagcgcggtgagcagggcgaggtgacggcagtggcgtccttctggtattgtgcccggcgagaagtacggccggcggtgaagtacctgtttctgtgatggacttgattgcttttcctttttagtttctaggggtccttgtgtaaatttttaggacagctttgtaacttctctgtaactccaccgacgataaatgcaagacaacacaatagtgtc

SEQ ID NO: 4406 - DNA, 1153 bp, Glycine max
  Probeset Number=SeqID_14185
acgttaatgctgttgtacttgctaggtccctggtggttgtggagactcctttgaacattacatagtaacaaccaaaatactatacattttctctatctaaatctattactaagaatgtctaggattattattttactcttgattgaatttggagaaacatgatagtaatcacataaaccatgtaaggtctcatattaggttgctcttgagckcataacatcaatagaaagagcatggtatatacattctcaagggatattaactttaaaacatgctatctcttcttatggttaactttctagctaattctttttttaaaaaaataataaaaatgattcacaatccgtttcaaaataaaatcatttatagttacttattatcatcccgtaacctctaaagaagtattagaaatctttcattcacacatttaaaaagaaagtaaaaaagattaattatgttgtatgtagagaaatgttggaaaaaggaatatgtaaatatgcatgaaaaattagaaatagctaacatcacttaataacaaaaaattcacttaattactcatttggtctttatagttgtacaaattttattttttaatctttataattaaaaatgatcatttttaatccttatacataatatttatatcttttttagtaccaaagagtttatataatatggactaaaagagattaaaaaggataaggtgatatactatttttttttttacttttttttttgttttgtttattcatttgtatgttgagaatccattcaccttatatagaataaaaaagattaaaaatgatatatatataggactaaaacaaataatttataagtataagaactaaagtagaatacaaataatttataagtataagaactaaagtagaatttataaagaataattgtataaaaaaaattatgctgacatgtcaacttcatgactcatctcagattttatatattatactaataaatttctaactcaaaatttgaagattgttaaatttatactaaaaaaatgcaaatttgattatttttctgcaaaattcaatctactttttactacttgttaaggcacagctattcttgctaacatttgcatttacaataataaaattaccatcggattcacgctcaagcattcatc

SEQ ID NO: 4407 - DNA, 1683 bp, Glycine max
  misc_feature (41)..(41): n is a, c, g, or t
  misc_feature (146)..(146): n is a, c, g, or t
  misc_feature (213)..(213): n is a, c, g, or t
  misc_feature (252)..(252): n is a, c, g, or t
  misc_feature (339)..(339): n is a, c, g, or t
  misc_feature (774)..(774): n is a, c, g, or t
  misc_feature (778)..(778): n is a, c, g, or t
  misc_feature (829)..(829): n is a, c, g, or t
  misc_feature (917)..(917): n is a, c, g, or t
  misc_feature (976)..(976): n is a, c, g, or t
  misc_feature (1112)..(1112): n is a, c, g, or t
  misc_feature (1244)..(1244): n is a, c, g, or t
  misc_feature (1461)..(1461): n is a, c, g, or t
  misc_feature (1511)..(1511): n is a, c, g, or t
  misc_feature (1605)..(1605): n is a, c, g, or t
  misc_feature (1607)..(1607): n is a, c, g, or t
  misc_feature (1627)..(1627): n is a, c, g, or t
  misc_feature (1650)..(1651): n is a, c, g, or t
  misc_feature (1659)..(1670): n is a, c, g, or t
  misc_feature (1675)..(1683): n is a, c, g, or t
  Peptide Sequence Number=SeqID_7453
  Probeset Number=SeqID_14186
cctagttacacgatgagtacattctcacttccccatattcntctctctctcagtcatgcatgcctgtctcgtgtgcttccgtgttttactgtcgtctatgtagtttgcgtgtctccgactcgcattataccaattgtatcacaccnatgcatcatcattatcacatatacacgacctcctcctatattctctaactgaatcttcataccaccncgccagcagcacaactccccactctacactccccatccnacacactccttacaaccactactctatcgagctgttcacgtgataaattgtgagacacgaatcatcttacttaattgatacagatcntatattacacacaagcttacatgtctcggtccttcatctgtcacactccatccatcgctggcagtgcgcttgctgacacagactttctctgtcaacatctctccctcctcttgtattccagtctcttctctctaccttcttatcagtgcgtcctgtatttgttagcgtcgacgtacatgttgtcaatgaagagagtcgatacgtaccgacagacagagatctacaagtaccattaagcctcatactaaattcacattacaactccattcttgatatataacagtacgatcacttatctgctcttttctacttattattttatgttctgatgatgtcagtcttaattggatagtacattctggtagatgcgcacaatatatattgattctatatatgtttcctaagtattatatagaattttcctttccttctcgnttcntattcttcctatccataatactaatatctactacatcaacaagattagccnaatattaaaaagtatcaataacaataatatagattatgatccacaaatgttgcagaagtggtctcgtagagtactagaaatggtatcnattacatgattaaactcagtatagtataactatactcaattatcaattttatatttatnttatcttaatatatagagattataataatacattatttattcttaagttataatgtctgttgcgtctatgtataccgcctatacatatttattattatataaataatataaatcgaataaatctataaagttgatntatatgattcactttagagattgctagtttttgcgttctctacgcgattatatgttgaaatattgacttcgtcttgtttgtgtttaccgattctaattctcattcctgtcggtttcgtcgttgtattcatcntagttgtgtggattctttctcatcacaccacgatatacagtctacagcccacacttatgtgtgctttcccttctcttcctctcgagttctacctctcgtcgctctagtctctggtctcttcttcttccgtatatgttgaggcgggaacactcattgaagatctactccacacaatcacaatcacccctatctccatctcttcacccacgtcgctctntgtgcgccacgtgtcgtttgcgtgagggtggttcccttgttgcgtacgcngggtcgtgtgcgtcactccgcacgcagcgtaatgccgagtcgcagctccttaaacccacataattctctttccccacacaccgccgcagggggncnccggcggcggggtgcgccgngggggtcgtgtggccggggcggnngggggggnnnnnnnnnnnnggggnnnnnnnnn

SEQ ID NO: 4408 - DNA, 1574 bp, Glycine max
  misc_feature (1)..(4): n is a, c, g, or t
  misc_feature (17)..(17): n is a, c, g, or t
  misc_feature (19)..(19): n is a, c, g, or t
  misc_feature (40)..(40): n is a, c, g, or t
  misc_feature (71)..(71): n is a, c, g, or t
  misc_feature (117)..(117): n is a, c, g, or t
  misc_feature (189)..(189): n is a, c, g, or t
  misc_feature (226)..(226): n is a, c, g, or t
  misc_feature (255)..(255): n is a, c, g, or t
  misc_feature (270)..(270): n is a, c, g, or t
  misc_feature (333)..(333): n is a, c, g, or t
  misc_feature (358)..(358): n is a, c, g, or t
  misc_feature (371)..(371): n is a, c, g, or t
  misc_feature (380)..(381): n is a, c, g, or t
  misc_feature (383)..(383): n is a, c, g, or t
  misc_feature (481)..(481): n is a, c, g, or t
  misc_feature (650)..(650): n is a, c, g, or t
  misc_feature (661)..(661): n is a, c, g, or t
  misc_feature (699)..(699): n is a, c, g, or t
  misc_feature (720)..(720): n is a, c, g, or t
  misc_feature (738)..(738): n is a, c, g, or t
  misc_feature (755)..(756): n is a, c, g, or t
  misc_feature (839)..(839): n is a, c, g, or t
  misc_feature (842)..(842): n is a, c, g, or t
  misc_feature (845)..(845): n is a, c, g, or t
  misc_feature (1057)..(1057): n is a, c, g, or t
  misc_feature (1204)..(1204): n is a, c, g, or t
  misc_feature (1253)..(1253): n is a, c, g, or t
  misc_feature (1296)..(1296): n is a, c, g, or t
  misc_feature (1315)..(1315): n is a, c, g, or t
  misc_feature (1478)..(1478): n is a, c, g, or t
  misc_feature (1536)..(1536): n is a, c, g, or t
  misc_feature (1574)..(1574): n is a, c, g, or t
  Probeset Number=SeqID_14187
nnnnggtggcgccgcantntgcgctcgtcgcacccacgcnattactgtctatattgacatcacactcacgnatgtgatgatgatatgtgatatataccacacacatagagggggacnattgatagacacaccacacactatcatcaacaaacatcactacaaataatattatatcaaacaaccaacaanacacacaactatgcgattgtgtatgtagtggtgtagngtggggagtgtgatggagaagagtgaatnagagaagactaatgnaggatgaaaaatagagaaatgatatagtttgaatatatatactatttagacacatagatactntaccactcaccagacacagcgtatnagcccatacttcnataaactcnncnctacatctcaccattgatgtatagaacgagatatattaatatatagtatgtaggagtacaccctcactaatatacgaaatgctctacatattaacaantctccactttacgacgatatattgtatagtaggtcatctacaacatcaactgtacgcacaatcgttagtcgttatctctcgtgttcttcgcatcacgcttctctcacagccgccactacccctctttattactctagctacaccacacatcatgtgacagacaccactnatcgtaatccngacgcgagtgtgctgaatatacgcttttacattattantaatataatacgagcacaccnacccgctacctacagtcntctcgtcccacgttgtnncgtgtgtttatagtatttattgtattgtcgcatattagttaatcttgatttaaatatagagacacaatacattatgatagatntanaanaactaccagacactttatccctctcgcagtatgactttctagatactgacacactcgcttccctcctacacacatataacatcactttatgagtgacacaatcatcatttaatatttcgtgtgtgacactactgtatccagtagatgtgacaacgcatctactagcgttgactaccgacgtcaatgctgggtgatgcgcatggttaggatgntgagaagacgtctcggcactgatgtgctacagtcgcgtatacgctatcctcttgtgctatgtgctgtagctcacactcacctcaactcactcttacgctgtatcctctgtctatgtgataagtagcgacagagcactcacacatctncatgagctacgacactcatacgcacatgtcgtgtctggtagctctacanctgaccagatatcacatagcacatctccgtgaactctctcgcntcagtgcacgatgcttacncaccgtacgacgctactctgtattgacgcatcacggacacagtgaacctacgtcctatcgctaacagcgtacacgtgtcgatatcgcatgcgacagacgatcattactatatacactcaatacacgaacagcatatagtactaacgagttctatacgacttcncagctgatcgctggagtgcgtctgctctatcacacgctacatactgacacagatacgnacccacatcacgtcacagcgctctgtcgtgctgcacgn

SEQ ID NO: 4409 - DNA, 674 bp, Glycine max
  misc_feature (601)..(674): n is a, c, g, or t
  Peptide Sequence Number=SeqID_7454
  Probeset Number=SeqID_14188
tcagctacgtaggcccccccccccaattaccaaccttttcttatctcaaaacaacttgagcaacaacatgaacaaactttccatcgcagttttactattctcctccctttacctcgctactgcccttaacgatgctccttgggctcctttgcaaagaggtatctatgaaaacagccccttccttactggtctttctgacttcggaggtcaaaacactcttggtcaagccttcgaaagtggactcttcaacactgttgaaggtggagttggtcaaatcttgaacgcctggtaccaaagagatgaaagaggtttcacttatatcgctgaacctcaacttgttttgcaagacggaagccttcaaaacagcaagtatggtatgcgtgttgaccctaacaatggtagaagagatattatctactggtctattcaacaactcctcgaagaaaacaacttacctactggcacaaacatcacttgggatgctgacactgatgctgtgactgttacaaccttcaatggtattgatcaattccttcaatatcaaggattccaacctttaaataactctaccgatcctgatgttgttgttgactctcccgannnnnnnnnnnnnnnnnnnnnnnnnnnnnnnnnnnnnnnnnnnnnnnnnnnnnnnnnnnnnnnnnnnnnnnnnn

SEQ ID NO: 4410 - DNA, 1904 bp, Glycine max
  misc_feature (1)..(1): n is a, c, g, or t
  misc_feature (30)..(30): n is a, c, g, or t
  misc_feature (45)..(45): n is a, c, g, or t
  misc_feature (71)..(71): n is a, c, g, or t
  misc_feature (74)..(74): n is a, c, g, or t
  misc_feature (76)..(76): n is a, c, g, or t
  misc_feature (100)..(100): n is a, c, g, or t
  misc_feature (140)..(140): n is a, c, g, or t
  misc_feature (188)..(188): n is a, c, g, or t
  misc_feature (204)..(204): n is a, c, g, or t
  misc_feature (223)..(223): n is a, c, g, or t
  misc_feature (236)..(236): n is a, c, g, or t
  misc_feature (256)..(256): n is a, c, g, or t
  misc_feature (286)..(286): n is a, c, g, or t
  misc_feature (310)..(310): n is a, c, g, or t
  misc_feature (325)..(325): n is a, c, g, or t
  misc_feature (469)..(469): n is a, c, g, or t
  misc_feature (623)..(623): n is a, c, g, or t
  misc_feature (649)..(649): n is a, c, g, or t
  misc_feature (690)..(690): n is a, c, g, or t
  misc_feature (830)..(830): n is a, c, g, or t
  misc_feature (832)..(832): n is a, c, g, or t
  misc_feature (846)..(846): n is a, c, g, or t
  misc_feature (869)..(869): n is a, c, g, or t
  misc_feature (925)..(925): n is a, c, g, or t
  misc_feature (984)..(984): n is a, c, g, or t
  misc_feature (1011)..(1011): n is a, c, g, or t
  misc_feature (1081)..(1081): n is a, c, g, or t
  misc_feature (1143)..(1143): n is a, c, g, or t
  misc_feature (1146)..(1146): n is a, c, g, or t
  misc_feature (1153)..(1153): n is a, c, g, or t
  misc_feature (1157)..(1157): n is a, c, g, or t
  misc_feature (1168)..(1168): n is a, c, g, or t
  misc_feature (1197)..(1197): n is a, c, g, or t
  misc_feature (1234)..(1234): n is a, c, g, or t
  misc_feature (1290)..(1290): n is a, c, g, or t
  misc_feature (1338)..(1338): n is a, c, g, or t
  misc_feature (1341)..(1341): n is a, c, g, or t
  misc_feature (1346)..(1346): n is a, c, g, or t
  misc_feature (1357)..(1357): n is a, c, g, or t
  misc_feature (1388)..(1388): n is a, c, g, or t
  misc_feature (1406)..(1406): n is a, c, g, or t
  misc_feature (1413)..(1413): n is a, c, g, or t
  misc_feature (1455)..(1455): n is a, c, g, or t
  misc_feature (1477)..(1477): n is a, c, g, or t
  misc_feature (1497)..(1497): n is a, c, g, or t
  misc_feature (1517)..(1517): n is a, c, g, or t
  misc_feature (1523)..(1523): n is a, c, g, or t
  misc_feature (1537)..(1537): n is a, c, g, or t
  misc_feature (1539)..(1541): n is a, c, g, or t
  misc_feature (1544)..(1544): n is a, c, g, or t
  misc_feature (1548)..(1548): n is a, c, g, or t
  misc_feature (1551)..(1551): n is a, c, g, or t
  misc_feature (1560)..(1560): n is a, c, g, or t
  misc_feature (1572)..(1572): n is a, c, g, or t
  misc_feature (1609)..(1609): n is a, c, g, or t
  misc_feature (1675)..(1675): n is a, c, g, or t
  misc_feature (1685)..(1685): n is a, c, g, or t
  misc_feature (1693)..(1693): n is a, c, g, or t
  misc_feature (1721)..(1721): n is a, c, g, or t
  misc_feature (1759)..(1759): n is a, c, g, or t
  misc_feature (1781)..(1782): n is a, c, g, or t
  misc_feature (1803)..(1804): n is a, c, g, or t
  misc_feature (1813)..(1813): n is a, c, g, or t
  misc_feature (1816)..(1816): n is a, c, g, or t
  misc_feature (1826)..(1826): n is a, c, g, or t
  misc_feature (1840)..(1841): n is a, c, g, or t
  misc_feature (1843)..(1843): n is a, c, g, or t
  misc_feature (1857)..(1857): n is a, c, g, or t
  misc_feature (1860)..(1860): n is a, c, g, or t
  misc_feature (1864)..(1864): n is a, c, g, or t
  misc_feature (1870)..(1870): n is a, c, g, or t
  misc_feature (1872)..(1872): n is a, c, g, or t
  misc_feature (1874)..(1875): n is a, c, g, or t
  misc_feature (1882)..(1882): n is a, c, g, or t
  misc_feature (1900)..(1900): n is a, c, g, or t
  Probeset Number=SeqID_14189
ntatatgtctgtcgagatgaggacgcactntatatgatcggtcgnatgatgatgatagtgagcgtgtcaantgncncgagcacatacaatcatcgagacntcacttatatgttcaacgatcgacgtagccactgagcgangccgtacgagacgtatgacgcgtgcgcgttctgagtggtctactcgtntatgctagtatgcgcntgcgctctgcgcgttcttncgcatcgtgcganacgcgcttatgttctgtggntgtgctctctccgtgttgtgagtagtgtgnagggaacgtgtgatcttatgtctngactctgacgtatgngccttagatgagtaggtagatgtatatcactatagcatatacgctactacatgcgcgtgcgaggacagtagtacatctgtatcatagacagagtagtagtagcgtgtgtacgcagcgactccgtctagccgtagatcgttgctntatatatattgtatgatctgtgtcttaactcttcacgtcagcttgagctcatcatccatatatgataacgcatatgatatctcacgctcagtccgtcgatgcaaggtgtgcgatgatgcacatctcgcgcgtgactagccaatgtgatcagacnacggagaggcagagcagcagcgaggngagacggtagagagatctactgttatgacagcggaagcatngccacgagacgagagtatgcgtgatgcacgagtatagagcctggattgacgaggctgagtgctgagagaactgtgtcgtgacgagcttgaatatcactcagtaagagcgcgagacatgatcaacgcagaagcagcacacntntatctatacactantatcacatctatcagtagacatntctcccatctatacacacacggaagcggtctgccatagctgcatagtactacacantagtgatgcatagatgtgaagaagaatgaggaatcggagctgagcacatctacaaacgnagaccagcgatatactacataatagtncgtatatatggacatatcgtgataggcttcactatcgtttatactgcacatcacgagcgaacagtagcangtagcagaacagaatgcacgcgccgcaccatgcctccgcgccctccgcgtgctgcgtctgtnccntttcctntacntcttcttcatntcgtcttctcctgtcttctctcatggtcntttcatatctgatctgatggtattcgtagtgtgactngtaatgatgcatgatatatgttaagatgagtagtataatagtgaggttagtggganaaggtcaggttagtgatagtgcagctcatagtaattagggtgagtggngantcgcnctagctgccgncgaaggaatgaacgatagaatatacgaatgnacagagcgcagacagtancacgccncacgcacaccgccacacgctagcagacctgacgctcgtccgntggggcgactgcgtgctccgtntgtgcgtggtgttgttgtanaatataatagaatctactcnagcgtngttcttctcttacntnnngantgtngtngcggtgagnatcggcagatgnggctcatcatgatgtatgtgtctactatgtatgttgntcttgctgtattttagaaataatagaggagagaagcgagccgcgcgcagctccctctcctcccttncgcccggccncggcgggnggtatgactatcttccttcatatcttcnacagctgggcagcgcgtacagcaccacctaatacgcanagacatggagtagcatcgctcnnatcagtaactccgccgacagnnggggggggncgnggcggggtgnggtggtgttgtgtnngngggtgtgtgtgtgntgntggngttgtntntnntttgtgnggggttggtggtgggggnaaaa

SEQ ID NO: 4411 - DNA, 598 bp, Glycine max
  Peptide Sequence Number=SeqID_7455
  Probeset Number=SeqID_14190
accgccgcaggaaattttactttttctctctttcttccgccaccggccaaggaagggaagtccattctacttttctaaaatagaccagcatatctatcttccctaattcatatctaatcgacactagtgtgatcacattaaagccactattttcgagcaacgtcttctactcctttgtcccaattatttcaacttctcttttgaggatggttcgatttctttgcactttttaatggcggctatgcttctgctccttccgccaaacacaaagcagaccaaggctttgctggagagatgttcaaatgtaaaagaactgatgcagatttatggtcaattgttgaaaaaaggcaccatcaggaaccagttaacagtaagcacgctcttggcctcatacgcaagaatagagttgggtaacttagcctatactcctatggttttcgacagcataagctcacctaatactgtcatatggaacaccatgattagagcatatactcaaatagtaatgacccagaagcagcgctgcttttgtaccatcaaatgcttaacaactcagtacctgacaattcttacactttcccttttcttctcaaagcat

SEQ ID NO: 4412 - DNA, 1755 bp, Glycine max
  misc_feature (22)..(22): n is a, c, g, or t
  misc_feature (41)..(41): n is a, c, g, or t
  misc_feature (43)..(43): n is a, c, g, or t
  misc_feature (107)..(107): n is a, c, g, or t
  misc_feature (133)..(133): n is a, c, g, or t
  misc_feature (249)..(249): n is a, c, g, or t
  misc_feature (309)..(310): n is a, c, g, or t
  misc_feature (414)..(414): n is a, c, g, or t
  misc_feature (504)..(504): n is a, c, g, or t
  misc_feature (676)..(676): n is a, c, g, or t
  misc_feature (710)..(710): n is a, c, g, or t
  misc_feature (717)..(717): n is a, c, g, or t
  misc_feature (872)..(872): n is a, c, g, or t
  misc_feature (885)..(885): n is a, c, g, or t
  misc_feature (973)..(973): n is a, c, g, or t
  misc_feature (1067)..(1067): n is a, c, g, or t
  misc_feature (1074)..(1074): n is a, c, g, or t
  misc_feature (1077)..(1077): n is a, c, g, or t
  misc_feature (1094)..(1094): n is a, c, g, or t
  misc_feature (1098)..(1098): n is a, c, g, or t
  misc_feature (1107)..(1107): n is a, c, g, or t
  misc_feature (1158)..(1158): n is a, c, g, or t
  misc_feature (1191)..(1191): n is a, c, g, or t
  misc_feature (1272)..(1272): n is a, c, g, or t
  misc_feature (1309)..(1309): n is a, c, g, or t
  misc_feature (1367)..(1367): n is a, c, g, or t
  misc_feature (1391)..(1391): n is a, c, g, or t
  misc_feature (1414)..(1414): n is a, c, g, or t
  misc_feature (1421)..(1421): n is a, c, g, or t
  misc_feature (1470)..(1470): n is a, c, g, or t
  misc_feature (1494)..(1494): n is a, c, g, or t
  misc_feature (1629)..(1629): n is a, c, g, or t
  misc_feature (1635)..(1635): n is a, c, g, or t
  misc_feature (1646)..(1646): n is a, c, g, or t
  misc_feature (1650)..(1650): n is a, c, g, or t
  misc_feature (1673)..(1673): n is a, c, g, or t
  misc_feature (1678)..(1678): n is a, c, g, or t
  misc_feature (1685)..(1685): n is a, c, g, or t
  misc_feature (1755)..(1755): n is a, c, g, or t
  Peptide Sequence Number=SeqID_7456
  Probeset Number=SeqID_14191
tatgcggctggtgtgcggcggntggccggctggagcgcgcngncacgtctctcagcgcgcgcaaggtgctgcgcgatgaggcggatggcgcgctgctacacgcgcgnactgacgcgcgccagcgtagagaggnagattggtctgaatacacctcccccgtatgtagaggatgagatgacttagtgcgtgataagacggggaagcccactcgcgccgctaggaccagatgcgggagagcgacgaacctantacgcaagacagagcgactatagtattaatctcagtcttatgtttgtcggtgtgtgtcanncagaatagtgctcatcacaggtagatataaccagtcggatacagacttacgtactactctgagagtcacttcagtaatacgtgtgatgtcagcgcgatctatcnatctcgatattctatatagctacgacaatcgcgtcaagctggagcgggcgcgagcaactagcacgtagcggtaggacgctcactgagcgnacgaccctcacatgagcgcgcacagctgcctcgcagacacaacatcatgtcctctctgctgattaagcacgtatcttgttcgactatacgaaataaagactgaatgtagtgatgaatcatacagtaggcgatcgcagagatataagatagactaacatatataatactatcntacacgtatgagagtacgagatagagcacaaatnataatangcagcacgagatatcgctcgcacagccgagcactgcacgctattctctcatctgcgttcgcgtacatgtacgagatgctgcggtgattatacacgatagataacgtctagataagcagttatgagtgctagtactcatcactcctatatagcagngtgatactactcntactgcacatatctagagtagggatgatcgatagagtagactactcgatactcacatgagacagtcgccagatacgatgatacacatngttatacatactagatcgcgcgtcgtagtgatctgctgcgaatcgtgcaactgatgactcggcggcgctgctgtgcgacagagtgcgctccaantgtatanagntcatcatgagatagacntctncacgtacgnctctacgagacgagatgccactcacagacactagcaaggatgtatgatgancgtgattgtacacatactagagtatgagcaggnctgatataatataacgatagatgacgttcgcctatgtgcacagacaagcatcgtatcgacgaccaccaccatcaatagtanacgtatacatgtgctctgcaagtcttgcgcgcgcaangatacgtgtattgctagaccatgcatcagagcctgctcacaccagttgcgtctcgtanccactaaacttgctatacatacgncgactcgccgtcagctcgcgcgncgacgcngttccaacacgggtacgcacgacgacgctactctgctctatcgagctgngtcactatcatgatgtgacgactntcactatgtgcggtgacgtcgagatgtcagacagtgcaacggacacgcgatataccgactagtatcaggtgcgattctagcagtagtatactgaagtcgacgataatactgatagccggccgcagcgatgacacngacaancatgactcagnacanctacacgtcgctccccatgtcanatgtnatcatanatacataacctatgtacatctacactacgtcatgtttatctgaatgactgtactgcagtcgcgacgtcan

SEQ ID NO: 4413 - DNA, 644 bp, Glycine max
  misc_feature (644)..(644): n is a, c, g, or t
  Probeset Number=SeqID_14192
tcagctacgtaggccccccccccccctcaacaatcctcctcttattaccctcaacacctctcccttgacctctccaaagaaaaagatcttataactcctcttaaagatgttaatcctcactctactgcatctcagaccagcatcaaaaagctcggactcttgctagatccacataaggaccgctccctagcggcccaggtcatgacaagcacgacgacagggagctctatgcatgcgtcccctaagagccttttggaagtgtcaaagaaattcagcaaactgaaatctacaaatgcaaccaatacttcaggggaattcacattgataagtcccaaagatcttgtaagaaaggcaatgtcgaagctgaaaacaaaggagaataataatacaaagcaggagatgcagaggacagcaagtgcaacatccaagaatttcaggaaatcattgagtctgagatttactccacagttaactgataaaaaagatgaaaatctcaagacattgtctccaacttttgaagagagcgttccattaacaaggactacaagtgcatcaaataaagagaaggcagctaaattacgtcggatgaagaagatttataacgatgatttgttaagactgagcagatcaaatacatacagttn

SEQ ID NO: 4414 - DNA, 471 bp, Glycine max
  misc_feature (213)..(213): n is a, c, g, or t
  misc_feature (241)..(241): n is a, c, g, or t
  Peptide Sequence Number=SeqID_7457
  Probeset Number=SeqID_14193
cgccctatcccgcgtccaattacgcgggctcactgtatcgttgtttatacccccccacaaatgtgaaaacccctcgcggctaccccaacattaatccgctttgcagattcattcccccgtttccctccactttggcaatcaaaacccgaagaaggccccgttacccgtatccgcccttttgccaacaagtttgtggttaatccttgctttggncccaacgcgcaaaccttggaaatgcgtntaatcattctcggccacacgattccgcagctacactttttgatcaaaatccagcgttctctctctgttatgccatacctaagcctcaaaccgcgggatcaactccccttctttcattccaatacaacctattaccgcaagctacgcgagtaatgcgtgctacgtccccaacgtttagatagccacccagcccctacctaattaacagtaactatcgccgactcacctcct

SEQ ID NO: 4415 - DNA, 2058 bp, Glycine max
  misc_feature (4)..(4): n is a, c, g, or t
  misc_feature (11)..(11): n is a, c, g, or t
  misc_feature (13)..(13): n is a, c, g, or t
  misc_feature (36)..(36): n is a, c, g, or t
  misc_feature (55)..(55): n is a, c, g, or t
  misc_feature (60)..(60): n is a, c, g, or t
  misc_feature (77)..(77): n is a, c, g, or t
  misc_feature (96)..(96): n is a, c, g, or t
  misc_feature (116)..(116): n is a, c, g, or t
  misc_feature (156)..(156): n is a, c, g, or t
  misc_feature (170)..(170): n is a, c, g, or t
  misc_feature (176)..(176): n is a, c, g, or t
  misc_feature (274)..(274): n is a, c, g, or t
  misc_feature (280)..(280): n is a, c, g, or t
  misc_feature (309)..(309): n is a, c, g, or t
  misc_feature (374)..(374): n is a, c, g, or t
  misc_feature (396)..(396): n is a, c, g, or t
  misc_feature (419)..(419): n is a, c, g, or t
  misc_feature (494)..(494): n is a, c, g, or t
  misc_feature (627)..(627): n is a, c, g, or t
  misc_feature (630)..(630): n is a, c, g, or t
  misc_feature (632)..(632): n is a, c, g, or t
  misc_feature (648)..(648): n is a, c, g, or t
  misc_feature (658)..(658): n is a, c, g, or t
  misc_feature (738)..(738): n is a, c, g, or t
  misc_feature (785)..(785): n is a, c, g, or t
  misc_feature (803)..(803): n is a, c, g, or t
  misc_feature (887)..(887): n is a, c, g, or t
  misc_feature (890)..(890): n is a, c, g, or t
  misc_feature (905)..(905): n is a, c, g, or t
  misc_feature (911)..(911): n is a, c, g, or t
  misc_feature (1032)..(1032): n is a, c, g, or t
  misc_feature (1058)..(1058): n is a, c, g, or t
  misc_feature (1061)..(1061): n is a, c, g, or t
  misc_feature (1130)..(1130): n is a, c, g, or t
  misc_feature (1159)..(1159): n is a, c, g, or t
  misc_feature (1177)..(1177): n is a, c, g, or t
  misc_feature (1186)..(1186): n is a, c, g, or t
  misc_feature (1193)..(1193): n is a, c, g, or t
  misc_feature (1197)..(1197): n is a, c, g, or t
  misc_feature (1205)..(1205): n is a, c, g, or t
  misc_feature (1241)..(1241): n is a, c, g, or t
  misc_feature (1310)..(1310): n is a, c, g, or t
  misc_feature (1330)..(1330): n is a, c, g, or t
  misc_feature (1335)..(1336): n is a, c, g, or t
  misc_feature (1350)..(1350): n is a, c, g, or t
  misc_feature (1352)..(1352): n is a, c, g, or t
  misc_feature (1359)..(1359): n is a, c, g, or t
  misc_feature (1372)..(1372): n is a, c, g, or t
  misc_feature (1376)..(1376): n is a, c, g, or t
  misc_feature (1380)..(1380): n is a, c, g, or t
  misc_feature (1396)..(1396): n is a, c, g, or t
  misc_feature (1430)..(1430): n is a, c, g, or t
  misc_feature (1432)..(1432): n is a, c, g, or t
  misc_feature (1530)..(1530): n is a, c, g, or t
  misc_feature (1642)..(1642): n is a, c, g, or t
  misc_feature (1666)..(1666): n is a, c, g, or t
  misc_feature (1720)..(1720): n is a, c, g, or t
  misc_feature (1725)..(1725): n is a, c, g, or t
  misc_feature (1730)..(1730): n is a, c, g, or t
  misc_feature (1741)..(1742): n is a, c, g, or t
  misc_feature (1759)..(1759): n is a, c, g, or t
  misc_feature (1800)..(1800): n is a, c, g, or t
  misc_feature (1807)..(1808): n is a, c, g, or t
  misc_feature (1816)..(1816): n is a, c, g, or t
  misc_feature (1823)..(1823): n is a, c, g, or t
  misc_feature (1848)..(1850): n is a, c, g, or t
  misc_feature (1852)..(1852): n is a, c, g, or t
  misc_feature (1874)..(1874): n is a, c, g, or t
  misc_feature (1885)..(1885): n is a, c, g, or t
  misc_feature (1904)..(1904): n is a, c, g, or t
  misc_feature (1907)..(1907): n is a, c, g, or t
  misc_feature (1913)..(1913): n is a, c, g, or t
  misc_feature (1920)..(1920): n is a, c, g, or t
  misc_feature (1927)..(1927): n is a, c, g, or t
  misc_feature (1930)..(1930): n is a, c, g, or t
  misc_feature (1932)..(1932): n is a, c, g, or t
  misc_feature (1935)..(1939): n is a, c, g, or t
  misc_feature (1942)..(1950): n is a, c, g, or t
  misc_feature (1952)..(1953): n is a, c, g, or t
  misc_feature (1977)..(1977): n is a, c, g, or t
  misc_feature (1979)..(1979): n is a, c, g, or t
  misc_feature (1985)..(1988): n is a, c, g, or t
  misc_feature (1997)..(1998): n is a, c, g, or t
  misc_feature (2008)..(2008): n is a, c, g, or t
  misc_feature (2010)..(2010): n is a, c, g, or t
  misc_feature (2017)..(2017): n is a, c, g, or t
  misc_feature (2021)..(2021): n is a, c, g, or t
  misc_feature (2028)..(2028): n is a, c, g, or t
  misc_feature (2036)..(2036): n is a, c, g, or t
  misc_feature (2038)..(2038): n is a, c, g, or t
  misc_feature (2047)..(2047): n is a, c, g, or t
  Probeset Number=SeqID_14194
gctntatgatnangacggtcgcattaactactatgngggtgtagtcctgtgagancagancccagtcggtcgatgtntgatgtgcagtgagttcgntcatgctccgtagcggcgcnatgagcgcgccgtcgtagttccgtgacgatgcggctggtncatcaagaaagtgncggagngttctactatcgtcactagcgcgtctgcaacgtcgatagcgtgagcagcgactacgagacgccagtcatagcgagagcagtactcgctactacatgantggagncatgcgtacgagcacaccgcagacgtagngacccgcacgaccggtagccgttggcggtattagtaggcagaatgtcagcattatcacacgtganggcgacagattaagtagctaantatgacacgcacacgtgtgcgtnacacgcacagattcgtatacgcgcactcagcagaacagcggtgagtcgcttcacattatagagatgtactatgancagctgtatcagttatcacgagcgtacatagcaagatacagagatgtagtcacatgagaggcagagttcagtcagatggagtagcgatgacgatttcgtctctgatcatatatgtgattagtacatagcgtgngangngattagaatcttcgcntgtacgtcgnactatctgcgcagcgtccgatgtaccgtatgagttagtcgatatgctatcgtagtacattcatgatcgacatctgaagtngttcacgacgatgctgacgcgatgatactatgtatacagagatcgcntagccctgagtacttcantgtatcatgcagtgagtcgttcacgcacgctcgtcatcgtcaacgtctctacctagcactcgtcattcgcgctacgatgtacgngcngcacacggacgcganccgccncccacggctccactctactcgagcacgctgtcgttctcagtacgcaacgacgcagcacgcacagtacgcgcgacgtgctcacacatagctctctacgcgttcatgcaacgcacgcgagtcncacagttggcacgatatcacgcggcnacngcgcgtccgcgcgtcgtggaggcgcgagctagcgagagcgcgcacacacatcgcactctactcgcgacnccctgcacttcatgcccgcacgccactcncacaccacctctacgctngacacgcangctcatnacgngtcgcgantcgcgagctgcgtagcggcacgcgcatgctgatgancagacgggcatcccagcacatgtccatttcctgctcgctgtctgccacgtgcgccggtcgacgttccantctcttccactcaccctcgntctcnnccccacgcgatcgntntagcatntcgaagcgtacangcgncgcntccgcactctcgcgcngcgagcgagcgcgtgctcatgttgtcagcccgtntncgtggtctgcaagatacagtaaacgacacgaatacacatattacagaacatattacatctatcacatatttataacatatcacatctacatacatganacaacatactactgtacgtagcagtgacggattactcatgtagcacgcacactataagcagtacacactcacccagcagtatagcaggcagctgcgactcacacagatatcncaatctcctatcaactgacatacntcacagcgaacacatacagtacgatcgagcgacatagcgccggagaacgcgcgnaaacnaggtngcatagtaganncaacacaagagacgatnactacgcgatgtgtcagtgtacgagcgtcagtattcccaantctaganntaacgcancccaaancactacagcacgacagaatgatcannngncacaggagcgagggagcctgtngacggcgccgntaaggagtgtcggattganttntgttgncgttcgnctcgctnctncntcnnnnngcnnnnnnnnngnntatatatatattattattgagagncnatatannnngtggggtgnnggagtaaganangaaaaangaanaagaaanaagaaganangtagagtantataagattta

SEQ ID NO: 4416 - DNA, 1742 bp, Glycine max
  misc_feature (1)..(1): n is a, c, g, or t
  misc_feature (14)..(14): n is a, c, g, or t
  misc_feature (17)..(17): n is a, c, g, or t
  misc_feature (22)..(25): n is a, c, g, or t
  misc_feature (33)..(33): n is a, c, g, or t
  misc_feature (35)..(36): n is a, c, g, or t
  misc_feature (40)..(41): n is a, c, g, or t
  misc_feature (56)..(56): n is a, c, g, or t
  misc_feature (70)..(70): n is a, c, g, or t
  misc_feature (130)..(130): n is a, c, g, or t
  misc_feature (168)..(168): n is a, c, g, or t
  misc_feature (185)..(185): n is a, c, g, or t
  misc_feature (208)..(208): n is a, c, g, or t
  misc_feature (317)..(317): n is a, c, g, or t
  misc_feature (346)..(346): n is a, c, g, or t
  misc_feature (366)..(366): n is a, c, g, or t
  misc_feature (467)..(467): n is a, c, g, or t
  misc_feature (563)..(563): n is a, c, g, or t
  misc_feature (723)..(723): n is a, c, g, or t
  misc_feature (918)..(918): n is a, c, g, or t
  misc_feature (943)..(943): n is a, c, g, or t
  misc_feature (1043)..(1043): n is a, c, g, or t
  misc_feature (1092)..(1092): n is a, c, g, or t
  misc_feature (1113)..(1113): n is a, c, g, or t
  misc_feature (1223)..(1223): n is a, c, g, or t
  misc_feature (1261)..(1261): n is a, c, g, or t
  misc_feature (1330)..(1330): n is a, c, g, or t
  misc_feature (1377)..(1377): n is a, c, g, or t
  misc_feature (1410)..(1410): n is a, c, g, or t
  misc_feature (1425)..(1425): n is a, c, g, or t
  misc_feature (1495)..(1495): n is a, c, g, or t
  misc_feature (1502)..(1502): n is a, c, g, or t
  misc_feature (1522)..(1522): n is a, c, g, or t
  misc_feature (1537)..(1537): n is a, c, g, or t
  misc_feature (1543)..(1543): n is a, c, g, or t
  misc_feature (1549)..(1549): n is a, c, g, or t
  misc_feature (1571)..(1571): n is a, c, g, or t
  misc_feature (1575)..(1576): n is a, c, g, or t
  misc_feature (1617)..(1617): n is a, c, g, or t
  misc_feature (1619)..(1619): n is a, c, g, or t
  misc_feature (1683)..(1683): n is a, c, g, or t
  misc_feature (1706)..(1706): n is a, c, g, or t
  misc_feature (1742)..(1742): n is a, c, g, or t
  Peptide Sequence Number=SeqID_7458
  Probeset Number=SeqID_14195
ntttgggtgggggntgngtagnnnnttttcttntnntttnntcagcacccatatangagataataaaatntatataatatactatagtatatcataatattaatatagattatcaccccaccccccccgngcgccgcgcgccccgcgccggcgccacccacctcacanttaactacaaatagcancacatagaattatgaccactagnagctcactctaacagtgtatttatgatattatgtatgttgaatagtgttggtgtgatcgtgagcaggggttgtgctagtatacattagctacattgatttgttcttctnctatatatgtcatactattacacaatatnatatatagtgacacataaangtactccaacaacacgacgtcgtagcatagagatgactaatacagatcatatcaatacataataatatataatatatacactgtccttgtacctcgcaganagcacataccaactatacactatcacttgtggctcacgtgtaatagtgtatggttaacctacgtcgaatatcagacaacactcttcctctatcatncatacttatctgggaacgcgacgtggtggtatatgataactgtacactcctacacgctatcactctctcataacactatatagacacgatcatatattagttcaccttatctacttagtctctcgaccattcataagcacaccacacacaacgctataantatatgaaagacagtcatactacatgtactccatatcatatacacacaacacactacttctcaccatcaaccccacacactctccccatcactcctagacatgtacttaccactgtcatacgtactcttgctacagtgactatcacccgactagctactaatctctctacatgtaacgccatgttggtgatattntaatgtatcatattgtgtgatcacntatacctattcatctctctcaccatacatctcacacactcactcatgacaacgatacgataattgtatagagatcacgtaagtgacgaatcttatctgtnaatgtgtatatctctcactcatatctatgtattgatatatacacacccncacacagcgcaccactgtatnagatgttgagtacacagatacatacgtgtgcttagatagatatacacaagcgtgactctcgatacctatcccaacaactagcagaatgtgatacccacatatatcatatngtgatgtgatgcactctactaccactctcactcacaanatccgctcgatcgtatatacgtgtgtcgaacgacgttaacgatcacgcgacacaggtacagttcaccanactcgtcctatcacggttatgaacacacagtatatacgtgcacactnatctatcatatcacgatgacatgactatgtganactactacttcgcantacgtcagtcaacacgataatcgtggtgacaaaagcgccgtgcacgatgactcgcagagagcactcgtancgactgnatgatgtactcgataccacntagatcaccgaatancttacnaatcantagacgacgacaatatacgacntatnnatatagtacatcatattgatataccatcaactactaatatntnagtcacgatagcaacctacaaacgcatctactgtcgtctatccctatagacgacatcacatgantaactaacgaataagcatatgcnacgtcatactaactgcactgactagccacgctccgn

SEQ ID NO: 4417 - DNA, 505 bp, Glycine max
  misc_feature (1)..(1): n is a, c, g, or t
  Peptide Sequence Number=SeqID_7468
  Probeset Number=SeqID_14196
nattcttttaaacaacaaacaaaaacaacaactatttctcttactactacaatgtatcaacaaccttcaagctatactaaccaagtccccaccactggtctcaccggcaacactaaccaattggctggtggcttcaacaacgccaacgttgaccccttgagaaacaacctcaacaatgctaaccaattgggtggcttcaacaatgctaacgttgatcccttgagaaacaacctccacaacgctaaccccatgactggtggcttcaacaatgctggtgttgatcctttgagaaacaactacaacaacactactaaccccatgactggtggtttcaacaatgctggtcaaatggctggtgacttcaaccaagctcctggtaccttcaatacctacagcaccaagcaaactattcttgacaagcttcccggaaagaacaagaacactatgggtttcggaactgtcaccttcagacccattgaagccagacttaaccacgatactgatc

SEQ ID NO: 4418 - DNA, 1363 bp, Glycine max
  misc_feature (22)..(22): n is a, c, g, or t
  misc_feature (64)..(64): n is a, c, g, or t
  misc_feature (68)..(68): n is a, c, g, or t
  misc_feature (77)..(77): n is a, c, g, or t
  misc_feature (96)..(96): n is a, c, g, or t
  misc_feature (191)..(191): n is a, c, g, or t
  misc_feature (748)..(748): n is a, c, g, or t
  misc_feature (777)..(777): n is a, c, g, or t
  misc_feature (806)..(806): n is a, c, g, or t
  misc_feature (1108)..(1108): n is a, c, g, or t
  misc_feature (1339)..(1339): n is a, c, g, or t
  Peptide Sequence Number=SeqID_7469
  Probeset Number=SeqID_14197
cgtgcgcagtcgacgtgatgtncgcgcgcggtgcagcaggactcatagtggctgtgtctatatnaganctgtagtcntcgtctgcgtatctgctgntggagctaacaggtacgtgcgagatcccgccagcatgcacgcgcagaggagaggatgtgtgagcggatgatgcgagacgcccgtcggagagcggnataagtccgcagcatacatcttgctaatactcaatactcatatatgtcttagtgagtaagagaggtgaggtgcggcatcgcctgtacggtcagagcacatatatggaagtcaccggcgtgtgtagtatatagagatagtgtagatagctccgatcgaacgcagatatggagaagagaggagtctacagacgtgaggctactctactgtgtcgctcattctatattagccgcacctgtggacttatagagagatgtcacgcgacagtgcagcgacgccagtctactcagcgcagcacggtttagaccagagggggggtgcggggtgttttactctcttctcttcttcatgatgtacccaccatgatgctgttgctatgcgcaattttctcctagcgggaagggtggggtttattataaatgctgaatattagatgtaaatatctaatgcagtccaatgtcgtgacggaacatatttgacgtgagtgtctccatgtgcgagcgtcatattgacgaacaccccatcttcacaagagagtctcacagggaggaccttgcgncgccatgtaagagaggggaggagtgccanatggatcttcatgcgatccctatacctangtgaagtttcaattcactgtgcgttaatgaacagttggagatttcttctcgtggttgcgaaccagttcataaatggacgaggccagtgcgaggtttctattcccctgtgtggacaaaacgcctccatgttgaccaagtggtgcggctattgcgaatcctctttgtctgttgaagataaggagacagcaggcgcgcttactgttccttacccctctggatggccgcagagaataagtctcccctagaccgttagggcgtggatagcacgtagatgcgcagggaacacaacaaagcactcccgnagcggagttatggatgcccttggactggcgagcatagggatgacgtcgtgtgagaaggactatgagccccgtgatatctagagttacactagcatgcggtcctgggggcggggcgccatcgttcatacgtgttatagagtgtgagcgtgactgtttttcacatcacattcttcttggtggcgggaggaagagtagggtcgcgccctggtcgcgagagaatgtgaaagaagnaaaagaagctatgtttatatatta

SEQ ID NO: 4419 - DNA, 714 bp, Glycine max
  misc_feature (692)..(692): n is a, c, g, or t
  misc_feature (707)..(707): n is a, c, g, or t
  misc_feature (714)..(714): n is a, c, g, or t
  Probeset Number=SeqID_14198
gcactgcatgctctcttcaaaaaaggttcccaaacctttttggactgaagctgtaaactggacgttctactttttgaatcgatgtccaacacttgctgtgaagaacgtcactcctcaagaagcttggagtggagttaagccttcagtagaacaccttcaagtttggggctgtgtagcacacgtgcacataccagaggcaaaacgaggtaaacttgatgataagagctttccttgtattttgttgggtatgagtgaagagagtggaacaaagaggagaaacaaagaagttgtccaagagggaaagtagaggcagagaaagcaagaccaatggaagaaacaaaactggaagctaaaggaagagaaaaagctgaaaccaaagagggtggtggtgaggaaaaaggaatgagaagagaagaaataggagaagaaaataaacaatccagcctggaagagatttttaagtacagagctgaagctcaacagaaagttaaggagagaaacgagagagcaaaacaagcagcaggtggtaggggtgagagaaacaagcaggcaaatgagaagaaggattcagtgctgaaagcagaactcgagagaagaacaagagaggtagagggaagagagtggaacaaagaggagaaacaaagaattgtccaagagggaaagtagaggcagagaaagccaagaccatggangaaccaaactggagnctaaagn

SEQ ID NO: 4420 - DNA, 957 bp, Glycine max
  Peptide Sequence Number=SeqID_7470
  Probeset Number=SeqID_14199
gcgtttcaagcaactcttcaagtttgttctcaccaggaacaactttggctgaagtgaataacatgtttgggacatcgtcgtcgtcacagggacagtggctgaattaccgataccccccagaagcaatatcatttacacatgccaatgtttctatggctcatgggctgaagctagagcaagaagaaaacaaaggaaacttgtcgcatagcgtgagctctttgtacccaagtcacatggaatctgcaaggatattgagtgataataataattcggccttcgacaactccaactttggcttgttggacccgaacaacatctcaagcacgtccagcaacaacaaccgccacaacaataacgtggttgaaattctgaaattttggcctgttggaccacagcatgtcaagcacttccaccacatacagaattccctacaacaataacgtggttgaaattcagaaattgttcaagcaaggaaaccaggctgttgagaacttcaaccacatggtgaattcccaagcaagcaccaacaatattattggagatcaagggttttcattgagtagcatgaataagggcttggagcacatggtgatgccgcggattgaagagtgggaaagtggagaaccaaaaagaatggagaatcaacaggtactacaatcaagtacttcaaacgctactgaagagcacttaaccaaagatttcatgggtgttggagcagtgatgaacctgcaaagccagttccatggacattactgatcatggagatagcgagctaggttcaaaaagtaattaatgaagttaaggttaaggtagtgaagttttaggatacagtgagaaagtgtagaatcatactctttaattaatatattcttttgatcaaatctatttttattattgaaaatttattaaaattataaaatttaataaatcttacctaatattgaatgattatctctt

SEQ ID NO: 4421 - DNA, 463 bp, Glycine max
  misc_feature (20)..(20): n is a, c, g, or t
  misc_feature (68)..(68): n is a, c, g, or t
  misc_feature (128)..(128): n is a, c, g, or t
  misc_feature (215)..(215): n is a, c, g, or t
  misc_feature (244)..(244): n is a, c, g, or t
  misc_feature (287)..(287): n is a, c, g, or t
  misc_feature (322)..(322): n is a, c, g, or t
  misc_feature (339)..(339): n is a, c, g, or t
  misc_feature (363)..(363): n is a, c, g, or t
  misc_feature (386)..(387): n is a, c, g, or t
  misc_feature (393)..(393): n is a, c, g, or t
  misc_feature (408)..(409): n is a, c, g, or t
  misc_feature (413)..(413): n is a, c, g, or t
  misc_feature (424)..(424): n is a, c, g, or t
  misc_feature (436)..(436): n is a, c, g, or t
  misc_feature (450)..(450): n is a, c, g, or t
  Probeset Number=SeqID_14200
ttttttttttttttttttgnctaaacctaatacctttagggtttgtgtttcaagtttctaacatgtanaaatcaagacgtattgagcgagcatacaaaatatatttatagaggaatcaaacttatgcnagggccttggcgatcttgtcttggactctcttctttctttcttccaaagtgaatcttctgtttctgaggtacttcttgccaccagcngtttggacgatggtctttctcttatcggngtacttaacttcagccttcttgccttccttcttggcgggggcnacggggttctttctgatttcttcgtgaaccttggngtaaagcttttccaaanaggtttggttggccttcttgaggntggcttcccacttggagaattgnntgttgnaggcttccttatcgnntttnttcaaagcagncatgtacttttnaacgtggagaccanagattctttctct

SEQ ID NO: 4422 - DNA, 200 bp, Glycine max
  Peptide Sequence Number=SeqID_7471
  Probeset Number=SeqID_14201
tgaagccactgccccaggcattgcatcaatgctgtgcgcccatggcacagaggttgaatcgagaatccgccccatgggttatgttgcttatggcctgccggctacatgttcctcaggtgttgctcttacaaaaattatagtcgcaaccactctacagtctcgtgttctgacatggaattagcccacaccccttatgaccg

SEQ ID NO: 4423 - DNA, 459 bp, Glycine max
  Peptide Sequence Number=SeqID_7472
  Probeset Number=SeqID_14202
gaagcttgagagagagagagagagaattgaaacgtcgggagcaatggcgagcaccaaagttcaaaggattatgactcaacctatcaacttgatttttaggtttcttcaaagcaaagctaggatccagatttggctttttgagcagaaagatttgaggattgaaggaagaatcactgggtttgacgaatacatgaacctagtgttggatgaagctgaagaagtgagcatcaagaagaacaccagaaaacaacttggaaggattcttcttaaaggagacaacataacgctgatgatgaacacgggaaagtgatagacttttctctcaagaaaaactctcaaggattagtacatgggcttttcgattatatccaaagcttttgctaagtacatgttgagttgagctcctcttcttcttcagttaactgacaatgccttcttctcttcgttatcgtgtaatat

SEQ ID NO: 4424 - DNA, 461 bp, Glycine max
  Peptide Sequence Number=SeqID_7473
  Probeset Number=SeqID_14203
acaccacccacaacatacagctagaacgaacgcccgagcgagcaatcagccaccaagaatcgatcggagaaacagaagagacgtgagcttttgagcaagtagaggagagcagcgatggcgttggtgcctgggtgcgtgcagtgcgggacgcggagcaacccgtgccggtgcaaggtcgtcgggccgacgctggggttcgtggcgttcgtggtgaccggcgtcatcgagtggccgctgggcgcggcggtgtacctgttccgccaccgcaagggccgccgcatcatgggccaccccgccagggtcgtctacccgcgcgtctccagggccatccccatctaatcctgttctggtctggtctgatctgatcccctcctggctgtgtgtacgatgtaataatgcgacctggtccgtcagcttgtgttgttgattgattatttcaaatcaaatcaaatcaaataagt

SEQ ID NO: 4425 - DNA, 1348 bp, Glycine max
  misc_feature (561)..(562): n is a, c, g, or t
  misc_feature (1324)..(1324): n is a, c, g, or t
  misc_feature (1327)..(1327): n is a, c, g, or t
  misc_feature (1330)..(1330): n is a, c, g, or t
  misc_feature (1335)..(1335): n is a, c, g, or t
  Peptide Sequence Number=SeqID_7474
  Probeset Number=SeqID_14204
cgccattcttcatcgcatcgacatactcatcattggtctcacagtttctcatcttgtaccgacatgacagccgagataataatcatatagcagcgcgttgcgccagagggccgctagcggcacacccgctgacctgctcagcgtcacagctgtgcctgtgcgcgtgcccacctcgcactcacgtttgccacgcatcagtgctgccacgcacttttcatcagccttatgcagtgatgcatcacagtgtcacgcactcccatcgcacgtcagctgcagtctgtatatcattatatatacaggcgtaatgcgaccagcgtcgtgccacgacgcgcgcgcttgttcccgtccgcggccgcacgccctctcgcgttggacagtcgtctgccgagatccgccgacttcttctgtgtaggtgtgtggcgcgactctctgcgtgcgcgttcctcgcactgtcccttatatatatactcagtctcgatggcttattattcgcctcaatatatctccgctgtggtgggtggggtagtggagcgctccgccccacacaaatatgctgcgcgnnttgtcggtatggttgtctccccctattaatataatcatacctacaacattttagaacagaggtgcagctctatcagtcgtgcggcgtgtctcctcatctactgtggtggagagtttcggtgttcgcccactctccttatttttgtcttgatacctatcgtttttcgtcgtttccatcctaccttaccacttataactatatacctaaatataaattttaatgctggcgtctaggtgctccagtcattgccacccctcctcctatctcctacccgtctccctatactgggtggatacacttaatacctaacatatgctcgcagaatatacaaatattattaatctatttataaacacatataagatcataacaggatatactatatatgcgcgtactgtgcagcgccctggcaagacagtactatcagttgggcggtgactattttgcgcgcagagagatatctaaatcggcattccgggatacacattattgcttcttcctattcagatgtgatgtgaacccaacataccggaggtgagagcacagaggggtggtaagattcccgtgttttatgtgtgggttggaggagggggggggggtcatttttctggcatcaacatttctgcttttcctcggctggttgtttcttctcacgcaataaatataacacctcgatcccaccctcggctctagcccgcagttgtatgttgtagaattttcttgggtgggtgtaggctgtttccacagtcaacttacactacncanccnccaancccccccaacccc

SEQ ID NO: 4426 - DNA, 1374 bp, Glycine max
  misc_feature (335)..(335): n is a, c, g, or t
  misc_feature (898)..(898): n is a, c, g, or t
  misc_feature (1273)..(1279): n is a, c, g, or t
  misc_feature (1283)..(1283): n is a, c, g, or t
  misc_feature (1301)..(1301): n is a, c, g, or t
  misc_feature (1365)..(1365): n is a, c, g, or t
  Probeset Number=SeqID_14205
tacaacacatataaatacactactagcacgtagtcatcgatagaatctccaatcaactatcactgtgtctccgcagcagaatagcaaatttgttcagacacagcgaaaatatgtgacaatatatgcatagagtagagtgataaggatgtgatctatatagtagtaatgtgtctgcggattgtctcctcactactctattaacaactactatatttattcatatttctcttacctgtcattcagtcttatcaatggtcctatagtgctcgtacagcatatcataaacacgaatctaaaacaggtcatcgctcggtcacgacgagccacgctctccnaccgcacactatactcctcatcgatgtgtgtgtcggggcatggatggactctccaccatctaaattatcggtccaccacatatagtatctatggtgactccggctgagtaacataagattcaactgcacagatcatcgttcctgcttcctgacgttagatagtataacgttacacagacacatagtgagaggggctttttgtctctctataagtctcatcactccaccaccctgataaacacatcacccatacggtagatagatgtactgcatctctgagcacgctgaaacatgttctctgggtgacacaatcagcggatgacgaatcaccattagtcaccctcttccagcgactacctcaacacaaattcttgcaccattggagctaggaccagtctttgtttggtgtgtataatttaggtgtagtcttagttgatggttaggagcgattgtgataagttatacaagacgagagcaaaggaagggagaagacgactcatctcaaaagacgtacacacaacaaacataaacaaccaagagagaacaacaagcgtggaggtagnttctgtttttgataatatagtacgagttgactgtacattccacaaacatacaagcacttccttcctcttcgatactatacttactgttgcgtgaacagcgcctggttctctgttttgtgttttcttttgttatgttcgtggtgttatagattttttattagtgttaatttcccctatcagctcccctattcctaatcaatactaccctactataagatttccgttccagcgtctaggagggcggcctctctttctccatctccaccctcactcccccccccccaactgatattattccacatataatagatgggatacagcataccaatcataacgtgtaagagctcgttttaaagggtgggggggggggggggnnnnnnntttntgggattcatcaacaaantagcatcttccattattagtttttagattcaatcttgatacagctaataactacaaataaaaanataaaaatt

SEQ ID NO: 4427 - DNA, 496 bp, Glycine max
  misc_feature (60)..(60): n is a, c, g, or t
  Peptide Sequence Number=SeqID_7475
  Probeset Number=SeqID_14206
taataacacgcaattttcatttttctctctcccttagtcaaagggattcatcgttcttcntcccaggttatttagaaaagcaaaatgtgaagatttgctgcattggtgctggatatgtgggggggcctactatgccagtcattgcacttagtgcccatccatttgagtcgctgttggtgaatctctaatcccggatttgcagctgaaaaagggacaagtttctattcattgaactgggcttgaatgggtttgaaacaaatgcggggaaaaactctttcttcaaactggtgtgaaaaacagggcttgaggggggaataaggtttggtcctggaaaaccccaacccaaaattaggggttgggggttggaaaaacacaattttgacatttggggaaaggggcccccccgaattgttggtgggccccaaaattgcaaaaaaagtggggggggaaaaacaaccagccccctggaaaaaggggtgagaaaacaaaaaaaaaa

SEQ ID NO: 4428 - DNA, 262 bp, Glycine max
  Peptide Sequence Number=SeqID_7476
  Probeset Number=SeqID_14207
ttttttttttttttttcggacattgccataaaggctaagcaccatttaaatgataatgagcaccgaaccattcacaagaacttggacattgtttccaacatcaagagcactagctcaacaaacactgacagagatctgccttttcttaagccactaataattctacgatccgaatccccctcccctgatcactcgaatcgccaatcatctaaaggcctaacccgtgccgtggcaataagattcaattattcgggaggggaag

SEQ ID NO: 4429 - DNA, 1347 bp, Glycine max
  misc_feature (753)..(753): n is a, c, g, or t
  misc_feature (1105)..(1105): n is a, c, g, or t
  Peptide Sequence Number=SeqID_7477
  Probeset Number=SeqID_14208
ttgggtggggttagtcctcgaagcagcagaatccaacccccatacagttcacactacaatataccaactgaatataacgatcgcagccggcgagaggcgcggcggcgccccctctaatataaaatatacactcattacccagacgcccctcccctgacgccgcggatattgggcgctcgatataagtgaacgcccatcaccataacctatcaccttctctatagctatctccatttttattactactcgcctccccgcgggctagcgtgtcgcaaatgctgtagtgccacatgtagtgatcgttctactctgtggtaccttcagatgcataacaggccacgccacagcgttgattggtataagattgccgccacgggatatcgatgtgcgctgtattccctctcgcccgcgcgctcgccgcctttatgttttgtattatgtctaatgcggctcaccacgcgctgaatgcgacccacttcgccttattacgccttatagtgtatgatctacgcagacgcggctcgcacgcacgccgcgctagagagtattagctgtagatataagggcgtcgctacgcctatttgattgcggcgcgggactctagtaactcacgcggagtaccactcacgcgccgctgaggctgtattatgacgagttgcaagccgcgtgattcgatcctgcgcctccagtccggcggtaccctctgcgctctcttcagagccctgattatgttatgtcgtggggagcgggcgnctcgattatgactcagcgaaccgcgttcagcctgcatatacatgcgggtatcttctacatatggcgtcgcaccgatcgtaccgatgagcattggctcaatgtgaataatgcacacctgatactgtggtgtgatctctctctcacgtcgtacgactccgcgccgccgatgtagtgaatatattatcgacttcatcgcggagggagtagttatatagtcgagtcgcgcctctccttgcctcacttctgcgtcgcacgggagcgccggaaacgcgacgctgctctgccctgcctttcttgttgtgctccaccagacgggcgatgtcgacacgactattcgttgtgtagagcgctnatcgtactgacatgctgcttattctacgcgccgcaacatagggccggcccgcagaagtattaacgtccgcgcgctctatatctactaactaatatattgtatgaatcatatcaggggagcaacgcctgctgtctgcgtgtctctctgtagtatgaaaagaaggagatatagtatcgtgtgttatatatcagcgcgcgcgtggtacatcgtacctgagcgccgcgccatcgccgcctcgcaag

SEQ ID NO: 4430 - DNA, 1428 bp, Glycine max
  misc_feature (1)..(34): n is a, c, g, or t
  misc_feature (1319)..(1428): n is a, c, g, or t
  Probeset Number=SeqID_14209
nnnnnnnnnnnnnnnnnnnnnnnnnnnnnnnnnngagagaaccataaccaaagccagagccaccttcctgaaacccaattcctcaatagtttctcacccttctcttcatctactctttccaaaaattttcccctctctatttgaatggatgcataaagtctggtggcctctgatccccttttgatatcaaataacagaagagaatgaaactatcatttgttgttttgattacgtaacaaaagaagattagtggaaaatgggaggttgcttttgttctgccaggaaacgactcatctgcatggggcaccagtatattactattgcccaccaacttttgaagagcgtgagtctttaacatctaataatggcatgaatgtttcactcattactggatttctggtaggtttgaacctggaagcttccatgcctgatactttccagaaacttccagaccggatacatcctgtccccctcctgtgcctctaccttattgatatggttgccgggaggttgcatcagtttagactcgaatgaggcagagaaacatttgtgggagccgttctgaacctttacttaatgataaggtccttgaagactctgactgacagattctgaatctggcagagaaacagttagtagttttgaaacttcaattacacttgaagatgttgaagaatcagattgtaaagctcaagccaattctgctcctacatcttcaaagaaggcacaactatcaaaatcaaatgtaactcaagaattagtgacagaagaagacgatgtctgatctatatgtgattaggatataatatttgtcaacacatagaactatttcagttggttaataaaataagatcttgctaaatgcgtgaaagataaatgaaagactaaactgattaactgcatggtatcaagagatgatacataatcccatctatcaattggtttgaagcttgtaaaagctcgtgttttaatggacccattcattgtgtgtactatatgtagagaagaagaatgagagggttttgacagaatgctacaccacattacatgtctctgagtgcaatttctcatgtcagaactcacctattatcaaagtgaaagagtgaagcttttctcaagaagaaactcatgttcccagaatggcttcccctccttccccacccccatgtcgctttgctgctctctctccattttcttgtacaaatttctcaatatttatttgtttttctatgttattttctgagaggaaaaaaaaatgcatactggtcttgtaaatcaagtctgctttacatattgccacattttaaatatatttatcnnnnnnnnnnnnnnnnnnnnnnnnnnnnnnnnnnnnnnnnnnnnnnnnnnnnnnnnnnnnnnnnnnnnnnnnnnnnnnnnnnnnnnnnnnnnnnnnnnnnnnnnnnnnnn

SEQ ID NO: 4431 - DNA, 528 bp, Glycine max
  Peptide Sequence Number=SeqID_7478
  Probeset Number=SeqID_14210
acatatctgctcaagccgtccaaaatgtcgaagcgaggacgtggaggtacgtctggtaacaagttcaggatgtcgcttggtctccccgtggcggcgaccgtgaactgcgccgacaacactggcgccaagaacctctacatcatttccgtgaaaggaatcaagggtcgtctcaacagattaccttctgcttgcgtcggagacatggtgatggctacggtgaagaaagggaagcctgatctaaggaaaaaggttatgccagctgtcatcgttaggcagaggaagccctggcgccgaaaggatggtgttttcatgtacttcgaagataatgctggagtcattgtgaaccccaagggagaaatgaaaggttctgcgatcactggtcccattggtaaagagtgtgctgatctttggccaaggattgcaagtgctgccaatgccattgtctgaagacaagattaatcaatcacttgcgtttgattatctttcaatacaaatttgagaatttttggtagatgttttttttataaa

SEQ ID NO: 4432 - DNA, 2065 bp, Glycine max
  misc_feature (1)..(1): n is a, c, g, or t
  misc_feature (11)..(11): n is a, c, g, or t
  misc_feature (27)..(27): n is a, c, g, or t
  misc_feature (29)..(29): n is a, c, g, or t
  misc_feature (49)..(49): n is a, c, g, or t
  misc_feature (82)..(82): n is a, c, g, or t
  misc_feature (105)..(105): n is a, c, g, or t
  misc_feature (111)..(111): n is a, c, g, or t
  misc_feature (142)..(142): n is a, c, g, or t
  misc_feature (198)..(198): n is a, c, g, or t
  misc_feature (221)..(221): n is a, c, g, or t
  misc_feature (245)..(245): n is a, c, g, or t
  misc_feature (262)..(262): n is a, c, g, or t
  misc_feature (270)..(270): n is a, c, g, or t
  misc_feature (275)..(275): n is a, c, g, or t
  misc_feature (278)..(278): n is a, c, g, or t
  misc_feature (301)..(301): n is a, c, g, or t
  misc_feature (312)..(312): n is a, c, g, or t
  misc_feature (319)..(319): n is a, c, g, or t
  misc_feature (333)..(333): n is a, c, g, or t
  misc_feature (360)..(360): n is a, c, g, or t
  misc_feature (362)..(362): n is a, c, g, or t
  misc_feature (365)..(365): n is a, c, g, or t
  misc_feature (369)..(369): n is a, c, g, or t
  misc_feature (371)..(371): n is a, c, g, or t
  misc_feature (421)..(421): n is a, c, g, or t
  misc_feature (454)..(454): n is a, c, g, or t
  misc_feature (467)..(467): n is a, c, g, or t
  misc_feature (471)..(471): n is a, c, g, or t
  misc_feature (549)..(549): n is a, c, g, or t
  misc_feature (568)..(568): n is a, c, g, or t
  misc_feature (601)..(601): n is a, c, g, or t
  misc_feature (714)..(714): n is a, c, g, or t
  misc_feature (718)..(718): n is a, c, g, or t
  misc_feature (730)..(730): n is a, c, g, or t
  misc_feature (781)..(781): n is a, c, g, or t
  misc_feature (807)..(807): n is a, c, g, or t
  misc_feature (809)..(809): n is a, c, g, or t
  misc_feature (813)..(813): n is a, c, g, or t
  misc_feature (815)..(815): n is a, c, g, or t
  misc_feature (917)..(917): n is a, c, g, or t
  misc_feature (946)..(946): n is a, c, g, or t
  misc_feature (959)..(959): n is a, c, g, or t
  misc_feature (1016)..(1016): n is a, c, g, or t
  misc_feature (1047)..(1047): n is a, c, g, or t
  misc_feature (1071)..(1071): n is a, c, g, or t
  misc_feature (1095)..(1095): n is a, c, g, or t
  misc_feature (1193)..(1193): n is a, c, g, or t
  misc_feature (1200)..(1200): n is a, c, g, or t
  misc_feature (1212)..(1212): n is a, c, g, or t
  misc_feature (1300)..(1300): n is a, c, g, or t
  misc_feature (1409)..(1409): n is a, c, g, or t
  misc_feature (1551)..(1551): n is a, c, g, or t
  misc_feature (1588)..(1588): n is a, c, g, or t
  misc_feature (1864)..(1864): n is a, c, g, or t
  misc_feature (1872)..(1872): n is a, c, g, or t
  misc_feature (1874)..(1874): n is a, c, g, or t
  misc_feature (1914)..(1914): n is a, c, g, or t
  misc_feature (1928)..(1928): n is a, c, g, or t
  misc_feature (1935)..(1935): n is a, c, g, or t
  misc_feature (1965)..(1965): n is a, c, g, or t
  misc_feature (1971)..(1971): n is a, c, g, or t
  misc_feature (1973)..(1973): n is a, c, g, or t
  misc_feature (1996)..(1996): n is a, c, g, or t
  misc_feature (2002)..(2002): n is a, c, g, or t
  misc_feature (2016)..(2016): n is a, c, g, or t
  misc_feature (2025)..(2025): n is a, c, g, or t
  misc_feature (2033)..(2034): n is a, c, g, or t
  misc_feature (2038)..(2038): n is a, c, g, or t
  misc_feature (2046)..(2046): n is a, c, g, or t
  Peptide Sequence Number=SeqID_7479
  Probeset Number=SeqID_14211
nttacatgtgnaagtcgctgttggatnangttcagtacgtctgtatcantatctacgtcatacttgtccgcaatttgtagangctgctcttgatgctgactatcngtagtncgccatcgtgtctgcgacgtgatgagtaagnatgagacgtcagactgtcgtacgtctactgctcgtagagtagttctgtccaatagncgtactgatgtcgtcggacgacnactctgctacctacaatcaccgantagtaattagcaacatntaacgacnagtgngtngtagatgttagtcgcatcacatngtagtcatgancgacagngcggcagtattcgnagtagacgcgcatctgaaacagcagangnacnacanantgcctcgtggacagcacgccactagtgcacgtgctcacacatctgtgtangatcgcgatatcagatacacataggaacagacnatcacgtcgagancagntagcgcatagatgcagtcccaactactcatgttgacatatattgagtggactacagcagcgtacgtgagagtaggatntatcgatgctagcacgggncgacgtcgcatctgtctgtcgcgcatctacttncatacatcgcatcgaccactcgtcgtgcatgcgaagcgtagtgaacgctcgatcatagagtgagatcatctctgtcagtatagtctgctaccaccgtacgtgcagcgttgcangtgncgacgcgcactntcactccgtctgcttctcacgctagcagagtcgcagatgtacgcatcagcncgtacgtcgtgtgctggtgcatgtgngnatcngncgaatacgtgagcgatatgatatcagtgagtatctacagctgatgatatagtgagtgtgtaatatgatatgtcaggtgcatccgtactctacgagagcgaanctatctcctactcactatagtgtgtagangcgcgtgatagcnggtgctgtataggcggagtaacatgtataatcgagtgcgagtatcagtccagcacancagagatactgacagtgcgagtcggggttanttacatagtagctcgtaccaactnttcggatataacatatctcaatgnatatcgccgcacatcaggagtcattgcgacgctagtgtgtagagtatatagtatatcatgctgtatcgaacacgtagacgaagatatcagcgcgcgtnagtaaanttgcggtcctantaccacgtctcatgcttatatgatattcttagtgtacggattggtagatatatgtatcgtcttagagcattattctatgcagagctgncacgatcgctgtgtcgtctcgtcttcatcatagtcagctgtaatctatatgtgcattatgcgtgcgtgtgtagcgtctcggcgcgacacggtagtgtatcatcatcttnactctctcatctctcactctctctctcacattctactccctacattactgctcgtcataccgtagcgatctctctactacgtttaactctctaccgcgtgttctcgcacgcacgtggtgagcacgcgttcgcaagacggtantaggcgtgacacaaatacatcagatcatagtcagagnaagaagacaggaagacgacaaaatggcagaaagtagaagagatatgagatgatggaatgaaatcctggctatgtacactgttctctgtgtcacatacactcagtagaaacatcgctgaggagacgccgcggtacgtacacatcacctgtcgtgctttatagtgtcgacactagagttatactcactatagcgtgtcagagagaatatcataaatcatgaagaacatatatcacacaacacaccactcagacgctagagcgtcctcagggagattangtagtgangngtatgtcctagttgccactgtaacatcctttgtatagtgngtgtgaaacatcanctcatanccacaacgtgcacacctcacgacaccgtcnccgtancncaacctaccgaacgcacaccacncgacanagcagcaaatactnacacaaccnacagtaanncaancgtcatgnatacgccatccgcgcccac

SEQ ID NO: 4433 - DNA, 604 bp, Glycine max
  Probeset Number=SeqID_14212
ggtaatacgaaaaaaaatttttataactgagttttatacccaaaatgtttcaggatcctattgttggccttcccagctctcgagttcatattgattctaaaaaatcagttgtcagagttgagggtcacagaggagcaggttaccttgagcctgaaaactccataaaggcattcaagaaagctattgaacttggtcttgattgtgttgaatttgatgtctggctcactaaagatgatgtccccgttgtcttacatggatatcccggaggcattatggagtttgctaatggtgtcagagaagcaatcagtcaaattcattccgatgatatgagaaaattcacactttataatggagaaacagtaccaacattggctgaagtcatggacacttgcaaagacagaatatgcttgaatattgagatcaaagaagtcagagaagaagtaatggaaaaagtcttggatttaattcaagaaagaaacatgtttgatcaagtcactttcagctcattcaaccattatctccgagaaaagcttcttagagagatgaaagcaagaaatcttgkgaacagacttacctttggatttttgatgaraatcgttgaccc

SEQ ID NO: 4434 - DNA, 612 bp, Glycine max
  misc_feature (441)..(441): n is a, c, g, or t
  misc_feature (553)..(553): n is a, c, g, or t
  misc_feature (578)..(578): n is a, c, g, or t
  misc_feature (592)..(592): n is a, c, g, or t
  misc_feature (612)..(612): n is a, c, g, or t
  Peptide Sequence Number=SeqID_7480
  Probeset Number=SeqID_14213
tcagctacgtaggccccccccccccccccatatcttaatggggagacagctactgctgccagtattgacaaatctgcgcctctggagattccaactcaagttaagcgaacagcggaaacagagagtgttgaaaccatggcaaagaagccacggttagaagaacttcaagtacagcgggtgaaagagcagcttgctgctcgtttggatgctcccaaggaagcatcagtcaccattgataacatcaaatccttgtctgaggctatgtcagtggaaaaaattgcagcaattaaagcaaagcgccttgcaaaaaaacgaacaactatcaagggcactgatgaacctggcttgggttccgatcttagaggtatgcttgattttgatgtagatgtaaccaaagatattttgtcaagagaaagacagtggagaaccagaacaacaatnttacagagcactggcaagatttttgcaaagaacattttagcaatcctgtcatctatcaaagctcgtgaggagggcagaaacagaccaccacagcctacacctgccataactnctagagcaacacctatgcgaactgngccacaacctgctntgtacaatcgttacgatcan

SEQ ID NO: 4435 - DNA, 1797 bp, Glycine max
  misc_feature (1)..(16): n is a, c, g, or t
  misc_feature (38)..(38): n is a, c, g, or t
  misc_feature (41)..(42): n is a, c, g, or t
  misc_feature (47)..(47): n is a, c, g, or t
  misc_feature (53)..(55): n is a, c, g, or t
  misc_feature (59)..(59): n is a, c, g, or t
  misc_feature (61)..(61): n is a, c, g, or t
  misc_feature (75)..(75): n is a, c, g, or t
  misc_feature (82)..(82): n is a, c, g, or t
  misc_feature (791)..(791): n is a, c, g, or t
  misc_feature (794)..(794): n is a, c, g, or t
  misc_feature (818)..(818): n is a, c, g, or t
  misc_feature (854)..(854): n is a, c, g, or t
  misc_feature (887)..(887): n is a, c, g, or t
  misc_feature (906)..(906): n is a, c, g, or t
  misc_feature (1004)..(1004): n is a, c, g, or t
  misc_feature (1027)..(1027): n is a, c, g, or t
  misc_feature (1066)..(1066): n is a, c, g, or t
  misc_feature (1095)..(1095): n is a, c, g, or t
  misc_feature (1099)..(1099): n is a, c, g, or t
  misc_feature (1114)..(1114): n is a, c, g, or t
  misc_feature (1120)..(1120): n is a, c, g, or t
  misc_feature (1164)..(1164): n is a, c, g, or t
  misc_feature (1226)..(1226): n is a, c, g, or t
  misc_feature (1265)..(1265): n is a, c, g, or t
  misc_feature (1267)..(1267): n is a, c, g, or t
  misc_feature (1295)..(1295): n is a, c, g, or t
  misc_feature (1302)..(1302): n is a, c, g, or t
  misc_feature (1316)..(1316): n is a, c, g, or t
  misc_feature (1339)..(1339): n is a, c, g, or t
  misc_feature (1346)..(1346): n is a, c, g, or t
  misc_feature (1355)..(1355): n is a, c, g, or t
  misc_feature (1368)..(1368): n is a, c, g, or t
  misc_feature (1387)..(1387): n is a, c, g, or t
  misc_feature (1406)..(1406): n is a, c, g, or t
  misc_feature (1411)..(1411): n is a, c, g, or t
  misc_feature (1414)..(1414): n is a, c, g, or t
  misc_feature (1428)..(1428): n is a, c, g, or t
  misc_feature (1443)..(1443): n is a, c, g, or t
  misc_feature (1455)..(1456): n is a, c, g, or t
  misc_feature (1478)..(1478): n is a, c, g, or t
  misc_feature (1491)..(1492): n is a, c, g, or t
  misc_feature (1494)..(1494): n is a, c, g, or t
  misc_feature (1499)..(1499): n is a, c, g, or t
  misc_feature (1504)..(1504): n is a, c, g, or t
  misc_feature (1523)..(1523): n is a, c, g, or t
  misc_feature (1528)..(1528): n is a, c, g, or t
  misc_feature (1542)..(1542): n is a, c, g, or t
  misc_feature (1554)..(1554): n is a, c, g, or t
  misc_feature (1559)..(1559): n is a, c, g, or t
  misc_feature (1563)..(1563): n is a, c, g, or t
  misc_feature (1569)..(1569): n is a, c, g, or t
  misc_feature (1578)..(1578): n is a, c, g, or t
  misc_feature (1593)..(1593): n is a, c, g, or t
  misc_feature (1606)..(1606): n is a, c, g, or t
  misc_feature (1644)..(1645): n is a, c, g, or t
  misc_feature (1681)..(1682): n is a, c, g, or t
  misc_feature (1686)..(1686): n is a, c, g, or t
  misc_feature (1746)..(1746): n is a, c, g, or t
  misc_feature (1772)..(1772): n is a, c, g, or t
  misc_feature (1775)..(1775): n is a, c, g, or t
  misc_feature (1781)..(1781): n is a, c, g, or t
  misc_feature (1784)..(1784): n is a, c, g, or t
  misc_feature (1788)..(1788): n is a, c, g, or t
  misc_feature (1797)..(1797): n is a, c, g, or t
  Peptide Sequence Number=SeqID_7481
  Probeset Number=SeqID_14214
nnnnnnnnnnnnnnnntttttttaaattcctataattntcnnactanatccgnnnttcncnatctcatacagaancaccgantcaaccacaaaccaaccaactcacaccaccactaaaccaaacattattctagacatcacatgcgttttcagtacaacccacctacccgcaccacccccgccacaacacgactccctgctgcacgcagtgcgagaccatatatacgaacggacactcacgcgcacacttgtaccatcacaattctgcaagcataactggatggagtaatcactacatctctctgactgtagtactcccacagaccatatcatacgtcacaagattgactttcacgaacaccagcacaacctcaccacatccttactgctacccaaatatctctcatgcatccccttccgcacatcgtctctatacacctcctgttgctgcacgctccctacaactgaatcaatatctagcgacaccagatttacacatacaacgactcacgatatcaatacaagcagtctcggaattagatacaagacacgacaccaccacacagacaagaccatctctggacaacgactccatatatagcgacacacaccatgatatcgagacaacaacaaacaacacgaaatctaatcactcccaccaccgacacgcgcgcacgcactcacactctagacacgaacataacacgatacttctgctcattattcatacccactgcccacacacttcatctacgcctcttatacgtacatgcaacatacatctacactcnagncttcgaatccgactcggaaagatnctaaatttcgacacactataagcagataagccaaanccgtctactcttgagcgcatacactctcaccancacctagtgaacttcgcantacacaactcacactaccatattcactacataggcgtatgcaatacacagccgctagcgagatacaccactcacttccgaccttgtcttctctctcgntatcgccgcgcatgacactctantgtcagacacactatctacgaataagcaactcaatactncacagatctaacacactcagtctctcatncacnagatacacatcgcgnacatanatatcggcgctgcacatgctagacgacccgacgcacactcactntgtgagagatgctattatgacatgatctcactaaacggcagcatcgagtcactacaacaacncacacatcaccaacgatcggcgcgagtaagattatactntntcgattatagagttaccactcgcactgnccatacnagtatactctacgncagcgagtcgatctgtaacacgngcgacgnttatatacntctgacatgaatnagcgaacttagtacgatantcttacgtgattactcacnatatnacnagatacgtattatntacgatacacactgnccacacactganncatattacacgctcactcgatntacgcaacgtctnncntcacnctcgnctaagcaacacatcatcancaacncatcacagcgaacncagacatgtatnaaacntacntgacanacagcgcanacgcgagcatcacanattatatctacgnacctcaacgcacgcaatcatgctatcgtggacacaatnncgtgatgaagaaagcgcgacgaccctaagtcgcagnnctgnagacaactagactcaccgagagagacactacatatcgcgtactcactacatactaagagntacacatgtacgacaactacatgcgnctnaacacntcnatcntcgacagtn

SEQ ID NO: 4436 - DNA, 715 bp, Glycine max
  misc_feature (1)..(54): n is a, c, g, or t
  misc_feature (714)..(715): n is a, c, g, or t
  Probeset Number=SeqID_14215
nnnnnnnnnnnnnnnnnnnnnnnnnnnnnnnnnnnnnnnnnnnnnnnnnnnnnntgatgttttaattgtcttggtgatgagtgacagccaacatctatagtgagttacaaccatttgggaaacaatgatggcatgaatctctcagcccctcaaaccttccgctcgaaggaaatttccaagagcaatgttgttgacgatatggtcaacagcaacgccatcctctatgagcctggtgaacatccggaccatgtggttgtcattaaggtaatttttatttttagtcactcactctctttcaaattcaattggttctttatttgactcttcggtaattaatttattggttttgcagtatgtaccttacgttggggacagcaagagggccatggatgagtactcttctgagatattcatgggcggaaagaacacaattgtgttgcacaacacttgtgaggattcactgttagctgctcctattatcttggacttggtccttcttgctgagcttagcactcaaatcgaatttaactctgaaaatgaaggaaagttccactcattccacccagttgccaccatgctaatttacctgaccaaggcccatctggttccaccgacttcgccaggggttaatgcactgtcaaagctgagagctatgctagaaaacattctaagggcttgtgttggattagctactgataacaacataatcctggnn

SEQ ID NO: 4437 - DNA, 1431 bp, Glycine max
  misc_feature (493)..(493): n is a, c, g, or t
  misc_feature (608)..(608): n is a, c, g, or t
  misc_feature (825)..(825): n is a, c, g, or t
  misc_feature (1031)..(1031): n is a, c, g, or t
  misc_feature (1063)..(1063): n is a, c, g, or t
  misc_feature (1088)..(1088): n is a, c, g, or t
  misc_feature (1145)..(1145): n is a, c, g, or t
  misc_feature (1174)..(1174): n is a, c, g, or t
  misc_feature (1291)..(1291): n is a, c, g, or t
  misc_feature (1293)..(1296): n is a, c, g, or t
  misc_feature (1335)..(1336): n is a, c, g, or t
  misc_feature (1339)..(1339): n is a, c, g, or t
  misc_feature (1341)..(1342): n is a, c, g, or t
  misc_feature (1344)..(1344): n is a, c, g, or t
  misc_feature (1355)..(1355): n is a, c, g, or t
  misc_feature (1365)..(1365): n is a, c, g, or t
  misc_feature (1368)..(1368): n is a, c, g, or t
  misc_feature (1370)..(1370): n is a, c, g, or t
  misc_feature (1375)..(1375): n is a, c, g, or t
  misc_feature (1384)..(1385): n is a, c, g, or t
  misc_feature (1388)..(1388): n is a, c, g, or t
  misc_feature (1399)..(1399): n is a, c, g, or t
  misc_feature (1401)..(1401): n is a, c, g, or t
  misc_feature (1411)..(1412): n is a, c, g, or t
  Peptide Sequence Number=SeqID_7482
  Probeset Number=SeqID_14216
cgtgtgcggagtagtgaggttagcatatagtgtagcatctcatatttctttgttcgtgtattagttgagacagttagttcacagtctcacttgctatattatatgtccatattattacacatatctctttctactctctttcgttgtattgtgtcgacgtagtagtagcatggcgccagcgcggccgcgtgacgcgcgcgaccgctcacgcgcacacgcaggtcgacgctctcacagcgacttctgaattatgatttgattgcgatacataatgtgtatgactatgcgagatagtgatatgacatgcacccgagccgacgtgcgtgcgagttgtgcaacacagcaacagcggacgatacagctggacgcaggcgcgagcgaggaaatcgtgatgaatcgcgaacaggatgatgttctgatggtcagcctactccacacgtgtcatagtagtgcacgagacgtcgcgtgcccagcacctccacgcgcatacagngcggagaggcgacatgagcgttgctagcgcgcagtggtcggtgtacagagacgcacacgcagtcacatcgtagcttctagcatcgataaccgtgggtacatatggtcagagtagnttcactgatagtgtagtacgctgatacgtcgtagcgagctgtcatcatacaacgttgtgtcagtgtctacagctacgacgcgcgctatcacatcctgcgatcgtgtcatttctactcaattaaaattcttatagagtgagttgttatgtctagtaatctcttctctctgcgagtctctcttttcctctctcttcatttctctattattatctatttncttctacttcgctccttctcttcactcttatactagctactatagacgtatcacctatacgacatatgatgtacacggatcgtgtgttgaatgtgacaatatactgtttatcggttagagatgtgatgggtgagtgtagggagtgagatgatggaaggctaggtgcgcactgtgagccctgaccacgcctacatctattctccatncaagtacattataacaacagaaagagacacanaagagtaaatatagtgtgtataatntatataatagattcgcgaaacacacatcataaccatcgccgcagccctaactgcacncggagcggccacacgaagtccgtggaggnttgagcaacagctctcgtgcttatcaacgatcacgtctatgcgtactcactgcaacaataccacccactaccgcttccgtgcgtctggtgcgagcggcacggcgcgcggcgggtggntnnnnaacaatagtatatacatacactataccatatgatacatnnttntnnangagagcggcgncgtgcacgangangngccgnaaacaaganntanataaaagaacnanaggggaaaanncacaaaacaacaaaacaaa

SEQ ID NO: 4438 - DNA, 1089 bp, Glycine max
  Probeset Number=SeqID_14217
aaatttagaaacttcctcacaacaactccaattcaaaaatttctttccgagcacactttattccgaatgaataccaaaacctactatgaaactttaggtcttgttagcacatgcaccgctcaagaaattaaaaggagttatcaccaacttgcactgatttggcacccagacaaacatactgataaggaaggagcaaacattcaattcatgttgatcaatgaagcttataatgtcctctgtgacgttgacaaaagaaaaatatatgatgtttccggaaaagaaggacttttaaaagctaaggatgaacaaactgatcttcaaaaaaatcgcttctaccaaaaagggttccatggttctgataaatcagcctttgatattctaaaagaaatcatcgaagaaaaagtggatagtgattttcttaaaagctgtgaagcttcaggatattcaaggkcaatgcattcaagcatgaaatcttttgttcatgagactgttatttcaagtgatgaagataccgcaaatttcttagctgactatcaaccaackttcttgaattctaaatttgcmgaacaatctgaatttcttggccaaattctgaagaaagatggtcccattaagctcatcagtaatccattcaacattgaaaaaaagcaaatcttcacaaaaagagcacgtaaaaatagcttcttggctgctcaagaatccgaaaataaagcattcccctttaaagttctcaaagcctctaagatcaagagcagagatagtcttttaagaactttgaagaataacaagagacccttccttatctgtgatgaagatgatgaacaacctgaagaagatgagtttatgatggcttttgttcaacccaaatttatcaagaaaaagagctatcgtagtgatgctattgaggaaagcgattatatttgtcatactttacgaaatcttccagtcgaaaaaatatcgaaaaaattgaaaacagaaacaattgtctaaatcagtcttagttggcgttttttttttgtgacttcactttttttttgaaaatttttattattataaaagccttttatattatgagctaatctgatatat

SEQ ID NO: 4439 - DNA, 437 bp, Glycine max
  Peptide Sequence Number=SeqID_7483
  Probeset Number=SeqID_14218
ttgccggacccggctgaggggaatcaatcgaactatcaaatgaggacagtgacttgactctctctctctatccttttccgccgttcctaaccctacaagcttcgtctcgtaaagaaaattccaaagctcaacagagaaaatgaggacagtgctttcgcgcttgagccggggggcgccttccatttccaggctcaatgccacggcagtgtcaatcagcgggagaaatctctgcacagattctaacaaagttgctcaaccctttaaagttgaagaagccgagactgtaaatgtgcctccaccacccacggaaaagttgcttgtgttgggaggcaatggggttgttggatcacacatctggagagaacccctacatccgtggcttgtctgttgcgagtcttagcaggcctcggccgtcatccctgcatgattcctgggct

SEQ ID NO: 4440 - DNA, 1340 bp, Glycine max
  misc_feature (18)..(19): n is a, c, g, or t
  misc_feature (27)..(27): n is a, c, g, or t
  misc_feature (67)..(67): n is a, c, g, or t
  misc_feature (104)..(104): n is a, c, g, or t
  misc_feature (112)..(112): n is a, c, g, or t
  misc_feature (119)..(119): n is a, c, g, or t
  misc_feature (121)..(121): n is a, c, g, or t
  misc_feature (191)..(191): n is a, c, g, or t
  misc_feature (762)..(762): n is a, c, g, or t
  misc_feature (765)..(766): n is a, c, g, or t
  misc_feature (923)..(923): n is a, c, g, or t
  misc_feature (1276)..(1276): n is a, c, g, or t
  misc_feature (1340)..(1340): n is a, c, g, or t
  Peptide Sequence Number=SeqID_7484
  Probeset Number=SeqID_14219
ttttatttcttcttgttnngtagtttntcaccccccaccacaactcaattgaacactagaccaacanacaccaccactcttcaggcgggcgcgacgacacgacnacccacgnttcgacnanatctatctcgtctggatgggtactatctctcagatcgccacagatgtgactacctcagatcatgatctgngcgtgtgcgacaccaactccgccgcatatatatagtataatattaatgatatacgcacagaactgaactactctacatgtatgagattgcatcagttgtcgtatagtcaccatcactcctcctctctcctgtagactcgtgatgcgcgcgctccaccataccaacgtacgcgagccactccatgccgaccagctaccagaacgcgtatggacgccactcttgctgtgcatactctgccttctctgctctactcacaatacataactcgaagacgtgtatgaatgcacacagataggtcgctgtctcgcgcgaacttttgcgtagtagcacgtgctgatatgtagcctcactctctactcgagtgattcccgccctcgctctacctctctccgtcgcccgacgacatatctgtactactctcactcgtgagacatatgtcagatacatcaatctacacagaccagtagtagccacactcgagacttagtaataatataatagaatatcaacagctccactgatacatataatgttatgactacagagagaagatagtggagaagttgagggnggnnaaaaagtatgatatacttatactaaaaagaagatgacagactataatataatagacaactctgtgtgcccacccaccctcctgtgttgttggtggtttattcttgagtggtttaatgttgcgatagagttcacaatataaatactacgacatatatncgatagacaaggattatgtctgacaagactccgacttatcatactcctcacataatatacgcatcatgatctgtaatgaccacctactactcacaacatctggagcatcatatgcatctgccgtatgtacagactcaatacgttaggtcgaccgttatttcatcaccgtacacactagggatgcgatggtgtgtatagtggcttcgcgcaatccagccgcgttactcacttgatggcatctcgctctatcgctgtcctctacacatgcgtacttcagggagtgaagacggcgttgcgtatcgcagtgtagagctgaggcgcgtggcgacacgtgacggtatagacactgagantcacacgcatctcaccgtctactaaattatactatcatactattactccaacgctcatacacgn

SEQ ID NO: 4441 - DNA, 615 bp, Glycine max
  Peptide Sequence Number=SeqID_7485
  Probeset Number=SeqID_14220
ccacgcgtccgcatgaaacccctctgatttgggcatgccatatgatacctttgcttaaccataattaaacgctagcgccgcactactgacgttaaaacacttacctgattcatttgatgagcactaacaaccttagcacactatatatacgactgcatagctcttgggggcttcaaaatatcatttagtgtctttcctgtgagcaccatgctcatgcaaggtgttcgtctacttcacttgctgctgcgatgttgctctctacatcatcagtttccattactgattacccttcactcgctcaaagaatcaaagatttgcctaacgacctgcctggaaccaacatcaagaaacatgcttctcagatcatagtgaggactccacttggttatcttagccaaggcactgctggaggtggggcttatgttgctgtcaagcaagagatgatgcggcctactgccatcatcaaagacagaccaccatatgcaacgatcacagatgctgatgaaaagtatctgataactcctggaaagacaactctgattgagcccacggtcagcactatgggtatcatcatggcattcatggtcgccatgaagggatacaagatggttttga

SEQ ID NO: 4442 - DNA, 1264 bp, Glycine max
  Peptide Sequence Number=SeqID_7486
  Probeset Number=SeqID_14221
acggagacatagcacatcagtatcttaacaccttgccaaaccctgaggcttgaagaactcgaagcgtcataaataggctagcccgacgaagatcgacatggccgaccatggcgacgagatgacgacgaacaagaaggtggtgctgaggaggtacgtgacaggctacccgacggcggaggacatggaggtggtcgtcacctcccacgtccggctgcgggtgccggaggggtcgacggccgccgtggtggtcaagaatctgtacctttcctgcgacccgtggatgcgcggccgcatgagcaagcacgacgacggcgacgccgtgccggccgaggacttcgtgcttggagaggccttggtcaatttcactgtcggcgaggtgctcgattcgacgcacccggagttcgacgccggcgacctcgtctgggggatgagtgcatgggaggagtacaccctcatcacccaaacggagggcctgttcaagatcaaccaccccgagctgccactctcacactacacaggtgttcttggcttggcagggctcactgcatatgctggactttttgaggttggcaagccaaagcaaggtgaatctgtttttgtgtcggcagcgtctggcgccgtcggtcagatcgttggacagctcgccaagatagcaggatgctatgtggttggaagtgccggctccgatgagaaggtgaatctcttgaagagcaagatgggcttcgacgacgcgttcaactacaagttggagggggacgacctcggcgcggcgctcgggcggcgcctcccgggcggcatcaacgtctacttcgacaacgtgggcggcgcgacgctggacgcggcgctgctgcggatgcggccgggcggccgggtggtggcgtgcgggatgatctcgcagtacaacctgctggagcaccagggggtgcgcaacctgtggtgcatcatcccaaagcgcgtccgggtggagggcttctcctgcatggactaccaccacctgtatcccaggttcgaggaggaaatggccggctatatcaaggcagggaaggtgaccgtcgtggaggacgtcgtccgagggattgagagggcgcctgaggctctgctgggcctgttttctgggagaaatgttggcaagctgctggttgctcttgcatgagtcatgagtgtgagtccatggaataatgacttctttatgtgttttattgaataagattgtagctgcaggcttataattatgataatgtaattgtaagccataaaaaattat

SEQ ID NO: 4443 - DNA, 396 bp, Glycine max
  misc_feature (98)..(98): n is a, c, g, or t
  misc_feature (191)..(191): n is a, c, g, or t
  misc_feature (293)..(293): n is a, c, g, or t
  misc_feature (341)..(341): n is a, c, g, or t
  Peptide Sequence Number=SeqID_7487
  Probeset Number=SeqID_14222
cttcttggcaccacggctctgcttcttcccctgcctacagcgcgggactgggtccggagaggagatttctttatcccgtacggagtgcgcatgcggcngagggaaggcaaggacggtcgctttagcgccgtcctcgttgcggcggttcttcggttgttggcagcggcggcataggagacggggaggcgctnatgtctgtcaaggcgggcttcggcaacgccgctaacacgctcgtcgactgggacggcggccgcgaccactgcgcctggcaggggtcgtcgcctgtgacaccnactccttcgccgtccttcgactgatgtggagattattgactaaagaangggatcttcaggctttcgacgacatgctatccaagatgaaatctacggcgtcttc

SEQ ID NO: 4444 - DNA, 1484 bp, Glycine max
  misc_feature (222)..(222): n is a, c, g, or t
  misc_feature (261)..(261): n is a, c, g, or t
  misc_feature (585)..(585): n is a, c, g, or t
  misc_feature (644)..(644): n is a, c, g, or t
  misc_feature (792)..(792): n is a, c, g, or t
  misc_feature (1070)..(1070): n is a, c, g, or t
  misc_feature (1186)..(1186): n is a, c, g, or t
  misc_feature (1261)..(1261): n is a, c, g, or t
  misc_feature (1333)..(1333): n is a, c, g, or t
  misc_feature (1385)..(1385): n is a, c, g, or t
  misc_feature (1451)..(1451): n is a, c, g, or t
  misc_feature (1456)..(1456): n is a, c, g, or t
  misc_feature (1460)..(1460): n is a, c, g, or t
  misc_feature (1462)..(1464): n is a, c, g, or t
  Peptide Sequence Number=SeqID_7488
  Probeset Number=SeqID_14223
aataggaacatacaataaagtatagagtacatagagcaggaggagatagatcacagagaagtatgatcgtaccatatgatcgtaagaagtgtccgtcgaggtgatagagagtgcacgtaacagagaagacaacagcgtatagataagataagagcatacggaaaacatcaaattctatagagtgcacgggcgggtgtgtaagagtgagagagcaaccgcctngtaataaatatatataacatttcttaatatcaatctggntctattagttcattgtagtacttgtgtgtatgatatcacatcactatagatattatatgcatccgttacgttgttacactataatgataccataagagtccatcgttaagtaaatgtgttgaatgttgtgatcactccgcacagtgagtcgcgtgctcagcgaacaacataatagtaattgcgagcagtcggatgtgtgcatcgtgtgtaggacatagtgtaaacgattatacagcatagatataaagatgaatgaggtagagagagaagagatatgatagtataaagtacacatgatatgtgaagatgcgtgagaacataggnggcgtcttgtggcgccgtgcggcacacatacgtcaaagcaaatagagaacatagagtantatatggaggtgtagatataggtactgagccgtataagatggcagccagagcacacacgagcaaataagtacatgtatattagaagatgattatgtgcagacgcaatatagcaattcagttacaatacgaatcagcaacaaaatactnaaaatcacatccacacatgctgtatacgatatatacatatctacaacactcataaacatcagtatatgtcattaatacacgaataaactaatatcacatctatttgtcttgtgtactatcttggtatattttgtagtatttatctatgttgttctctcttctgttgtgcgtcgttgctgctgtagttgtgtggtagtacacggctcctacgagacagagattaggagacagaacgaacacacacaccatcaaacgagcagtaaagacagcccgcgccncgcaaagctgcgcacgacactgcgcagtgcgacaacacaatcgcaacgcatatatctatgtcacacaattccccacacacacgacggatgaagaatagagaagtctcagcgcgcantgctcacatggcagatggacacgacgagagatgtcgggcgcggcagcaggtgttattatgactatctacatcttnttacgtggcggctccatgatatgtagacagatacagcctgcggatgcacagagagatgaagaatcaatttcnagtaagacagaagacgcgtgcctcttgcccgctcctctgtgtgttttcgcgnccggtatttgcgtcttcgcgtggtgcggtcttgcgcggtcggtgtttgggtgttggggttttggtngggtngtgntnnngtgtggtttttttttttttt

SEQ ID NO: 4445 - DNA, 2341 bp, Glycine max
  misc_feature (1)..(1): n is a, c, g, or t
  misc_feature (13)..(15): n is a, c, g, or t
  misc_feature (22)..(22): n is a, c, g, or t
  misc_feature (24)..(24): n is a, c, g, or t
  misc_feature (26)..(26): n is a, c, g, or t
  misc_feature (38)..(49): n is a, c, g, or t
  misc_feature (53)..(53): n is a, c, g, or t
  misc_feature (55)..(55): n is a, c, g, or t
  misc_feature (99)..(99): n is a, c, g, or t
  misc_feature (108)..(109): n is a, c, g, or t
  misc_feature (131)..(131): n is a, c, g, or t
  misc_feature (133)..(134): n is a, c, g, or t
  misc_feature (137)..(137): n is a, c, g, or t
  misc_feature (149)..(149): n is a, c, g, or t
  misc_feature (161)..(161): n is a, c, g, or t
  misc_feature (179)..(179): n is a, c, g, or t
  misc_feature (195)..(195): n is a, c, g, or t
  misc_feature (204)..(204): n is a, c, g, or t
  misc_feature (225)..(225): n is a, c, g, or t
  misc_feature (296)..(296): n is a, c, g, or t
  misc_feature (300)..(303): n is a, c, g, or t
  misc_feature (307)..(308): n is a, c, g, or t
  misc_feature (310)..(310): n is a, c, g, or t
  misc_feature (328)..(328): n is a, c, g, or t
  misc_feature (332)..(332): n is a, c, g, or t
  misc_feature (351)..(351): n is a, c, g, or t
  misc_feature (354)..(355): n is a, c, g, or t
  misc_feature (358)..(358): n is a, c, g, or t
  misc_feature (369)..(370): n is a, c, g, or t
  misc_feature (373)..(373): n is a, c, g, or t
  misc_feature (383)..(384): n is a, c, g, or t
  misc_feature (389)..(389): n is a, c, g, or t
  misc_feature (395)..(398): n is a, c, g, or t
  misc_feature (446)..(446): n is a, c, g, or t
  misc_feature (454)..(454): n is a, c, g, or t
  misc_feature (501)..(501): n is a, c, g, or t
  misc_feature (537)..(537): n is a, c, g, or t
  misc_feature (562)..(562): n is a, c, g, or t
  misc_feature (576)..(576): n is a, c, g, or t
  misc_feature (578)..(578): n is a, c, g, or t
  misc_feature (600)..(600): n is a, c, g, or t
  misc_feature (607)..(607): n is a, c, g, or t
  misc_feature (658)..(659): n is a, c, g, or t
  misc_feature (678)..(678): n is a, c, g, or t
  misc_feature (701)..(701): n is a, c, g, or t
  misc_feature (792)..(792): n is a, c, g, or t
  misc_feature (1129)..(1129): n is a, c, g, or t
  misc_feature (1153)..(1153): n is a, c, g, or t
  misc_feature (1194)..(1194): n is a, c, g, or t
  misc_feature (1264)..(1264): n is a, c, g, or t
  misc_feature (1266)..(1266): n is a, c, g, or t
  misc_feature (1295)..(1295): n is a, c, g, or t
  misc_feature (1346)..(1347): n is a, c, g, or t
  misc_feature (1355)..(1355): n is a, c, g, or t
  misc_feature (1389)..(1389): n is a, c, g, or t
  misc_feature (1393)..(1393): n is a, c, g, or t
  misc_feature (1426)..(1426): n is a, c, g, or t
  misc_feature (1428)..(1428): n is a, c, g, or t
  misc_feature (1455)..(1455): n is a, c, g, or t
  misc_feature (1461)..(1461): n is a, c, g, or t
  misc_feature (1471)..(1471): n is a, c, g, or t
  misc_feature (1505)..(1505): n is a, c, g, or t
  misc_feature (1518)..(1518): n is a, c, g, or t
  misc_feature (1525)..(1525): n is a, c, g, or t
  misc_feature (1553)..(1553): n is a, c, g, or t
  misc_feature (1589)..(1589): n is a, c, g, or t
  misc_feature (1598)..(1598): n is a, c, g, or t
  misc_feature (1616)..(1616): n is a, c, g, or t
  misc_feature (1627)..(1627): n is a, c, g, or t
  misc_feature (1630)..(1630): n is a, c, g, or t
  misc_feature (1633)..(1633): n is a, c, g, or t
  misc_feature (1647)..(1647): n is a, c, g, or t
  misc_feature (1656)..(1656): n is a, c, g, or t
  misc_feature (1704)..(1704): n is a, c, g, or t
  misc_feature (1734)..(1734): n is a, c, g, or t
  misc_feature (1781)..(1781): n is a, c, g, or t
  misc_feature (1786)..(1786): n is a, c, g, or t
  misc_feature (1791)..(1791): n is a, c, g, or t
  misc_feature (1799)..(1799): n is a, c, g, or t
  misc_feature (1829)..(1829): n is a, c, g, or t
  misc_feature (1839)..(1839): n is a, c, g, or t
  misc_feature (1888)..(1888): n is a, c, g, or t
  misc_feature (1906)..(1906): n is a, c, g, or t
  misc_feature (1918)..(1918): n is a, c, g, or t
  misc_feature (1944)..(1944): n is a, c, g, or t
  misc_feature (1948)..(1948): n is a, c, g, or t
  misc_feature (1960)..(1960): n is a, c, g, or t
  misc_feature (1968)..(1968): n is a, c, g, or t
  misc_feature (1998)..(1999): n is a, c, g, or t
  misc_feature (2013)..(2013): n is a, c, g, or t
  misc_feature (2015)..(2015): n is a, c, g, or t
  misc_feature (2038)..(2038): n is a, c, g, or t
  misc_feature (2064)..(2064): n is a, c, g, or t
  misc_feature (2066)..(2066): n is a, c, g, or t
  misc_feature (2068)..(2068): n is a, c, g, or t
  misc_feature (2070)..(2070): n is a, c, g, or t
  misc_feature (2089)..(2089): n is a, c, g, or t
  misc_feature (2096)..(2096): n is a, c, g, or t
  misc_feature (2136)..(2136): n is a, c, g, or t
  misc_feature (2206)..(2206): n is a, c, g, or t
  misc_feature (2219)..(2219): n is a, c, g, or t
  misc_feature (2234)..(2235): n is a, c, g, or t
  misc_feature (2302)..(2302): n is a, c, g, or t
  misc_feature (2321)..(2321): n is a, c, g, or t
  misc_feature (2340)..(2340): n is a, c, g, or t
  Probeset Number=SeqID_14224
nggcggccggggnnnggccccncngngcgcggccgcgnnnnnnnnnnnnttantnagtggcgaagtgtgtgagtgcaggggagtgtgtagagagtgatngagaggttnntaaatatcggaaagatgagggngnnggnggcggggagganactccactcacnctatacggatagtgagantagttagagttgcaangttcaagtncttatcactactcgacacacntcgcctacttgctctctcatctatactgagtgtcgcgacgaaacgcgcgcacgcgagcgacgccgccgccnagannnncacnnantacgccacgcgcagagcnactnactaaccaacatcactcgnttnnaantataaaattanncgngttgggtggnnggggngcagannnngatgagaggattacacatacatagatattataggtgtgtggtgctgtngtatgtgnatgctgcatcgttattctgtgtctcatcttcccactctagcgaccgngtattgtgcttgcatgtgtgattggtcgtatactantattcttgaccttccccactcacanctctctctcctccnanctacacgcacgatcaatatgancaggaantgatctacgagaagcacgtgagagccggcgccgcgcgtgtcgtccgcctcnnctcgccggctcgccgcccntccctcccgccagcctctcctcntctctccacctcacgcagcgccgcgacacgcctgcacacgtctcatcgtatctcgcacgctctcgcgctgctgtctccgtaccttatcatntctcatctttatctggcctgcgtcgaccttacacgactcctaccacagcactctacaatcactgcatcgctcgcgccgctcgacgacacgtatcaccacccacgcgcgctctatgtgctcgtcgacacggcgtgagattatattccttccagtgtttcagccgcggttctatgtgcagtgcagatatactactattagcagtgctgatccgacgtgtcgtagtgacgcatctgtgcatgtctcacagtcacgtgtccgacatatactacgagacatcattcatcgattacttgtctatgtaccgctatctctatctcttatatccgctcatcagctngatggagcagatgtcgtgtgctangtagtgcgtgtcttatattgtacgccaccgtactgtctcantatattatatacttgctgcatatgtatgtctgagtctactctgtctgtattgcgtggtgatagtctgtanantaatagactattgcctgatcatgcatctntcgcgacgtgcggcgctgatgtcacctatagctagtagcgcgtcgtcagtnntagtgtgnctgcgataggtctcgtgcatctaactgctgatantcanctaatctctgacgaacatgacttgagacttatntntggtcttgatctgctatacatcatatntgtttnatattcccangactcgctcagcgaactacacatctcgacacgtncatctcgacgaanagagttnagcatgacgacacgcaactagcggatangctgactagtcgtgctgtgatgatgtctgacgcgangagatacgntgactcaatctgtcatcnactatgctcgnacnccntctatctctgctcntcatccgtncttatatctagcgcgtcagcgcgcttatgtctattcactgtctgctantcatcctgatatctgactcgcacacgctanagatacgtctgcatcacggcggcgactcgtacaccacacagcatcangatcntaaantcaagcangtagcgtgtcgatttatcgtatatatgatntatggactangatctatactactgtctcatcatttgactgtgtattgacgcagctgatngctcgactgcgatcgtantcattcagacanctacactatctccatatcctaatccncgantgtgatcgctcnacatagancaccgtcgacatattatcacactcatgatnntagagctcgacatncnatactatatatagtgcgcgatcnacttatagcgcgtcagtggtgtctcnantngntgatgagtgaatttgcganatactancctgctatgacgcgtagtatcgactattacgacgacgganacacgacgcttcggcgagacacactactgcacgactgtataagcactaaatcgtcatcatgacgcgtcancgcggtgcgtgtncggtgtgattcgtanngcttgttcggcacaaggattgccggcgtgctaacagactgcgagagctgcgcggttcggcttcatgntgtggtgtcgacataagtncaccaagacgatgtcgganc

SEQ ID NO: 4446 - DNA, 1340 bp, Glycine max
  misc_feature (247)..(247): n is a, c, g, or t
  misc_feature (419)..(419): n is a, c, g, or t
  misc_feature (849)..(849): n is a, c, g, or t
  misc_feature (972)..(972): n is a, c, g, or t
  misc_feature (982)..(982): n is a, c, g, or t
  misc_feature (984)..(984): n is a, c, g, or t
  misc_feature (1162)..(1162): n is a, c, g, or t
  misc_feature (1258)..(1258): n is a, c, g, or t
  misc_feature (1304)..(1304): n is a, c, g, or t
  Peptide Sequence Number=SeqID_7489
  Probeset Number=SeqID_14225
tgtgtttttttttttaagtatatgtaggtctggagatgagctgggatgggagtgttggtgtgaaagggagaagaacacagtctattataaaaaaaattaaaaaatgaatacagacataaaagagtattttttataattactccatcattatcgcgctcttagaaaagaacgggtttcacgtggttgggtcgaggtggtgactaagaggcgggcgatcatctaggtagactccaattgcgaggaatgntggggagatggtatgtgatgcctccacttctgcgtcgtgtttctggtgagtgaagcacgcgccgcgcaacgaacgttggatggttatggatttcctttacattactgttacacatcatcctccaacgccatgtatccattgcttatgcacccccgccatccgttacagtctnttcgttgtctctgctctttttctgtctaattatgtctttgaaacgaagagttattccgtgtggctgaggaatgttaggttattatgagaggtggtttatgaaaaggaggaggtaaaaagcataactattcctccccaacgattctcgcgttgtaattgtaaataacaacaatttatacttatatatattgtgtgcgaagacacggattaacctacgcatatgtgcaccttcgcgccaccactctatcagtgtcaccccgcgggtttgtattaggttgactctcgcgtgtctagcgctgctacctcacgtgatgtggcgcgcggcccggcgatgtgtatctttgagtacttcgtttcggagggcgaagtcgttctactatctgattatccagtagctctctcatatatactccatatatatctcagtgcgntgtcgtggagaagatctgcaacagagggccgttgcgcctatttatactggctgtgtgacagcttatatattatcttaacacgcattcgtctacgtctacatccaatctcaattcacacctgancacacatcgntncactcggatctaccccgcgtcgcgagcgctcttagcgtgctcatgcgctcgagcgcatgatgacaatgtgatagactcgtactgaaaatactgatacccacagtatgccacaccacacatacacgactatactataatacaaggatgcactccaactatattcgtatcacacctcatnttatacaacatacctctccctcacctctcgcacctgtcgtcgcggcctcctcacacctctacacctctcgctcttatctcgtcttgtatctgcgtntaagtcgcgtagagatgctaggcgtagactgatactgtcagggtgngtcagctatcagacacgtctaccaactagtctatcg

SEQ ID NO: 4447 - DNA, 1330 bp, Glycine max
  misc_feature (1)..(469): n is a, c, g, or t
  misc_feature (1330)..(1330): n is a, c, g, or t
  Probeset Number=SeqID_14226
nnnnnnnnnnnnnnnnnnnnnnnnnnnnnnnnnnnnnnnnnnnnnnnnnnnnnnnnnnnnnnnnnnnnnnnnnnnnnnnnnnnnnnnnnnnnnnnnnnnnnnnnnnnnnnnnnnnnnnnnnnnnnnnnnnnnnnnnnnnnnnnnnnnnnnnnnnnnnnnnnnnnnnnnnnnnnnnnnnnnnnnnnnnnnnnnnnnnnnnnnnnnnnnnnnnnnnnnnnnnnnnnnnnnnnnnnnnnnnnnnnnnnnnnnnnnnnnnnnnnnnnnnnnnnnnnnnnnnnnnnnnnnnnnnnnnnnnnnnnnnnnnnnnnnnnnnnnnnnnnnnnnnnnnnnnnnnnnnnnnnnnnnnnnnnnnnnnnnnnnnnnnnnnnnnnnnnnnnnnnnnnnnnnnnnnnnnnnnnnnnnnnnnnnnnnnnnnnnnnnnnnnnnnnnnnnnnnnnnnnnnnnnnnnnnnnnnnnnnnnnnnnnnnnngcaaaatgagatagcaggtttggagaaagagatagagtcactgatatgggagttggtggaggaacgcaagagggagtgctcagagacatcctcatcagagaaggatttgatgcaattgctgttggaagcagcaatgactgatcagagtctggggaaggacttctccaagcgattcattgtggattactgcaaaaacatttactttgctggccatgaaaccactgctgtcgcagcctcatggtgtttcatgcttctatgctctccaccccgaatggcaaactcgcataccgactagaactcgctgaactttcctttaatgtataaccacatgcacattctgtccctatattgaaaacggtggcaatggtgattaaagaagtgctacgtttataccccccaggagcctttgtttcaagggaggcatacgaagatatccaaattggaaacctcaatgttcccaaaggcgtttgtttatggactctgatcccaacactgcacagagatcttgatatttgggggccagatgcaaatgagtttaaaccagaaaggttcagtggaggtgtctccaaggcttgcaagtttccacatgcttatgtgccatttggattgggtactcgcttgtgcttgggaaagaactttgccatggttcaattgaagaatgctttcaaatagagactatcacatagcagctctttgctccgagaataaaaggttgctgttcattgtcctctagagagcctgatcttataccgttgtggacaacacattatgttcttaacttttgtcaagttgtgtattgttcagggtccccaaaatacacgtgacaccatacatgacactccaagatacgtgttaattctn

SEQ ID NO: 4448 - DNA, 2192 bp, Glycine max
  misc_feature (1)..(1): n is a, c, g, or t
  misc_feature (10)..(10): n is a, c, g, or t
  misc_feature (12)..(12): n is a, c, g, or t
  misc_feature (28)..(28): n is a, c, g, or t
  misc_feature (30)..(30): n is a, c, g, or t
  misc_feature (50)..(51): n is a, c, g, or t
  misc_feature (60)..(60): n is a, c, g, or t
  misc_feature (62)..(62): n is a, c, g, or t
  misc_feature (64)..(65): n is a, c, g, or t
  misc_feature (84)..(87): n is a, c, g, or t
  misc_feature (89)..(90): n is a, c, g, or t
  misc_feature (92)..(92): n is a, c, g, or t
  misc_feature (94)..(94): n is a, c, g, or t
  misc_feature (96)..(96): n is a, c, g, or t
  misc_feature (100)..(100): n is a, c, g, or t
  misc_feature (112)..(112): n is a, c, g, or t
  misc_feature (168)..(169): n is a, c, g, or t
  misc_feature (191)..(191): n is a, c, g, or t
  misc_feature (193)..(193): n is a, c, g, or t
  misc_feature (210)..(211): n is a, c, g, or t
  misc_feature (221)..(221): n is a, c, g, or t
  misc_feature (224)..(224): n is a, c, g, or t
  misc_feature (243)..(245): n is a, c, g, or t
  misc_feature (259)..(261): n is a, c, g, or t
  misc_feature (264)..(265): n is a, c, g, or t
  misc_feature (307)..(307): n is a, c, g, or t
  misc_feature (318)..(320): n is a, c, g, or t
  misc_feature (324)..(324): n is a, c, g, or t
  misc_feature (332)..(334): n is a, c, g, or t
  misc_feature (342)..(342): n is a, c, g, or t
  misc_feature (378)..(378): n is a, c, g, or t
  misc_feature (380)..(380): n is a, c, g, or t
  misc_feature (402)..(403): n is a, c, g, or t
  misc_feature (405)..(405): n is a, c, g, or t
  misc_feature (407)..(407): n is a, c, g, or t
  misc_feature (418)..(418): n is a, c, g, or t
  misc_feature (427)..(427): n is a, c, g, or t
  misc_feature (444)..(444): n is a, c, g, or t
  misc_feature (447)..(447): n is a, c, g, or t
  misc_feature (471)..(471): n is a, c, g, or t
  misc_feature (546)..(546): n is a, c, g, or t
  misc_feature (555)..(556): n is a, c, g, or t
  misc_feature (601)..(601): n is a, c, g, or t
  misc_feature (604)..(606): n is a, c, g, or t
  misc_feature (648)..(648): n is a, c, g, or t
  misc_feature (652)..(654): n is a, c, g, or t
  misc_feature (704)..(705): n is a, c, g, or t
  misc_feature (722)..(723): n is a, c, g, or t
  misc_feature (725)..(726): n is a, c, g, or t
  misc_feature (789)..(789): n is a, c, g, or t
  misc_feature (792)..(792): n is a, c, g, or t
  misc_feature (795)..(795): n is a, c, g, or t
  misc_feature (797)..(797): n is a, c, g, or t
  misc_feature (852)..(852): n is a, c, g, or t
  misc_feature (856)..(857): n is a, c, g, or t
  misc_feature (859)..(865): n is a, c, g, or t
  misc_feature (868)..(868): n is a, c, g, or t
  misc_feature (872)..(872): n is a, c, g, or t
  misc_feature (898)..(899): n is a, c, g, or t
  misc_feature (901)..(903): n is a, c, g, or t
  misc_feature (905)..(906): n is a, c, g, or t
  misc_feature (908)..(910): n is a, c, g, or t
  misc_feature (928)..(928): n is a, c, g, or t
  misc_feature (945)..(945): n is a, c, g, or t
  misc_feature (968)..(968): n is a, c, g, or t
  misc_feature (976)..(976): n is a, c, g, or t
  misc_feature (980)..(980): n is a, c, g, or t
  misc_feature (986)..(986): n is a, c, g, or t
  misc_feature (989)..(989): n is a, c, g, or t
  misc_feature (992)..(992): n is a, c, g, or t
  misc_feature (1024)..(1024): n is a, c, g, or t
  misc_feature (1073)..(1073): n is a, c, g, or t
  misc_feature (1083)..(1085): n is a, c, g, or t
  misc_feature (1091)..(1092): n is a, c, g, or t
  misc_feature (1103)..(1103): n is a, c, g, or t
  misc_feature (1134)..(1135): n is a, c, g, or t
  misc_feature (1140)..(1140): n is a, c, g, or t
  misc_feature (1146)..(1146): n is a, c, g, or t
  misc_feature (1154)..(1154): n is a, c, g, or t
  misc_feature (1174)..(1174): n is a, c, g, or t
  misc_feature (1197)..(1197): n is a, c, g, or t
  misc_feature (1200)..(1200): n is a, c, g, or t
  misc_feature (1203)..(1204): n is a, c, g, or t
  misc_feature (1223)..(1223): n is a, c, g, or t
  misc_feature (1227)..(1227): n is a, c, g, or t
  misc_feature (1245)..(1246): n is a, c, g, or t
  misc_feature (1250)..(1251): n is a, c, g, or t
  misc_feature (1261)..(1261): n is a, c, g, or t
  misc_feature (1267)..(1267): n is a, c, g, or t
  misc_feature (1284)..(1285): n is a, c, g, or t
  misc_feature (1312)..(1312): n is a, c, g, or t
  misc_feature (1332)..(1332): n is a, c, g, or t
  misc_feature (1335)..(1336): n is a, c, g, or t
  misc_feature (1353)..(1353): n is a, c, g, or t
  misc_feature (1387)..(1387): n is a, c, g, or t
  misc_feature (1398)..(1398): n is a, c, g, or t
  misc_feature (1422)..(1422): n is a, c, g, or t
  misc_feature (1424)..(1424): n is a, c, g, or t
  misc_feature (1434)..(1434): n is a, c, g, or t
  misc_feature (1484)..(1484): n is a, c, g, or t
  misc_feature (1563)..(1563): n is a, c, g, or t
  misc_feature (1612)..(1612): n is a, c, g, or t
  misc_feature (1623)..(1623): n is a, c, g, or t
  misc_feature (1676)..(1676): n is a, c, g, or t
  misc_feature (1746)..(1746): n is a, c, g, or t
  misc_feature (1749)..(1749): n is a, c, g, or t
  misc_feature (1759)..(1759): n is a, c, g, or t
  misc_feature (1761)..(1761): n is a, c, g, or t
  misc_feature (1776)..(1776): n is a, c, g, or t
  misc_feature (1778)..(1778): n is a, c, g, or t
  misc_feature (1792)..(1792): n is a, c, g, or t
  misc_feature (1794)..(1795): n is a, c, g, or t
  misc_feature (1798)..(1798): n is a, c, g, or t
  misc_feature (1800)..(1800): n is a, c, g, or t
  misc_feature (1802)..(1803): n is a, c, g, or t
  misc_feature (1811)..(1811): n is a, c, g, or t
  misc_feature (1861)..(1861): n is a, c, g, or t
  misc_feature (1877)..(1877): n is a, c, g, or t
  misc_feature (1896)..(1897): n is a, c, g, or t
  misc_feature (1917)..(1917): n is a, c, g, or t
  misc_feature (1961)..(1961): n is a, c, g, or t
  misc_feature (2031)..(2031): n is a, c, g, or t
  misc_feature (2039)..(2040): n is a, c, g, or t
  misc_feature (2072)..(2072): n is a, c, g, or t
  misc_feature (2093)..(2093): n is a, c, g, or t
  misc_feature (2095)..(2097): n is a, c, g, or t
  misc_feature (2133)..(2134): n is a, c, g, or t
  misc_feature (2136)..(2136): n is a, c, g, or t
  misc_feature (2138)..(2138): n is a, c, g, or t
  misc_feature (2140)..(2141): n is a, c, g, or t
  misc_feature (2143)..(2144): n is a, c, g, or t
  misc_feature (2158)..(2159): n is a, c, g, or t
  misc_feature (2163)..(2164): n is a, c, g, or t
  misc_feature (2166)..(2166): n is a, c, g, or t
  Peptide Sequence Number=SeqID_7490
  Probeset Number=SeqID_14227
ncagcatcgncntcatgcagtacatcancntcgtgataccatatcagcannagccacganancnncatccagctgatgtcagcnnnnannanananccancacgcgcactanagacgtactcatcgtaccagcacgcgacgacgtcataagcgattcgcagcaccgtnnagcacgtcgtatgatgcgcagnantgtcatgctagtgatannatgttgtganatngctcgtgtcaatagtctcnnnctcacactagtgtnnngcnnacggtgtgtcagcgtagtcgtcgcgcgtcgcagctctgtgtntcatctctaannncccncacacaannngcatgcgncactgagtgctgtgatgtcgcgacgtcatacgtacncntcatgctcgctgatggtgtaannanantttcgaatganacgtacgancgatgatcattgtaatntcnccatcatgtctagtctacaatgcnactatactctcagtcctgtgacagcggcgcatgacttgtacgaggtagtgatatagcagtgatctattttactgnatcactcanncagagtcaacgagatacagcagcatcgagggtacgatatgtgacntannnaaatatacgtgtcacataatcacgcgtgcatcatcaaggtcngagnnnatacaatcgtgtgattcatcgatcgcacacgtatcgtcagattaggagannctatcgatgctcgacgnnannatgagtatgctgctgcgctggattagtcacgcgaagacgtctacgtcgactcacgatcccatntcncgncngactgcgctacggtagtatacgatggtgatgtagtagtcacagcagtacgccggngagnngnnnnnnnaangagngagatagtaaagacagcagcgcatannannngnnannntgtagaccgcgcgtcganacacgcgagtagtagancacgtacagtagtcgtgatcacntttcctcnactncaacgnacnagnacagatcatcagcagcgtgatcgtctactagnatagctctatcatgtgctctcgtgaacttctcgtcacgtcgtcgcttcntcaacaccannngtgacnnttcgttcgtcntactcgtcttatcatagatgtgcgtacgagnngcgcntgccanccagctanctgtcagcaccgcgtatcantctgctcactctccgacatcacnctnttnnacatctgcagatagtagtnactnctgtgtctgtcatgcgtnntatnngatgtcgtgnatatcncaagtaagacgcgaagnnccatcactgatagtgggacgtatgatngaactctcgctcgagagcgnagnnatcggttatagtcgctngcgatcaggcgagcacgatcagcagcgtactgcngctcgtcgctngcagtcagtatgagtgatgtaagnanaatatatgtnagtcgtatgaatatagtggtagagcgtcgtcgtctgcacgagcgggcgtngagtaggggtagccgttgtctacaatactcgtgcgcagcgtcgcccacatgcgacatcgtcgcgcagtagttgctgccngccgtccttgatctcatgcagtgctgcgtcatcgttaatactctacatnatgcgagtcgngcgtcgtgccgtgcgtcaattctgtttgccatatacttacctagagaacatanatgtgattatgttataacattacgatacacccagagatatagtgactgagcagaacatctatctctaatntcncgatactagnangagtgctcggtgtgntntgctctgtacagcntnnacnanannggcgctcnactctacgatgtgcctctgagagcgagctgagcgtcgcggcagaacacangacactatatgacatngagcacaggccagagcacnncacgacagatatgagagatntaatagttataatatctgcacctaggcctaagacacgcaccganagtggaggcagtaacgccgacttatcaagtttcacaatcagggaagcagcggtagccgcggagcgcaagncagcgtgnncgggcagtggcaacgctctactccgagagctntatattagtagaggatagtantnnngtggatcagctcacgcacgacctttaagccgatatnnangngnnannccgagctgaggctnngtgnnangaggaggggagaggggaaggaagcga

SEQ ID NO: 4449 - DNA, 1991 bp, Glycine max
  misc_feature (17)..(17): n is a, c, g, or t
  misc_feature (22)..(23): n is a, c, g, or t
  misc_feature (25)..(25): n is a, c, g, or t
  misc_feature (28)..(30): n is a, c, g, or t
  misc_feature (34)..(35): n is a, c, g, or t
  misc_feature (37)..(37): n is a, c, g, or t
  misc_feature (44)..(44): n is a, c, g, or t
  misc_feature (59)..(62): n is a, c, g, or t
  misc_feature (69)..(71): n is a, c, g, or t
  misc_feature (79)..(80): n is a, c, g, or t
  misc_feature (84)..(86): n is a, c, g, or t
  misc_feature (89)..(89): n is a, c, g, or t
  misc_feature (99)..(99): n is a, c, g, or t
  misc_feature (101)..(101): n is a, c, g, or t
  misc_feature (114)..(114): n is a, c, g, or t
  misc_feature (120)..(120): n is a, c, g, or t
  misc_feature (134)..(134): n is a, c, g, or t
  misc_feature (136)..(136): n is a, c, g, or t
  misc_feature (142)..(142): n is a, c, g, or t
  misc_feature (163)..(164): n is a, c, g, or t
  misc_feature (166)..(166): n is a, c, g, or t
  misc_feature (177)..(179): n is a, c, g, or t
  misc_feature (185)..(185): n is a, c, g, or t
  misc_feature (210)..(210): n is a, c, g, or t
  misc_feature (213)..(213): n is a, c, g, or t
  misc_feature (217)..(217): n is a, c, g, or t
  misc_feature (222)..(224): n is a, c, g, or t
  misc_feature (229)..(230): n is a, c, g, or t
  misc_feature (233)..(234): n is a, c, g, or t
  misc_feature (243)..(243): n is a, c, g, or t
  misc_feature (248)..(248): n is a, c, g, or t
  misc_feature (281)..(281): n is a, c, g, or t
  misc_feature (292)..(292): n is a, c, g, or t
  misc_feature (295)..(297): n is a, c, g, or t
  misc_feature (356)..(356): n is a, c, g, or t
  misc_feature (483)..(483): n is a, c, g, or t
  misc_feature (521)..(521): n is a, c, g, or t
  misc_feature (524)..(524): n is a, c, g, or t
  misc_feature (571)..(571): n is a, c, g, or t
  misc_feature (589)..(589): n is a, c, g, or t
  misc_feature (591)..(591): n is a, c, g, or t
  misc_feature (594)..(594): n is a, c, g, or t
  misc_feature (617)..(617): n is a, c, g, or t
  misc_feature (654)..(654): n is a, c, g, or t
  misc_feature (673)..(673): n is a, c, g, or t
  misc_feature (729)..(730): n is a, c, g, or t
  misc_feature (856)..(856): n is a, c, g, or t
  misc_feature (959)..(959): n is a, c, g, or t
  misc_feature (970)..(970): n is a, c, g, or t
  misc_feature (1008)..(1008): n is a, c, g, or t
  misc_feature (1010)..(1010): n is a, c, g, or t
  misc_feature (1012)..(1012): n is a, c, g, or t
  misc_feature (1052)..(1052): n is a, c, g, or t
  misc_feature (1143)..(1143): n is a, c, g, or t
  misc_feature (1178)..(1178): n is a, c, g, or t
  misc_feature (1180)..(1180): n is a, c, g, or t
  misc_feature (1284)..(1284): n is a, c, g, or t
  misc_feature (1369)..(1369): n is a, c, g, or t
  misc_feature (1379)..(1379): n is a, c, g, or t
  misc_feature (1491)..(1491): n is a, c, g, or t
  misc_feature (1808)..(1808): n is a, c, g, or t
  misc_feature (1837)..(1837): n is a, c, g, or t
  misc_feature (1904)..(1904): n is a, c, g, or t
  misc_feature (1913)..(1913): n is a, c, g, or t
  misc_feature (1938)..(1938): n is a, c, g, or t
  misc_feature (1962)..(1962): n is a, c, g, or t
  misc_feature (1987)..(1987): n is a, c, g, or t
  Probeset Number=SeqID_14228
ggggggggggttttggngtggnngnggnnngggnngnggggggnggaaaggcgagggannnngcggggnnngcaggcgnngagnnntanggccggcganangagtgttggaccnttgtgnggtgcgtgctggtngntgtgcnacgcgcggcggacagccgacnncncaacgcacccnnncccccnacttcacgccgctgcagtggtacanatntagngtacnnnggaanntanntctagtcantgtantatcttcttattttattttcaccatacccatantccaattacantannntctaggattagtctatgtatacgagcagacgacgtacaagatagtacctgctatgatancgtcgcatgttcgcgctgcgatcagacacgacacgctacccgcacaacgtgtgctccgatagtatacgattattagcggcgcggcctgacggagacagctatactaactgcgcactcacaaccctancacaactagccaccacatcatacatcaagatcataagnagnaagaagatgaagtcgacacagtcgagagccgcgcaggatgactactngacatgatatatcgtcangngcnacgtagtgtgccactcaagactngagatagattatagaggtatgtgtatagcagtgtganatgcagatgggacacgcgnacagcgtcaagatagcgcgagatcgaagacagcgagcatgaccagaccagcagcgnntcacaccgagccagcgcgacgcgcgtgctactaacgaatcacacgagtcgagagttgacgaaactcaaacgcacgacgcagatcatgagactacgcaactacacgactcctatgctggactctatnaagtgagcataaggatagcgcacgaggtgcacgtactcaagacacacactcgtcgcttgctacatcttcgcgagtctgtgctggttatgctagtcgctccatngcattgccttntctgctgtatcactgctatctcacttatgtcgtatagngntntgtctgtgtgttagtaatatatgtagtggcgaatgatgtntatgcgttctgagatgtgcatgtctatgtatgatgcagaatgtatatcatacctcgtacagcgctagtcatacgcgaccgctgactgacgnattagcagtgcgcgcgtgactcgagcgccgtcgcngncgcgggccgacacgcacacaacaggtcgagacgtgatagttatattataagttgatgacttggagcgtcatacgtgtagtgcctgtgtgtgtgcgtgcgtccgncacaccgacgacgctctccgtgtcgcgatgacgttcacgcgtcctcagtaatctatatctatgatgagaagatacgtctctattnatacgcgtgnagcccgcgctacacgatatgagtggcgtatagctcgtgagcgatgaagctggatagctgatgagacgtgagtatgacggcgcacgtgtgagtgcgcgctatgcgtcgccgtntcttccctcgctgcgcttgcgctcatggatagtagtgagaagagatgcgtatggtaagcgtatgatacgatggtggattatgtcattgaggtcatgagcacactatcacataatttcacatatgatcatgtatattactagtgatctagctaacagaatcacctctctcgaacgtatgtaaatatacatagtctctctcaatgcctgctatcctcgcccagcacgcggacctcatcacgcgcgacacgcgcagcacgcccatacactctcgactcgagtgcttagaggactggtgatcgtctacgacgatttgcgtntcatgcattattacttgcgacctcctatnatacgtatatgagtatgctacatcttatgagtcgcatgtcgtcatacgagatgtgatgatgatatangacgtggangatcgtgcgacacacaacgaacacnactccctatgacgcatcactcatnaagtcgaaccgaaacgacaaaacantata

SEQ ID NO: 4450 - DNA, 420 bp, Glycine max
  Peptide Sequence Number=SeqID_7491
  Probeset Number=SeqID_14229
gcttaagccctggttggatgagtaccatagtttgtcatcttgaaccctggttggatgacaaactatggaacttaagccgtgtaactggtaagatggtggtggttagagtagtagtatagtgaagattatgctatatgatttaattagggacgatgtttctgcgcttgttgtccaacatttgatcatgaaatggtctacgatgagtccgatgtgaaagctgtggctcgagctggggagcgtgtcgtaggtgatccattcaatgggggaatagagcaaggtccatatacagattcaaatcatctcgttaaaatgactgctgtcatcagatcgggtgtggtaagtgtggcaacccttgaaaccggaggatacaagctcgcctacatcgactgctaccttcgacctacagtcttctcagatgta

SEQ ID NO: 4451 - DNA, 337 bp, Glycine max
  Peptide Sequence Number=SeqID_7492
  Probeset Number=SeqID_14230
actctggggattctttcatctgctgaatcctggcattcctcatgacatcttcgacgctgtgaagaggttgacctgccatcgctacaggacatgcgtggaaaacaggttcactgaattatagtccaacgacggtctagacgctgtcccaactgacgtccacgatatggactgctacaccaccttccacttgactgacctccctgaatcgaacgtctctgatatccctgatctcattgatgagcactggaatgcgatgaaggatcttgctgtgaagaccgatatcctttcggaccctctcctggacttgttcagtgaaaatcctgatctagatactggt

SEQ ID NO: 4452 - DNA, 1493 bp, Glycine max
  misc_feature (46)..(47): n is a, c, g, or t
  misc_feature (152)..(152): n is a, c, g, or t
  misc_feature (443)..(443): n is a, c, g, or t
  misc_feature (720)..(720): n is a, c, g, or t
  misc_feature (804)..(804): n is a, c, g, or t
  misc_feature (1263)..(1263): n is a, c, g, or t
  misc_feature (1403)..(1403): n is a, c, g, or t
  misc_feature (1493)..(1493): n is a, c, g, or t
  Peptide Sequence Number=SeqID_7493
  Probeset Number=SeqID_14231
ggggttgggggccccagcgcagggaatttaaaaaattataggtaanncgggttgcgtccgccgctctttacgacgagtgacaacaccctctacctccaaccaggaagagatgttgtgataaacaatgtgagcctcctccctgatcgtgcccnctctggggtagtagaggatgaagtgcacgagataccctatacctctgtctctgacgggggcgggagcgccgcggagaggccctgcgcctgtcatgatgggggggcgtacgtcttacaataatctctttcagcaccaaatccagtccgcgctcggtctcgactgaatgtagggagagatggttgtgctagcgatgttgattacagattatcagcttcacactcctctacgccgcgcgccaataaactaagaaaaaatatgaaacagataaccacttcgtcgagtgagcgcgnctggtcgagatatccacgaggggatggacgcgagcagggcgcggaccgtctcggctgtctggcgcgtgggactcggcggtccgcctccgcgccttcctcgcctctgcacaacactatcctgcaccctctcctgcttctccatggaggccgcgccacgtggaggagctgggcggaggcggcagttgtaagattgcagatgacgggatgagagaggtagagtaagagaatagattaacaaagcttacccttcatcacccactccgtctcatcccgaganttaaagacagcccggtcccacggtatataccacgcacagaaaggatcgcaggcaaatcttgatgttgagtggtgggtgtggganggtgaggagaatagtaagtaaaaattattatagatgagtagaagaagtaaagaagaataaataaaatatgcgggattaagaggagtgtaataagagattatccaccccaacacacgcaccacagaagcgggacagtcacgacatgagtatacaaggatggtggggagaggtagatacgacaaggacgggtgtttggtctgtacagctggtcgtataatgacacatctggttcctgcgatgtgaacttataaacttcatcctttcttcagaggtcgcgatagatacatcttgtatcatagtacgccatgacacgccgtggtggtggccgcttgtttgggcggccacgtatacgcgtattcgtaaaagacgcagggtagcgcgcgcggatgtgagtcgatattccgtggcagtgcattgtgtctttactatgtatggagacaggaggattgtgtgacgagncgcagctataactctgccgccatcacagatacggcgagaatagacagaggtgcgggctctagcacagcgcgtcaggtgcgcgcgcgtagtcatatgattgacataatcgactctaaacataaacagttcgtgagtgcttntcgatacaggatagatatctatcattaatcatctaacattatagagctcagtagtgttaccaactctagcaaggaagtctatgcttatcn

SEQ ID NO: 4453 - DNA, 628 bp, Glycine max
  misc_feature (595)..(595): n is a, c, g, or t
  Peptide Sequence Number=SeqID_7494
  Probeset Number=SeqID_14232
tctcttcatacactcacttccctctctgagtgcggaaccagcgaaacgctcttcgttatcttttctcagactccgcgtcgcatatccgaggtagctcggtgaatcctaactcatcatctcaactcatgccatggatggacttgcgcctgagggatcacagctacgatgctcgacaatatgattctaaaatgagtgacttactttcatctgatggacaggacttcttcacatgctatgacgaggattatgacagcttcgacgctatgggctcgcaggaaaatcttcgtcagggaatttacgcatatggatttgagaagccatctgccagtcgagaaagggctatcagtctcccttctgcaagggacttgatgttattcagcaggatcagcctgtaactgccaagacggctactttcggctctggaattctgcagtgacttgactatagctcgacgcaatgcacgcacttgtatgtagcaccagatcgtgagcttgctcagcatattgagaaggttatgcgagcacttgcagatgatctaggtgtgaacgctcatgcgtgagtgtcaggtatcagcgtgtgtgtatgacatccagtncttctagcgtagatcatgctagtgctgcgacac

SEQ ID NO: 4454 - DNA, 796 bp, Glycine max
  misc_feature (601)..(796): n is a, c, g, or t
  Peptide Sequence Number=SeqID_7495
  Probeset Number=SeqID_14233
gacccgcgcaagcgccccaacacgccgcgcgcaggcggctggccgggggcggtcggtatgctggcgtctgcgggcgagggaggtggccgggctccgggcgtcggcgcgtcccgcggggtggggggctgcgcgctcccgcctcgccgccgcggccggccccccgccggggcgcgcgcgggggggggcggggttgggggaggggtgtttttgcgccatccgcactatttttcacgtcggaggataccccagaagggcgctctgtcgcgtgcaatggatcaaagggcgcaacgtctttgatgcctattgtcgccacgtcactgcagcattggtcctctccatcattggatccacggtctttctcttgctcgtgctcctttctgttcttaaactccattacagaacaggaatttagatctcgatatgatatgatacacgctataatatatatttgtagggttaattaattaattgagggtgttcttgtacgtgtgctcttgcacccgcggaacaggaatttaaaataagccatccgccggctctcccgggtactcgggaactgcgatacataatacgcccccccgctccccccaccccccccggnnnnnnnnnnnnnnnnnnnnnnnnnnnnnnnnnnnnnnnnnnnnnnnnnnnnnnnnnnnnnnnnnnnnnnnnnnnnnnnnnnnnnnnnnnnnnnnnnnnnnnnnnnnnnnnnnnnnnnnnnnnnnnnnnnnnnnnnnnnnnnnnnnnnnnnnnnnnnnnnnnnnnnnnnnnnnnnnnnnnnnnnnnnnnnnnnnnn

SEQ ID NO: 4455 - DNA, 1528 bp, Glycine max
  misc_feature (41)..(41): n is a, c, g, or t
  misc_feature (111)..(111): n is a, c, g, or t
  misc_feature (264)..(264): n is a, c, g, or t
  misc_feature (275)..(275): n is a, c, g, or t
  misc_feature (311)..(311): n is a, c, g, or t
  misc_feature (473)..(473): n is a, c, g, or t
  misc_feature (698)..(698): n is a, c, g, or t
  misc_feature (888)..(888): n is a, c, g, or t
  misc_feature (1082)..(1082): n is a, c, g, or t
  misc_feature (1235)..(1235): n is a, c, g, or t
  misc_feature (1258)..(1258): n is a, c, g, or t
  misc_feature (1377)..(1377): n is a, c, g, or t
  misc_feature (1379)..(1380): n is a, c, g, or t
  misc_feature (1384)..(1385): n is a, c, g, or t
  misc_feature (1396)..(1396): n is a, c, g, or t
  misc_feature (1400)..(1402): n is a, c, g, or t
  misc_feature (1481)..(1481): n is a, c, g, or t
  misc_feature (1488)..(1488): n is a, c, g, or t
  misc_feature (1490)..(1491): n is a, c, g, or t
  misc_feature (1493)..(1493): n is a, c, g, or t
  misc_feature (1495)..(1495): n is a, c, g, or t
  misc_feature (1500)..(1500): n is a, c, g, or t
  misc_feature (1502)..(1502): n is a, c, g, or t
  misc_feature (1504)..(1508): n is a, c, g, or t
  misc_feature (1510)..(1510): n is a, c, g, or t
  Probeset Number=SeqID_14234
cgtgcagatcgcgagtgagtgtcgatatgtatcgcctctantgcatcacagagtcacggatagttgtcgtctgcgcgtgtcactgactaattttggagatagtaggataanagtcgtgtgtagtagaatgagtagtgatagatgatccgtgacggacacagactcaccgctgtgacacagaccgccagcctctgtgctcgcgccccatgtaggacgacgctgacgcacactgatgagtatgtactatcgctgtgtccgcgtccntccttatatgncgatcatcgttcgtgtcagtatgtcgcacatgttgntgaacgattgtaggccttgtaggataatcgcacgctggcaccgggcgacgtaccgcacatctgtggtgagaagagatgcgagggcggttggcctcattcacatagctacgtagacgcgtaaagataggctgtgagagagactggatgtgatactgagactgntcgtaagtcatatacccgtagtagagaagtgttctgtgctcaccacactcctcccccgcgctacgcgcagacccacgcgacgcatttctgccgatgaggcaagtgcagcggacggaacacagtgtatcggaatcttctcctatatcacactctcagcggacggtgcggctggtggagggcgtcgtagctagagcattcagtctcatatctgctacatcaggacgnccgtcgagctgaccaactctcctagcttggcttttgcgttgtagaggtagatagtatttatcatatataggtggcgcgagtgtcctaagcttattataggtgatcatacattcgtgctgtaccaaccacgaccgcgcagaaacagcatcactcacacaacagcgcgaccacgaaagacataccacggcgnctgagccatgcgaggtcccacaacgttataaacgcatccacagcacgccgcgagccagaattattgtactgccctctctcatacaacctcgcctctgtgttgttagagcttcaccgcattataataattacataacatcctgcatactcctagcatttatagtcatacatcatttatggtcagcgcgctcactngcactaccaacattagatctggagtaattgagcgctccgtcgatgtagggatagagtgcatagtgacgctggggtgctacgacagctacactgcgcctctcctctctcccactcttcagcacactcgtgtgactcgtctgtcgcagtggtgtnattaggtctctctcgtttatctncacatcccacctctccctagaacgccgtggaggcgaatttaccacacttaatatatttaacaatacccggcgcgcgtcccactcccagctgtgtggagagtcatccgaatatatatatntnncccnnggggggggggnttannnagatataattataaatacactacatatatgtattcatgtatattgtacgttacttctcactctcacacatccctcaccncggtacncnntngnccccngnannnnntnaaaaaaaaaaaaaaaaaa

SEQ ID NO: 4456 - DNA, 1683 bp, Glycine max
  misc_feature (1)..(1): n is a, c, g, or t
  misc_feature (72)..(72): n is a, c, g, or t
  misc_feature (92)..(92): n is a, c, g, or t
  misc_feature (105)..(105): n is a, c, g, or t
  misc_feature (136)..(136): n is a, c, g, or t
  misc_feature (187)..(187): n is a, c, g, or t
  misc_feature (194)..(194): n is a, c, g, or t
  misc_feature (212)..(212): n is a, c, g, or t
  misc_feature (214)..(214): n is a, c, g, or t
  misc_feature (222)..(222): n is a, c, g, or t
  misc_feature (240)..(240): n is a, c, g, or t
  misc_feature (258)..(258): n is a, c, g, or t
  misc_feature (318)..(318): n is a, c, g, or t
  misc_feature (387)..(387): n is a, c, g, or t
  misc_feature (403)..(403): n is a, c, g, or t
  misc_feature (430)..(430): n is a, c, g, or t
  misc_feature (444)..(444): n is a, c, g, or t
  misc_feature (459)..(459): n is a, c, g, or t
  misc_feature (465)..(465): n is a, c, g, or t
  misc_feature (475)..(475): n is a, c, g, or t
  misc_feature (547)..(547): n is a, c, g, or t
  misc_feature (587)..(587): n is a, c, g, or t
  misc_feature (589)..(589): n is a, c, g, or t
  misc_feature (623)..(623): n is a, c, g, or t
  misc_feature (654)..(654): n is a, c, g, or t
  misc_feature (660)..(660): n is a, c, g, or t
  misc_feature (676)..(676): n is a, c, g, or t
  misc_feature (701)..(701): n is a, c, g, or t
  misc_feature (704)..(704): n is a, c, g, or t
  misc_feature (726)..(726): n is a, c, g, or t
  misc_feature (808)..(808): n is a, c, g, or t
  misc_feature (858)..(858): n is a, c, g, or t
  misc_feature (911)..(911): n is a, c, g, or t
  misc_feature (913)..(913): n is a, c, g, or t
  misc_feature (994)..(994): n is a, c, g, or t
  misc_feature (1007)..(1007): n is a, c, g, or t
  misc_feature (1050)..(1050): n is a, c, g, or t
  misc_feature (1078)..(1078): n is a, c, g, or t
  misc_feature (1080)..(1080): n is a, c, g, or t
  misc_feature (1088)..(1088): n is a, c, g, or t
  misc_feature (1115)..(1115): n is a, c, g, or t
  misc_feature (1146)..(1146): n is a, c, g, or t
  misc_feature (1224)..(1225): n is a, c, g, or t
  misc_feature (1236)..(1236): n is a, c, g, or t
  misc_feature (1302)..(1302): n is a, c, g, or t
  misc_feature (1347)..(1347): n is a, c, g, or t
  misc_feature (1376)..(1376): n is a, c, g, or t
  misc_feature (1405)..(1405): n is a, c, g, or t
  misc_feature (1434)..(1434): n is a, c, g, or t
  misc_feature (1440)..(1440): n is a, c, g, or t
  misc_feature (1449)..(1449): n is a, c, g, or t
  misc_feature (1537)..(1537): n is a, c, g, or t
  misc_feature (1540)..(1540): n is a, c, g, or t
  misc_feature (1553)..(1553): n is a, c, g, or t
  misc_feature (1577)..(1578): n is a, c, g, or t
  misc_feature (1582)..(1583): n is a, c, g, or t
  misc_feature (1594)..(1594): n is a, c, g, or t
  misc_feature (1610)..(1611): n is a, c, g, or t
  misc_feature (1624)..(1624): n is a, c, g, or t
  misc_feature (1629)..(1629): n is a, c, g, or t
  misc_feature (1648)..(1649): n is a, c, g, or t
  misc_feature (1653)..(1653): n is a, c, g, or t
  misc_feature (1656)..(1657): n is a, c, g, or t
  misc_feature (1659)..(1659): n is a, c, g, or t
  misc_feature (1663)..(1663): n is a, c, g, or t
  Peptide Sequence Number=SeqID_7496
  Probeset Number=SeqID_14235
nagagtgaggtgagagagcgttcgcactgcaaccgctgcggcgcagcaccgtctctggctgcgcaccgacanctcatatgtaccagtgcgcntagacattgagantcatacatatagagattgtttatatatatantgatatgtatagtatatagactgcgatgagagtagaattgcacgtgtgtanagatatnagtcatgcatgattcganantattgagnacatcgctcagttatgtngtagcatattctgagtcntatgggattgagctaatgactattacaggtgatgtcatgatacgagatgacgtgcaccgnggcgtctacgtctgcggcacgaccactatgtcatattgagatgagatacagacgagttatcatgcttcnctaatagacagtacantgcttggtgagtgtgtgggtactactntacacattcactcntcacatcttcatctntctacnacatactgtntctactgcagtatccagtactcatacgtgtagtgtcttgcgaatagagtcatgtagtaattcatcaagaganagtatagtcatgatacgtgtcagcgtgcgtcgcgctctcncntcttgatatacgtgtctctcatctatatgctagncgctgcgcgtcgcggagtgtcatgcgtgcgntcgcanatcagcaggagctcanaacatctcaacaactctacacaacnacnagcgtggaggagcagcggtggnagagcgcatgatctactcacagcaatatgcctactgtgtctgtatatgcgctagacacagttgatctaccatagtcacttangcctgcgcatacttggtcctggcgtagttcatgtctacgtagtgcgaganggcctacgtacatcgcatacagtgtcgttcctccgcatcctgagatatgatananctcagtggtgtgttgttgttttgtggtaggatctatcctatccttacacaggcacattacatcagcacgcgcacactcatncaatatagcgtantggcctcgcagcgccgttgtcgctcatctcattcatgtgctgngctctgggcagcgctactggggcgatcncntcacgtgnatatcacatcgcgagcgcctctccgcnttaatctatcctctcactatcttatatctangtaattgctagtacttactaaaatcagatgacaggtgtagcttgagagatgctagtcgtatgaggtaggacgacacanngcaggatgatnagtatgtcatctatcctgttatacactgccgttgtgcattgctatacatctctcgtcagtctagtntatatcgtggtgtcgctgtgctttttatgtgtagatacattttgntatatgcttctcgtcgcgtcggctctccntgctcgagcgcttactctgtcgtcctacngccatgagcccctatctggtccgtcgcgngggcgngctccttcnctcatcctgcctgatatgattgtgttaatggttgttgtggatttgattataccaacaacaatctcctcagtttcttgtctgcttgggngtnggcgtatcactcnattgtgcgcgctgcgggggtggtnngttnnggtgctatcgncctgcgaggaggaganngggccggtgaagnacganacagacagaggcagaaagnnaagnaannanaaanaagagcaccacacacacaac

SEQ ID NO: 4457 - DNA, 1112 bp, Glycine max
  misc_feature (1112)..(1112): n is a, c, g, or t
  Probeset Number=SeqID_14236
atcgattagttcgctacgtctctcactatctctctcaccgcgaaaatgtcgaccggtttaatcggaagattagtcagaaccaaaccgtcgcgattaaccaccgcagcaaggttgatcccatcgcgattcacagcctccgtaaccgaaccggaatcaaaatctccgtcaggcggcggcggcggaaaagcatcgaacttcaaaacattccagatctaccgatggaaccccgacaaccccagcaagcccgagctccaagactacaagatcgacctcaaagactgcggccccatggttctcgacgctctgatcaaaatcaaaaacgagatggatccctctctcaccttccgccgctcctgccgcgaagggatctgcggctcgtgcgcgatgaacatcgacgggtgcaacgggctcgcgtgtctgacgaagatcgaggagggagccaaggagacgacgatcactcccttgcctcacatgttcgtgatcaaggatctggtggtggacatgactaacttttataatcagtacaagagtattgagccgtggctgaagaggaagaatccagcttctgagcctgggaaggagattctgcagagtaagaaggatagggcgaagcttgatgggatgtatgagtgtattctctgtgcttgttgtagcacttcttgtcctagttattggtggaaccctgagtcttaccttggtcctgccgctttgctacacgccaacaggtggataagcgacagtcgtgatgagtacactaaggaaaggcttgaggctattgacgatgagttcaagctttaccgttgtcatacgatcttgaactgtgctcgtgcgtgtcctaagggtttgaacccgggcaagcagatcgcgcacatcaagcaacttcagcgttgaagtattattgtgcggtcacagttaatgtttgaagctaataaatcttcacgaagtctttgattttggatttattcttgtattttgttgttgccgattattagcacctgtgaaagaaactattttggcaagttttccaaagttgatgagctttgtggttgaatcttgctgaaaaaaataatctctcttttaagtaataaaactgaagaacttaaatttcatcn

SEQ ID NO: 4458 - DNA, 1635 bp, Glycine max
  misc_feature (101)..(101): n is a, c, g, or t
  misc_feature (373)..(373): n is a, c, g, or t
  misc_feature (449)..(449): n is a, c, g, or t
  misc_feature (472)..(472): n is a, c, g, or t
  misc_feature (594)..(594): n is a, c, g, or t
  misc_feature (596)..(596): n is a, c, g, or t
  misc_feature (690)..(690): n is a, c, g, or t
  misc_feature (697)..(697): n is a, c, g, or t
  misc_feature (705)..(705): n is a, c, g, or t
  misc_feature (732)..(732): n is a, c, g, or t
  misc_feature (742)..(742): n is a, c, g, or t
  misc_feature (914)..(914): n is a, c, g, or t
  misc_feature (955)..(955): n is a, c, g, or t
  misc_feature (982)..(982): n is a, c, g, or t
  misc_feature (1009)..(1009): n is a, c, g, or t
  misc_feature (1011)..(1011): n is a, c, g, or t
  misc_feature (1015)..(1015): n is a, c, g, or t
  misc_feature (1021)..(1021): n is a, c, g, or t
  misc_feature (1023)..(1023): n is a, c, g, or t
  misc_feature (1028)..(1028): n is a, c, g, or t
  misc_feature (1057)..(1057): n is a, c, g, or t
  misc_feature (1116)..(1116): n is a, c, g, or t
  misc_feature (1271)..(1272): n is a, c, g, or t
  misc_feature (1278)..(1278): n is a, c, g, or t
  misc_feature (1285)..(1285): n is a, c, g, or t
  misc_feature (1290)..(1291): n is a, c, g, or t
  misc_feature (1295)..(1295): n is a, c, g, or t
  misc_feature (1297)..(1300): n is a, c, g, or t
  misc_feature (1303)..(1303): n is a, c, g, or t
  misc_feature (1306)..(1306): n is a, c, g, or t
  misc_feature (1339)..(1339): n is a, c, g, or t
  misc_feature (1365)..(1365): n is a, c, g, or t
  misc_feature (1372)..(1372): n is a, c, g, or t
  misc_feature (1389)..(1389): n is a, c, g, or t
  misc_feature (1395)..(1395): n is a, c, g, or t
  misc_feature (1433)..(1433): n is a, c, g, or t
  misc_feature (1453)..(1454): n is a, c, g, or t
  misc_feature (1469)..(1469): n is a, c, g, or t
  misc_feature (1484)..(1484): n is a, c, g, or t
  misc_feature (1509)..(1509): n is a, c, g, or t
  misc_feature (1526)..(1527): n is a, c, g, or t
  misc_feature (1533)..(1533): n is a, c, g, or t
  misc_feature (1539)..(1539): n is a, c, g, or t
  misc_feature (1542)..(1542): n is a, c, g, or t
  misc_feature (1545)..(1545): n is a, c, g, or t
  misc_feature (1583)..(1583): n is a, c, g, or t
  misc_feature (1608)..(1608): n is a, c, g, or t
  misc_feature (1614)..(1614): n is a, c, g, or t
  Peptide Sequence Number=SeqID_7497
  Probeset Number=SeqID_14237
cacacacatacacacacacacagcagacatcagccgcacggcccacacgcatgagaaactcgtacttcgctacgactgctctaacatctcgatctgagatnagtatgtcatcatcatagtttatatataggcagctaccagatattggattgtagagaacgtagatcgtatcgggacgtagtcaacatcactcggagctcatcgcgtgatctgacgagtgagaggatacatatcaataggcaactagtagcgctcgcacttacatcgtataatatacaaacatattcacacttaccccgtcattgtacatcctttagactatcgatcatacgtcggcacgaacacggacatcgctcattgcagcgcgcagcgnggtgagtgagcatagtcacacgtcataagcatagcacacgcagcggatgcatcaggtgtgtgactataatcttgangcatacatcactgttatagtaantgtcgactacacagactatatacgtatatgactacatcattgtccatgagttatatcaacagcaagagagagcaagagaatcgaatagaacgatgagagatgaacagaagagcaagacgcgntnatatctgctctaacacatcacacgaggtgtggtgtgcgccagcgtcggtttttatccttgttctcatctctgtcgcggtagtgttgtatgactntttcttntctatatntcttttcgttgtgtgtcctccaccacncgctcatctnatcgtcataatctaatatgaacatgcatacatgtagtaatggagccgccacaccccagctctgtggtatggtatgtgattattatatatagtgatatagtgtgttggtgctcttgttatgagaattaatagatgttgttctgatatatatagaatatactatatacacaatnaacactaacttataaacatgttggtagatgttggtgggggngggagatgatgagtcgagcagcgtctngtcatcctcttctcatatcactttgtngnatgntgtgtntnttctnctcatattctctctattctctctaagtantctatattatctctacttcttatctttgtagtatactagtctatgattatatctgtctntttattatcattcaataatatatatttactatcttcctcccttcttcgcgcgatcctagtataagagagtgacgtatcatgtatgccagcacgtagaacagcgcgctggcgtgtgttggggacgacaaccaagtgcggacacgtgcaatcgcgcnncactcncctccantagtnntatnannnntantancatatgcgtcgttgggtacgacatgcgtacgcncagcgatgttgcgctgtgtgtgggtngggtgtnagtgagtggggtagagncagtgntcatatcacgtgagatgagctagcatctagaatatacnacacataaaataataagaanngcatacaacattacnctcgttatatattantgtagatgaataaggagtaacgcancgcccacagtgtggtgnnaatgtntggaantangangaagagagcaataggaggggtgagagtgggtggagtgncgctgctcacatactcaattcttanttattnaggggtgtgggtgcatccacc

SEQ ID NO: 4459 - DNA, 977 bp, Glycine max
  misc_feature (977)..(977): n is a, c, g, or t
  Probeset Number=SeqID_14238
aattagaataaatcccgtgttttttttcttcgcccctacagaacccatgtcgattaggttttctaaattgctcttccatcttcttccttagagtaggaaatgttaccagttaccaaattatcatcttaaaccctccattactctctcacacatgatctatattcaatgtgatttctggatctgaggcggtggagattcatctataaaaagatccgaaaatcagtctgaaaatgggcaaatacatgaagaaatcgaagattaccaacaacgatacggagcccaccgagccaactttcctgggagttcgcaccagggacgctaaaaccctagctctgaagcggctcaattcctccgcctctgattccgctctagctggagactcttcttgctaccttcagctccacagccgccgcctcgagaaacccccggcgctgacggagccgaaacagccaccgagaattaaggagcctggctcgaagggtcgggttagctccggtttgggttcggttcatgtagctcagagctgtaacggagatgattggtttgggaagtctgaagcttttttgtggagagaacagtcctgattttcaatcgatacaaagtgaaagtactgtggtgtggcgtcatgttcatgggacctagctaagctgttgagaagaactacgagctacctgatgggcaagtgataacaattggttctgagctgttccattgtcctgaggaccaaggttatttaccagccatctatgattcatatggagaatactggtatccatgaaacaactttaactccttaatgaagtgtgatgtagacatcagaaaggatgtgtacggtataacatcgtgaccagtggtggaagcacattttctctgagatcgctaacaatttgagctaagatatcacgtcttggtctacaagcagcatgaagatcatagttgctactcctcctgagagaaataccctgtcttgattagan

SEQ ID NO: 4460 - DNA, 382 bp, Glycine max
  Peptide Sequence Number=SeqID_7498
  Probeset Number=SeqID_14239
aatgcggcacgaggaaaacaatggctgtgccaacaatgtgctttgcattgctttcattatcactttaacgtgggcagttgaagctcgaattccggggatttactctggtggtgcatggcaaagtgctcacaccaccttctacagaggatccaacacttccagcaccatagggggagcatgtagatatagaaacctgtacagccaggggtacagtataaacacgactacattgagcacggcactcttcaacaacaaacttaactacgatacctattggaagataaattgcgcgggcgagaagcggagtaccactccggagtgctgccattttcatgaccgcggccaactttgcccgtccaactgtggtgttgctaacaacaat

SEQ ID NO: 4461 - DNA, 846 bp, Glycine max; identical to SEQ ID NO: 1451
  misc_feature (577)..(577): n is a, c, g, or t
  misc_feature (589)..(589): n is a, c, g, or t
  misc_feature (600)..(600): n is a, c, g, or t
  misc_feature (609)..(609): n is a, c, g, or t
  misc_feature (624)..(624): n is a, c, g, or t
  misc_feature (638)..(638): n is a, c, g, or t
  misc_feature (653)..(653): n is a, c, g, or t
  misc_feature (679)..(680): n is a, c, g, or t
  misc_feature (723)..(724): n is a, c, g, or t
  misc_feature (732)..(732): n is a, c, g, or t
  misc_feature (846)..(846): n is a, c, g, or t
  Peptide Sequence Number=SeqID_7499
  Peptide Sequence Number=SeqID_7499
  Probeset Number=SeqID_11230
  Probeset Number=SeqID_14240

SEQ ID NO: 4462 - DNA, 383 bp, Glycine max
  Peptide Sequence Number=SeqID_7500
  Probeset Number=SeqID_14241
catccactcttctcaacatggagtcatccaaactctcatctctttctctctgtttcattctcatttgcattatcttctttccccaacaatccttctcatgtggctcctgcaaccacaggaagggtggaaaaccctccattaaaccccctgtaactgttcccaagctacccgttcctccagtgactgttcccaagctacccgttcctccagtgactgtccctaagcttccagttcctccggtgacagttccgaagctacctgttcctccagtgaccgtacctaagcttccagttcctccggtgacagtcccaaagctacctgtacctccagtgaccgtcccagaactaccacttcctccggtaggagggctacccatacctccg

SEQ ID NO: 4463 - DNA, 485 bp, Glycine max
  misc_feature (472)..(472): n is a, c, g, or t
  Probeset Number=SeqID_14242
atcaaacaaactaacaaacaaactctccgatctgcgatatcacaatggcagtttcatcgcgcgaggactacgtatacatggccaagctctccgagcaagccgagaggtacgaagagatggtcgaattcatggagaagctctccgccgccgcagacggcaccgagctcaccgtcgaggagcgcaacctcctctccgtcgcgtacaaaaacgtgatcggcgcccgccgcgcttcgtggcggatcatctcctcgatcgagcagaaggaagagagccgcggcaacgaggaccgcgtcaagacgatccgcgactacaaggcgaagatcgagtcggagctagcggggatctgcgacgggatcctgaagctgctcgagtctgcgctcgtcccttccgccgcttccgaggattccaaggtcttctacctcaagatgaaaggcgattactataggtacttggctgagttcaagatcggtanggagagagatgac

SEQ ID NO: 4464 - DNA, 508 bp, Glycine max
  Peptide Sequence Number=SeqID_7501
  Probeset Number=SeqID_14243
cagaatcagaacggcagccggcgccaaatgtggcatcagggcttccatagccggtgagcaacaaacttcccagacgaaggcggctcgccgcagaagcggcaccagaggaagaccaccagcgctggctcaggcatacgagaccagagacaagcccatggcatcacacgcagagccagcagaagaaggggccacccagaacgcaagaagaaaaacaacgggggacaaaagacgagcacagccacatgcagacacaggtgggaagggcctattcacaaaagaaaaagacgaggcacgcataaacggggaacaagacaacgctggccacgcaacgaaagaaggcgccacgcacccaccggaaaaaacaatgccaccacgcaacccgcccacgcgaaggacggaagagacagcagggaagaccggcgcggaggaggcaccggggggaccacccgccggaaacaccgcagccacagcaacaaccgaccggcaaggcacacaacacgcacagaga

SEQ ID NO: 4465 - DNA, 549 bp, Glycine max
  misc_feature (449)..(450): n is a, c, g, or t
  misc_feature (508)..(508): n is a, c, g, or t
  Peptide Sequence Number=SeqID_7502
  Probeset Number=SeqID_14244
ttcggcctgataagaatccgtattacgaaccgcctactgcccgcgcggtttaaaactttcgcgactggagaaaaccatgtcgttacccaactaaaatcgcgtttgaaaaaaaactccccttttcccccaggctgctcgtaatttaaaaataggaccccccccccagtttgccctttcccatatagttgccccacccctcgaattgccccacagggggaattggcaacggcgataaacaaattttgcatcaaaatctctcgtcaaaaattttttcgatgaagttcaacgcgtcatttttttccaccccaaacattggggggaagtgtggccctaactcccccccatgaaaagggaaacaaaactacaacccgggattaaggccatgaaccggttgccccccctctttggccacaaacacgttcactttattaaaacaacgggggcccccnnaaagggaaacaaagctccgaaaaaaagccttttttattcggggtcaacaagcccccgngtcagggaaagcagaacacccagaaataattatttttgaaa

SEQ ID NO: 4466 - DNA, 1608 bp, Glycine max
  misc_feature (40)..(40): n is a, c, g, or t
  misc_feature (54)..(54): n is a, c, g, or t
  misc_feature (79)..(79): n is a, c, g, or t
  misc_feature (128)..(130): n is a, c, g, or t
  misc_feature (223)..(223): n is a, c, g, or t
  misc_feature (226)..(226): n is a, c, g, or t
  misc_feature (262)..(262): n is a, c, g, or t
  misc_feature (303)..(303): n is a, c, g, or t
  misc_feature (450)..(450): n is a, c, g, or t
  misc_feature (619)..(619): n is a, c, g, or t
  misc_feature (674)..(674): n is a, c, g, or t
  misc_feature (751)..(751): n is a, c, g, or t
  misc_feature (795)..(795): n is a, c, g, or t
  misc_feature (822)..(822): n is a, c, g, or t
  misc_feature (825)..(825): n is a, c, g, or t
  misc_feature (827)..(827): n is a, c, g, or t
  misc_feature (849)..(849): n is a, c, g, or t
  misc_feature (1146)..(1146): n is a, c, g, or t
  misc_feature (1444)..(1444): n is a, c, g, or t
  misc_feature (1453)..(1453): n is a, c, g, or t
  misc_feature (1495)..(1495): n is a, c, g, or t
  misc_feature (1528)..(1528): n is a, c, g, or t
  misc_feature (1531)..(1531): n is a, c, g, or t
  misc_feature (1608)..(1608): n is a, c, g, or t
  Probeset Number=SeqID_14245
tgcgggcgggcgtgtgctgcgtgtggttgcgggctgtggnttcgctctctcgtnttctcggttcctctgtggtttcatncgcggcgatctgacgtatgctgtgctccatcatatatattaaaataaannntaaaaaagaaagacacacacaatcaacacaacacaaggatacacagagactagagatactaccagacgacagcgcatgacgagattgtgcctncgnatcctctctacctgcgctatactctagagaagacgntgagagaagcgagagcatgtagatagtgaaggtgcggcagncaggaaggagacgagagaacaggtatagtcagatgtatgagtgatcctatacgcacacccatagaacacgctttattactatcttctatattatcataagacatactactcgaagcgacagagaggaacgaaatacggcgttgaggncacatgagaggagtaggagagcgaagcacgctaattagaggcgctggcgtgatacgcggcaggactactccccacgcatctatctttcgcaccaagcgtataattgagctgcgacgtatctactgatgatgagaggagagaatcgctgcgagtctcatccgatcatgtntcatctccacgctgtctcggagaggaggaggtgtgtatgtctcacgtacgtaacngtagtgatatgtcgccggcgcgcagcgttctgactacgccgcctgcgtccgttcttactgtggattattagggtgcnggcgcggcgtggcgagcgagcagttacgacgcgagcaccgcagngcaccgacgcgacacgagtgaagagangangnacggtgatatagcggagacgcngtccgtcaacggtatactgctatatactttatacaacgatcactcatatcacgagtagtctaattatatcattaaatgtatgtatctagaagaatagaggagaccgcataatagatacatacgtacgataacatatcactgcgccgcacgcatggagcgcgacgctgtctgcgatatcaccgccgcgcctgtatcgtgtgttcgacgggctcatagatctactagtagtataccaccgcaggaaagagagactatctcttcgcatacacttcacatagagaagttcaagagaggcgncgtaagaatgtggggcagcgcagtacagcgatgacgtgcataagaatgaggtcgagtgacgtgtggagacacacgacgcgcgacggcgtgctagaatatatataccaggagagatataattgcgcgcggtagacgggaccagtagaggtggagcggagaggacacgaaacacaggaataatacagaaggataagacggcgactaactgcgcttagtgtaagagagagtagacagtactctatatacataacgaaactgatctacagaccatagtagttgatccgtacatggatacggngagtgcgancgcgatctgacgcgaagagtgctgtgatgcagagacgcgcancgatcacagtccatgcagatgagtacgcactanacnacgcaccacgtgtcacgctatgctagacacactcatacagtatcgataggcgatagaggactcgcacgcgcctctcn

SEQ ID NO: 4467 - DNA, 1400 bp, Glycine max
  misc_feature (19)..(20): n is a, c, g, or t
  misc_feature (22)..(22): n is a, c, g, or t
  misc_feature (28)..(31): n is a, c, g, or t
  misc_feature (36)..(42): n is a, c, g, or t
  misc_feature (45)..(45): n is a, c, g, or t
  misc_feature (61)..(61): n is a, c, g, or t
  misc_feature (77)..(78): n is a, c, g, or t
  misc_feature (81)..(81): n is a, c, g, or t
  misc_feature (87)..(88): n is a, c, g, or t
  misc_feature (102)..(102): n is a, c, g, or t
  misc_feature (108)..(108): n is a, c, g, or t
  misc_feature (116)..(116): n is a, c, g, or t
  misc_feature (207)..(207): n is a, c, g, or t
  misc_feature (209)..(209): n is a, c, g, or t
  misc_feature (253)..(253): n is a, c, g, or t
  misc_feature (516)..(516): n is a, c, g, or t
  misc_feature (557)..(557): n is a, c, g, or t
  misc_feature (576)..(576): n is a, c, g, or t
  misc_feature (593)..(593): n is a, c, g, or t
  misc_feature (741)..(741): n is a, c, g, or t
  misc_feature (743)..(744): n is a, c, g, or t
  misc_feature (935)..(935): n is a, c, g, or t
  misc_feature (1031)..(1031): n is a, c, g, or t
  misc_feature (1088)..(1088): n is a, c, g, or t
  misc_feature (1334)..(1334): n is a, c, g, or t
  misc_feature (1347)..(1347): n is a, c, g, or t
  Peptide Sequence Number=SeqID_7503
  Probeset Number=SeqID_14246
ttggggggcttgcctcccnngntgcttnnnncatgnnnnnnncanccacgcatacatttancaaaaaagaaaaaaannttnaacaanncccgaaaacagtgngtatgnatatcacntaaccttattatttattgtggccaagctataaaaaaatacgacacctaactatctttatttttagcctccctcctaccaactatagattananatatatgtacacacttctcagaaagaactaaataacaattaaanccaacgacaaaaataacatacataaaatatataataactatcagattattaccaacttacgagaaacaaggaaaaatcactaattaatttattatgatgtagataatactactttctcccccacgcgcgaataaccactgtatctctattaatggtagatgatgccatttcttcctatgtgccccctacttcacttgttctattgaaggaaagtaagaaaatactatatctcattttaaaagtgttagaaccattataatatncatctaatagttatatgtagctcatattgtgggatgtatanaaaaaataattggtggtgncgggatcataactgaantcatagaccactctcacactgccttagctctaacagccataccaattatttaatttactgagattagcattactaattctctcatacggacgactatataaatctagaatttatatgttatgtttaggagtaagacaccccgccaaanannaaaaaaacacaaccaacccaacaactccacgtaatgccttgttcattgttagtatttgtatgagttgtatatattgccctcactcaccgtatgtgtgtatgttgaatatgcactgacatataacatttcatgtatatatcacaccacatgatatagaacactcctcagcacagtccattacatcgatttanctattgactgttctcctcctgcgcactgtccctcgcctactacacatcactttaccaataccatgtcacgactcattgcgttatccaagcctgatnccctgtgcatcttctgtgtatacatgcatattattttgctctgactattaacataancttagacagttagtggagcacatagcatgtcaacgtcagtgtggacatcatttgtctatatatactcaacaaacacattcaccacaaacgacacatcataatgtcacacgttcagtctgccgtactctgcttcgttgagcactgactcgatacacgctccacgacacatctcacacgctatgcatcctgtgatgtctatcttgattatctctcctctcacccttctctctaccctaacctcatacnctatccaaaaccnagatgatgtatatgtttgacattcatatgtattgtgttcttgttgtctgtcta

SEQ ID NO: 4468 - DNA, 1613 bp, Glycine max
  misc_feature (1)..(1): n is a, c, g, or t
  misc_feature (103)..(103): n is a, c, g, or t
  misc_feature (105)..(105): n is a, c, g, or t
  misc_feature (109)..(109): n is a, c, g, or t
  misc_feature (133)..(133): n is a, c, g, or t
  misc_feature (212)..(212): n is a, c, g, or t
  misc_feature (228)..(228): n is a, c, g, or t
  misc_feature (233)..(233): n is a, c, g, or t
  misc_feature (251)..(251): n is a, c, g, or t
  misc_feature (320)..(320): n is a, c, g, or t
  misc_feature (407)..(407): n is a, c, g, or t
  misc_feature (457)..(457): n is a, c, g, or t
  misc_feature (539)..(539): n is a, c, g, or t
  misc_feature (548)..(549): n is a, c, g, or t
  misc_feature (638)..(638): n is a, c, g, or t
  misc_feature (780)..(780): n is a, c, g, or t
  misc_feature (844)..(844): n is a, c, g, or t
  misc_feature (863)..(863): n is a, c, g, or t
  misc_feature (900)..(900): n is a, c, g, or t
  misc_feature (941)..(941): n is a, c, g, or t
  misc_feature (952)..(952): n is a, c, g, or t
  misc_feature (989)..(989): n is a, c, g, or t
  misc_feature (1108)..(1108): n is a, c, g, or t
  misc_feature (1112)..(1112): n is a, c, g, or t
  misc_feature (1124)..(1124): n is a, c, g, or t
  misc_feature (1179)..(1179): n is a, c, g, or t
  misc_feature (1209)..(1209): n is a, c, g, or t
  misc_feature (1211)..(1211): n is a, c, g, or t
  misc_feature (1326)..(1326): n is a, c, g, or t
  misc_feature (1359)..(1359): n is a, c, g, or t
  misc_feature (1375)..(1375): n is a, c, g, or t
  misc_feature (1381)..(1381): n is a, c, g, or t
  misc_feature (1454)..(1454): n is a, c, g, or t
  Probeset Number=SeqID_14247
ntagtgtcgtatgggtcgtctagtgtaatatctgcagcatacgacacacgcatatctcctacgtctgtaatcacctgtatatgtatagtgttgataagggtancngtangcggaggcgaggcagacgagatgnagatagagtatcgactagagaccgcgaagagaccacgtggattcctcgaacgactccagacatatcttattggtgtgantcgctttgcgtggcantggangatgttgcgtatgtgtgnagttcacaatagtcagagcatctgatacattatggtggagagaatctcatactttacgatgtctactgntggatcgtgggggatttagtagctcgcgataatgcgtcatcatcagcggatgatgtgcgtcgataatgtagccatgctactctcacntcctcccggcacggtctatcagagagtcatagataaacatattactctantaatgagtatcattgtctgtacacttgtgttacatactttatgacggtcgaatatcgcagatgggacaccggcgtagcacgncctccactnnacaactcagtcatgtcttgtgagcacggctcatgatgacaacatgatataacctctcatatcccgctttatattatgccattcatgagngcagatagtggggggggggtgcactcatctaataccacctatataatcctgaatatgcttctctactgggtgttgttgccctggtgcacgcgcacgaccaagacccaatcgccactcgcgtgcgccgctaaagcacctaaantctcctcacatacacgtgttaggcgggttcgcttcgctcacgcacgagattataagatgagagntgtgacacgactccgatcncgcccacgctcacaaaccacgccacgcgcgctaccgnatctagcttgcgcattcacgacggtgtcgtacacgctacangtcgcgggttnatatgcatagaatgggagcgccgctgcgggcactganctaccggcgaggagcaggataagcactacaacaacactaagggataggcaagctgccacacgcgctaacagcctaccgtagcaaagaatcacacagcttcaccagacaccagcacaagngctnactgtggctgcngccgactggcagaccacacgcgacgcgccgcagcagtctaagaagggtactcgcntgaaggtatatgtaatgagtgcactagtgntnctcagtgcgcgtgtagtgaccgtcgttatctagatgtacacatgcgccctctagctatggtcgagttcagtgtcgagtatgagacacgagagacagacgaagactatgatgactnctgattattgtcagttgagaatgataagcaganatatacacagagatantgactntagtctcatttccttgtcgtcactgtgcgcgcgagtaggccgtatccttcgatctatatgagagtatgagtgngtgcgcgggccatctatctctaatgttagagagtggttaactctagctctctagttattaggttagtatggtgaggttgtgagacattgcactcagatggtgacgagcggtagcggactggtgagggcgaggagagcgagtgcgagtgcgtagctaatc

SEQ ID NO: 4469 - DNA, 1392 bp, Glycine max
  misc_feature (1)..(1): n is a, c, g, or t
  Peptide Sequence Number=SeqID_7504
  Probeset Number=SeqID_14248
nataagaaccgccctccttcacatacgcgcgtctcactgttcagtgattcatacggaatgatgtagatcccatatatggcgttatatgagtgttggacttcacccggacatatatgtggtagtgatgagtcgcacgctgccagtcggttaagattataccgcgctaagtgcgcggtgtatacctctcatttacacgacgggtctgtcgtcgttattcgagagacgatattgggcagctcttctgcggagcgaccccaccctatcgcgcctgttagagacgggagtacacttgagataacttgatttacgagatccgccagtcgagaccgccacgaacatgagaaggtgtgctctcccacgcgtagtatgttcttacccgcccttgtccgatatctcatctagacagtgcccagacaggttatatatttctcagcgagaagctcagaacgcgcagtaatgtctatacacagcgcactctctctaacgtacattcgcttcctccacgagcgagatagaaatatccacatccgcgacgcgaggagacctacgacgtgtcggcctcgcctctatcgactcttctggccgaggaaggatattcgataccaaagcacatctaatattatcccgcacagcactgggacctcttccgagggccgccgtcattctttttagccgtcaccaaaagagtaattggcgaggcgcgacccctgtcctcgccgcagtttcgcgagctgcgttcatatcacaaacgttcccccgcccaccatccttgtatgggatccttcgcccactaagattaacctcacttggccctcaactcctaaccagaccataagttctgggtggaagagatgtcagttggataatcggaccttcgtccgtgccccacagccacccaagcagactcagttccgccattttttgacccatctctgtatgcgacgcgctttccaggaggggacatcttcaccgccttccgttcgtagttcctacgatcgtgctgtgtatcgtcgatccttaggcccctgccccagacgctgtcgtaccgcacggagctcacatcggcttgcccggcatctgcctccttttacgacgcctgaatcgttcgcccccgctaactccagactagcgtcgatagtgatccttccactaccttatctgatgcggagtacagagtacgtgaggggaaagatactacccgctgcgcggactttttatgaaataggtatgttgctaaggtaaagagttctagatggcgaattctctgccaggccccggggagatcccaactagttgatagaagccggcccgcacacgcgacggtggagctgcccagatattacctaaacgcagccgcgggcgctggccgacagcatcgacccctaatagtaa

SEQ ID NO: 4470 - DNA, 817 bp, Glycine max
  Probeset Number=SeqID_14249
aaaaagcttaaactaaaacccccaagaaacggagatgggtttggtcacagaggaggtgagagctaaggcagagatgtacacgggagatgagatatgccgggagaagacaaaatgcttcctcaaggaaatatctatgcccaatggcttactacctttgaaggacatagaagaggctgggtatgacagagagtcaggtgttgtgtggctgaagcagaaacagagcatcacccacaagttcgaaaatatcgataagctcgtctcctatggaaccgaggtcactgccgtggtcaaaaccgggaagatcaagaagctcactggtgtcaaggccaaggagcttcttatttgggtcagtgtcagtgagatctatacagaggagaaagagaagatcacctttaagtcaccaaccacactgtccaggactttccctgtctcagcttttattgtcccagaggaagtggaaccagccaaggaagagcctgctaaggagaagagcagtgaagccaccgaggaggtcaccgaggaagaacctgccaaggaggctgccaaggttgaacctgccaaagaggctgttgccgtcaaggaggcctaaccaagcttatcactgcttctatagtaaaaagagaccaaaatcttttgaagtgtgcttcaacaatttaaaccgacctttgagagttagtgcttctcactgctcttactctcatctattacctaccactcgttgctgcttatttttacctgtaataagatgtcaacatcatcctgttcttacaagtattaccgtataattatttataaactacactgaagttggttctgt

SEQ ID NO: 4471 - DNA, 1957 bp, Glycine max
  misc_feature (22)..(22): n is a, c, g, or t
  misc_feature (37)..(37): n is a, c, g, or t
  misc_feature (39)..(39): n is a, c, g, or t
  misc_feature (51)..(51): n is a, c, g, or t
  misc_feature (54)..(54): n is a, c, g, or t
  misc_feature (56)..(57): n is a, c, g, or t
  misc_feature (67)..(70): n is a, c, g, or t
  misc_feature (84)..(84): n is a, c, g, or t
  misc_feature (88)..(89): n is a, c, g, or t
  misc_feature (116)..(116): n is a, c, g, or t
  misc_feature (129)..(129): n is a, c, g, or t
  misc_feature (134)..(134): n is a, c, g, or t
  misc_feature (182)..(184): n is a, c, g, or t
  misc_feature (195)..(195): n is a, c, g, or t
  misc_feature (218)..(219): n is a, c, g, or t
  misc_feature (221)..(221): n is a, c, g, or t
  misc_feature (542)..(542): n is a, c, g, or t
  misc_feature (668)..(668): n is a, c, g, or t
  misc_feature (722)..(723): n is a, c, g, or t
  misc_feature (728)..(728): n is a, c, g, or t
  misc_feature (736)..(736): n is a, c, g, or t
  misc_feature (738)..(738): n is a, c, g, or t
  misc_feature (740)..(740): n is a, c, g, or t
  misc_feature (742)..(742): n is a, c, g, or t
  misc_feature (751)..(751): n is a, c, g, or t
  misc_feature (759)..(759): n is a, c, g, or t
  misc_feature (771)..(771): n is a, c, g, or t
  misc_feature (807)..(807): n is a, c, g, or t
  misc_feature (809)..(809): n is a, c, g, or t
  misc_feature (929)..(929): n is a, c, g, or t
  misc_feature (1039)..(1039): n is a, c, g, or t
  misc_feature (1105)..(1105): n is a, c, g, or t
  misc_feature (1120)..(1120): n is a, c, g, or t
  misc_feature (1129)..(1129): n is a, c, g, or t
  misc_feature (1162)..(1162): n is a, c, g, or t
  misc_feature (1164)..(1164): n is a, c, g, or t
  misc_feature (1180)..(1180): n is a, c, g, or t
  misc_feature (1203)..(1203): n is a, c, g, or t
  misc_feature (1262)..(1262): n is a, c, g, or t
  misc_feature (1290)..(1290): n is a, c, g, or t
  misc_feature (1472)..(1472): n is a, c, g, or t
  misc_feature (1545)..(1545): n is a, c, g, or t
  misc_feature (1561)..(1561): n is a, c, g, or t
  misc_feature (1568)..(1568): n is a, c, g, or t
  misc_feature (1599)..(1599): n is a, c, g, or t
  misc_feature (1604)..(1604): n is a, c, g, or t
  misc_feature (1643)..(1643): n is a, c, g, or t
  misc_feature (1650)..(1650): n is a, c, g, or t
  misc_feature (1771)..(1771): n is a, c, g, or t
  misc_feature (1932)..(1932): n is a, c, g, or t
  misc_feature (1957)..(1957): n is a, c, g, or t
  Peptide Sequence Number=SeqID_7505
  Probeset Number=SeqID_14250
ttgggggtccgcctctctctcnccttctctcctcctncnctcttccctccnggngnngaatacggannnnatgtgtcttttgtnacannaccccgtgtgacgtgtaccgatcacanacatcgcaagcancaagngatataagtgaactagagaggagtacaagaagaggaacacaccacacnnnaaccatagaanaaactagataggagaaaaaaaannanagcagaaggggacaagagagtgagtggctcatccttctcgcaccctagtccgcaactccttgtgctcactctctctctctactcatccatcatcctctctaccaaactatagtttatagtcatgacgctttcactcttctactatatacacacccactctcgctccgaccaccactcacactcacgcctcacttgagggacgcagacagctcatgactcgcacgcgccatagagaaatacactactaccacatcatcaatcaaacccatactctttattataccacttatttatttcctcttctccatctcgcactctctntcctatcggcgcactagatacacacagatacaaatacaccacatatttctacgtcactctcgcctctatatatatattcactcagtatacagagcagatagacgcctcgcaatcctcgcgcaagtncgcgcgctgctcgcctatgtacgtggttcactacactgacgcacgtacctcggnnagggntcggatgngnangngacggagcnggtccgangcaccacacccncctcttctacctctcatctacgctctctattatatntncacctatacctactatatatcttcatttactacacacatagataatgagggcgtacaacagtaaagtctctctgatacgcacgcgacgagcgacttgcaatggtgtctgcgaagcgacanatacgatctcatctacatgacatatatctttatatatattgatgagcacgacgagcgctcacatattagtaatatagtatatatgtataatacacacactcactgctgcngcactgcactcgagtatcactaccgcgacgtctcccgcttgttcgatctcgctgctctgcgtctgnctgctcgttgtgcgngtactcacngactcccccaccccccacactcaacacgactantnatgcactctcctcgcngctcgcactaccttcgcttcccncacgactgcacctctctctctctactctaccacacgtcactctatcttactcacacatngccctcaccagctactctccactgctgntatactctcctctctctcaggatatacatcctgcgcctctacgccgcgatcaccatctactcactgtcactcgtctctatactcatactcgcctatacaccgcatacatcatacgcagactatctatacatcaactgccctgatccactctcgcgtgtcccatcctcacacctctgtgcggnacatctcgcagcatctcgctctcacactctctcgctcactcttaacatactcgtcacgtacaccgctctacanaatcatgcgccaccangattcancaaggactcacagcgacgactacaccaggancgcgnctatatagatgacatagaacaactctacaactactaacnagagatnagatatacatttacgtcacagacgactcactactccacactacactaccgactgtcagagcattgcgtcatgctaaagctactcacgcacgctaggctacgactccaatatattgcgccgncactcatctcatatcgcacactgctctacgtctcgcgtctctcatacccacgctgatgtatatcgtccatcattctctggtcataacgttactgtctcgtctactcactgctctgtctgtccctattacttctcctcattcaatcgctcactatcctatantatactaccatcgcatactctctcn

SEQ ID NO: 4472 - DNA, 1554 bp, Glycine max
  misc_feature (33)..(33): n is a, c, g, or t
  misc_feature (79)..(79): n is a, c, g, or t
  misc_feature (160)..(160): n is a, c, g, or t
  misc_feature (213)..(213): n is a, c, g, or t
  misc_feature (406)..(406): n is a, c, g, or t
  misc_feature (471)..(471): n is a, c, g, or t
  misc_feature (672)..(672): n is a, c, g, or t
  misc_feature (688)..(688): n is a, c, g, or t
  misc_feature (701)..(701): n is a, c, g, or t
  misc_feature (721)..(721): n is a, c, g, or t
  misc_feature (724)..(724): n is a, c, g, or t
  misc_feature (791)..(791): n is a, c, g, or t
  misc_feature (1464)..(1464): n is a, c, g, or t
  misc_feature (1468)..(1470): n is a, c, g, or t
  misc_feature (1501)..(1502): n is a, c, g, or t
  misc_feature (1517)..(1517): n is a, c, g, or t
  misc_feature (1521)..(1521): n is a, c, g, or t
  misc_feature (1529)..(1529): n is a, c, g, or t
  misc_feature (1548)..(1554): n is a, c, g, or t
  Probeset Number=SeqID_14251
ttctagtacgtcaacagagcacacgacggtaancgatgatgtatataagagtagtagaatcgcatagacaatgctgagncgtattgtacgtgatagcaagactcgatctccgcattcgcgtcgatcatatgatgtgtgcgataacgcctgagacacatantgacactgttatgtcgatacgagcgttaagatatggtgccgacagtccatatngtagctatgcgagcacacgatgtcggatcgatcgagtgatctggatctgtcccgccacatgacggatgacgcagaccgtgatggtacatggtagtgtatttatcatgcagtcatgtggagtgaaaggcggctacgacgtagatagtttgagactccggcgctgacgtatagttataggaggatgacactgacnccacatgcggctcgcagctgatagatgtgataggctggatgatagaggtggtgagatcgtgacanacacagcgagcacatgatagaggcgagtattgagtaaatagtgtgctgttatatcgcatcacacaagatgagacagagggcgggtgcggagtgagattctgcatgaatgagtgacagatcacacatgtacatgaggaggggtgaggtgggtgtgtgcgggcgtcgttgtgtggtgagtatttatcatcttttcctttgttnttttgttcttaatttntatttgttttgtnatatttatattattattctnttnttctttcatttttctacctccacacacccactccaaccacgctgactgcgccggctcatgcacacangcataccagcgacagcagccacacagactcatccacctacatatgctcagacccacacgctccttcatcacatgacgttattatcgtgttgtgaaggcgtgcattatgagtgacgctcattatgtgcagcgacggtactgcagggcgcgctgttagagcggtagtatataacgagatatgtttgtgttgtaagtgcacaagatggtcgcacctcctcgctcctcccgctacccccatagaccgacgacgccgtgctgagctgtatcgccccgtcggcgggccccactccctacagaccactgctacgcactcgactcatgcgataaggtcgccgtgacgccgcaagggtctggggtgtaagtttgatgatagagggcgatgcgcgccacccggccatattgatctccttggtggcgcggagctatagttgattagcagtacaatcacactagaaggatcgtaatcaaatagagactacatgtggaggtggaaaaggggtctgggtgcgcattaatgtagggaatcgggtcgctcttcctaatatctattgtcatactacagtgatggggttggagttgtcgaccgatgtggctcgtggtatgctgcatcacgctctctacaccctacgcgcggagttgaagcgataccaccatttttcgcacccaccgggtgngggnnngggtgagacaagaggaggcagcccgccgtanngcgccgccacctcgnacanccaccaanaccaccccatttattaaannnnnnn

SEQ ID NO: 4473 - DNA, 1899 bp, Glycine max
  misc_feature (43)..(43): n is a, c, g, or t
  misc_feature (97)..(97): n is a, c, g, or t
  misc_feature (170)..(170): n is a, c, g, or t
  misc_feature (210)..(210): n is a, c, g, or t
  misc_feature (241)..(241): n is a, c, g, or t
  misc_feature (275)..(275): n is a, c, g, or t
  misc_feature (294)..(294): n is a, c, g, or t
  misc_feature (346)..(346): n is a, c, g, or t
  misc_feature (350)..(350): n is a, c, g, or t
  misc_feature (417)..(417): n is a, c, g, or t
  misc_feature (505)..(505): n is a, c, g, or t
  misc_feature (572)..(572): n is a, c, g, or t
  misc_feature (590)..(590): n is a, c, g, or t
  misc_feature (610)..(610): n is a, c, g, or t
  misc_feature (657)..(657): n is a, c, g, or t
  misc_feature (662)..(662): n is a, c, g, or t
  misc_feature (775)..(775): n is a, c, g, or t
  misc_feature (808)..(808): n is a, c, g, or t
  misc_feature (1026)..(1026): n is a, c, g, or t
  misc_feature (1144)..(1144): n is a, c, g, or t
  misc_feature (1461)..(1461): n is a, c, g, or t
  misc_feature (1492)..(1492): n is a, c, g, or t
  misc_feature (1801)..(1801): n is a, c, g, or t
  misc_feature (1819)..(1819): n is a, c, g, or t
  misc_feature (1848)..(1848): n is a, c, g, or t
  misc_feature (1865)..(1865): n is a, c, g, or t
  misc_feature (1868)..(1868): n is a, c, g, or t
  misc_feature (1874)..(1877): n is a, c, g, or t
  misc_feature (1884)..(1888): n is a, c, g, or t
  misc_feature (1893)..(1894): n is a, c, g, or t
  misc_feature (1899)..(1899): n is a, c, g, or t
  Peptide Sequence Number=SeqID_7506
  Probeset Number=SeqID_14252
tctcacacttagtctagatatttcatcactcagtacgcgactntctctcattccgcgtaacaaccaaccatgtcgaatccgctcgcacatatactcngcggacgtcgtaatcagaatcatactcatacacaaactgactgttcgctcatctcccctccagcacatctcanacgacgcgtcgcttcgtacacacggcatttatatacgcgncgcgtcgatgtgagttcacagaccaaacgtnatatgtcgacaagtcatcagaaatgcgagtcagncgagatcaatcacaatcanctcatcactatctgtatgtatccttctccgacaataagtgagaagtaattanagtntatagatcgcgcggcggtcggcgatcgcgatcatgagcagacatatcacaaactgtccgccgtctcncgctctatgtgcgtcgctagtcccgtatatagcgagcaacggtgcggtagcgtgtcagctctacgctctctatcaatatcgcaccgcnctcgcggtcgtcgcagagtcaatatcgcattcgtggcatacaccccgactcagacactttcttgtcncttttccttcatatatanttgctactcgtcatactgtntccgcatgtgagtcgcgtcatggtgtatatctatcacactgtatctnttcgnccccccatccacatcacgccaacacaatatcataaccgctcaccgcgccgtcagctctcagctctacttctactctccgattcacatcatcactcactcttcttctcatgcantcattttagcgtctctacagtaattggtcacgngccgtgcgagtggcgacggattgctcgtcgtcttctcatctctctcgatgatcttcgcgatctctatattattaacatatcctctcacacacatagatattatcaacaataaaacacagagacggctcgcgaatgaagtgatgcgtggctacgcgtacgtcgtctcacatcacatcctctgccgcctacgccgccccgcgcatcaccgcgccttctcncttcggcatacaactctatgcgtgtgacctactttatatatatggcgtgagcgtcgtggtcaacatatacacatactatatccatgacgattatctactcggttattagtgtctagcnccctgcgtggtagccatctcgttattcctacctcctcttcgtgcatcacccgttgcctctcgtttaacgacctagcacaccccccagcacacggcctcctactctctcatatcatctcacggtctgtccctttcattattatcactcctccactcttcgcgtctcactcccgtgcgcctctccgcgctttcatgtccgtccagtgatatcgcgcgcatacttatatcttgctccgcgctgatgtttggtcttgtgcttggcgttcttctttgtctgttcctctcgtcgtctggggtttcgtggggtgcttgtgcccntcgagcatgtcggcgcgatatgatagatagnaagaccctatcaacatattattataaatatagactaaagtatatatatataagaatatatacactataataataatatattaatatatctcactatcttcaagtattatgttatagataacaaaaaataccgccgagctcggcttcctctcgatatccactatctatcgctagatatgagatcacttcaagagaacatcgcagtggtggggagtgccgaagaggtgcccgcgccacaccccagactacacacgcccactcgagaataacgcccgacacgcgccgcacggaacccggccgaaccagctgngcgcagccccgacacgtntcgcgcccacggcggcccccagccgcgancggcgcgcgcggcgggngcnccgggnnnnccccccnnnnnggggnnccccn

SEQ ID NO: 4474 - DNA, 2041 bp, Glycine max
  misc_feature (18)..(19): n is a, c, g, or t
  misc_feature (32)..(35): n is a, c, g, or t
  misc_feature (37)..(39): n is a, c, g, or t
  misc_feature (264)..(264): n is a, c, g, or t
  misc_feature (437)..(437): n is a, c, g, or t
  misc_feature (555)..(555): n is a, c, g, or t
  misc_feature (644)..(644): n is a, c, g, or t
  misc_feature (683)..(683): n is a, c, g, or t
  misc_feature (706)..(706): n is a, c, g, or t
  misc_feature (712)..(712): n is a, c, g, or t
  misc_feature (863)..(863): n is a, c, g, or t
  misc_feature (996)..(996): n is a, c, g, or t
  misc_feature (1063)..(1063): n is a, c, g, or t
  misc_feature (1091)..(1091): n is a, c, g, or t
  misc_feature (1127)..(1127): n is a, c, g, or t
  misc_feature (1183)..(1183): n is a, c, g, or t
  misc_feature (1193)..(1193): n is a, c, g, or t
  misc_feature (1226)..(1226): n is a, c, g, or t
  misc_feature (1262)..(1262): n is a, c, g, or t
  misc_feature (1471)..(1471): n is a, c, g, or t
  misc_feature (1485)..(1485): n is a, c, g, or t
  misc_feature (1497)..(1497): n is a, c, g, or t
  misc_feature (1503)..(1503): n is a, c, g, or t
  misc_feature (1507)..(1507): n is a, c, g, or t
  misc_feature (1547)..(1548): n is a, c, g, or t
  misc_feature (1551)..(1551): n is a, c, g, or t
  misc_feature (1580)..(1580): n is a, c, g, or t
  misc_feature (1603)..(1603): n is a, c, g, or t
  misc_feature (1638)..(1638): n is a, c, g, or t
  misc_feature (1640)..(1641): n is a, c, g, or t
  misc_feature (1644)..(1644): n is a, c, g, or t
  misc_feature (1708)..(1708): n is a, c, g, or t
  misc_feature (1722)..(1722): n is a, c, g, or t
  misc_feature (1826)..(1826): n is a, c, g, or t
  misc_feature (1861)..(1861): n is a, c, g, or t
  misc_feature (1911)..(1911): n is a, c, g, or t
  misc_feature (1920)..(1920): n is a, c, g, or t
  misc_feature (1924)..(1924): n is a, c, g, or t
  misc_feature (1930)..(1930): n is a, c, g, or t
  misc_feature (1940)..(1940): n is a, c, g, or t
  misc_feature (1962)..(1963): n is a, c, g, or t
  misc_feature (1967)..(1967): n is a, c, g, or t
  misc_feature (1969)..(1969): n is a, c, g, or t
  misc_feature (1976)..(1977): n is a, c, g, or t
  misc_feature (2006)..(2006): n is a, c, g, or t
  misc_feature (2032)..(2032): n is a, c, g, or t
  misc_feature (2038)..(2038): n is a, c, g, or t
  misc_feature (2041)..(2041): n is a, c, g, or t
  Probeset Number=SeqID_14253
cctctcctcactctctcnnctccccctctccnnnntnnntttaacgaagcacgataattctacattatcacattccctcttcgctattctgtttattaccgggtgtgctcttctctcactccgataatactcgacgtcggcgcgaacggacatgacgacttgagactagattatccagtatatgtagtgtatattatatgagcttactgaaattctttaacgtgacttctctcttatttattctcattctgttacactgctaanagtctgactgtgcgatactaatctcattcgtagattacgctgctgttgaccatccgagctgatcgaggtaatactgtgctacatatgaacgcctgtgctacgatctgttctactatactcgcttgtgaatgatctgtttactttttcattctatctctctccatgtgcttctncactctcctgctctcctgcaaggaggtgagtactgacgaggatcgcgactatgcatgatcgataaataacatgtacatcacaatataatgggtcgtcgtccgctatactgcaacgtcncgtctacctacctccgatatctcatgatattgcttcgatcttcacacatctctactactgattaacattacatacactattatatagcnacatggcgtccactacgtagtcctcgctgacctctctcncttatcacgtacttctagcgtcntcaatncatcttctatccacctgagctcgccacatgatctattatgcgttcacttgctttggcgctcaacatttcttgccgttctatacgattctctatcatgtaaggacttcgtcgtagcgctcgatcagtgtgtttaattactcactctctatanctagaacgcttgctgcagtcatatacatctgagtctcgacgaaacactacgacagaactctacgcggtcactcgcttatctgttcaacaatcatctcgcgtgttgaaacatccgactactacaccctaacctncacctacataggactgatcgcgatacaacattgtacgaacatctcgatacttttggcactcgtctcncttcgacaatatacatgaatatctaacngcacgacgccgtccactgtatacagctggccgctcncatatctgactgattgtctcactatatcgatctagatctccgcacttctaatgtantgagtccgtnttctcactgtataactatctaacttagacaaanacggcgcatccgactagtgccagacgggagcacgcngtcgcgacgcgtagacacactacttcgctgatatatgacactgcacatgcattatagtcgtaccatgacgagatgctgtagcttctgcatactcttacctatcactgtgtcatcgatcgctcgctcctcacgtctgacactagatgtgatgtgatcgcactcctgcgcgtcacactccatcacgtctcaatgcgccgctgtgcactacnattcatgcacattntatatgtagttnacgtcncccnggcgcatgctcgtctggcaagagtctaccactaagtgcgnnggntactgacatcttcttctcgtaacagatcntctagtctcaatacgaagcgtanatacgaactattatattaactatcattttaatatnanncanattgactcaacaacacgtactaggcggtcacgcgtatctcgtctcactcacgtatcttcatcgntgatgcgtaaacgnatcattcgataaaacgctttgatagtacatatctgcgagctcgattgtactgtcacgacggatcagctatgacacgctgacgctcgtctccacctactctactntctactgctgatgcactcgtcacgacgcgatacgncttcgccgcatcacatcgacacactacgagcctaactatttattaatcanttacacgtnactnctgagnatcgtacgantgtactctatcatagacagcanncacnancaaatannccctgcacatcaccctactacaccacttncatagcatacatcctcgtcatcgtcnctatcntgn

SEQ ID NO: 4475 - DNA, 441 bp, Glycine max
  misc_feature (130)..(130): n is a, c, g, or t
  Peptide Sequence Number=SeqID_7507
  Probeset Number=SeqID_14254
gtttcgatttatagacctttgccttttgcattttacacaccaacaacgcgcttcactctagtttctcccttttcgattccaaaagatgagtgaagagcagcagcgacctgcgcctcgtctgaacgagagnatcctctcttccttgtccagacgttccgttgctgctcatccttggcatgatcttgagattggacctggagctccccagattttcaatgttgtcgttgagattacaaagggaagcaaagtcaaatatgaacttgacaaaaagactggactcatcaaggttgatcgtattctctactcatcagttgtttacccacacaactatggtttcgttcctcgcacattgtgtgaagacaatgaccctattgatgttttagtcatcatgcaggaacctgtgcttcctggttgttttctacgtgctcgtgctattggatt

SEQ ID NO: 4476 - DNA, 572 bp, Glycine max
  misc_feature (259)..(259): n is a, c, g, or t
  Peptide Sequence Number=SeqID_7508
  Probeset Number=SeqID_14255
agaaggaaaccctagccgccgtcgtcttcctcttcctcttcgtccaagccatcttctggtctggtgctgttggtagctatggcgctgcgcaccgttgccgcgaagctgaaggcccccgtcgcctctctcaagcaggcttgggcggtctgccgtcctcaggctaagcatcctttggagggcctgaatgttgatccgctcaccctgtaaggccgtaaactaaaccaacttccattgccttttctcgtgcatctatttgagnttatttgttcattctctttaatagccaggagatgaaggccctcgagagggcagttagggcaggcgaaatgaagcagaccttggttacaattgccttcatgggttgtttgaatgggaacggttggccaatggggctccctttcaaaaattaacttccccctgaagggccccccccgcgaagggcgacaccccccaaaggccggggcaacacagggaggggggttttttaaacacccccttcttttctataacaaaaaacaataagcgggcggggcggcgggggtttcccacaaaaaaaaaacacacaaacaacg

SEQ ID NO: 4477 - DNA, 1472 bp, Glycine max
  misc_feature (19)..(19): n is a, c, g, or t
  misc_feature (180)..(180): n is a, c, g, or t
  misc_feature (185)..(185): n is a, c, g, or t
  misc_feature (411)..(411): n is a, c, g, or t
  misc_feature (526)..(526): n is a, c, g, or t
  misc_feature (937)..(937): n is a, c, g, or t
  misc_feature (1349)..(1349): n is a, c, g, or t
  Peptide Sequence Number=SeqID_7509
  Probeset Number=SeqID_14256
ctcggcgcggcacatacanaacagctaagcgggtcattatgacacacggtggcatcattcctatatcgtgggctagtagtgcgcggtactacagtagccagtatctaataattgctatcatacaagtacgtcgctctatctatacagagctctctcaatacacccacattcatggttgtnccggntctacctgtccgcgctggtttcagatcagtcgaccacattgtctgctcatcgcggccgcagacacactctcagtcgtatgcggtctaaccactcggtcgcgtccccggctctctaacacttgtttctcataataagtctgggttgtcgaggtggtagataatcttgcgcgcaacacatcgcgttgaatcataaccaatacacctcctgttcgctcgcgtatcgctncttgcgtatattactacccggtaacatacacagctgggaagattaaaagtattgtggtggttaatacaatggagagtcgacagcatagtgtcggtccgggattgcgatttaatcnaaaacagtcgccatcctttgcatattgattctgtgcttcttcgcaacagtggcatgtgagattacgcagtttaccataaatcaacacgtgggtgccgtcgtgtgacaactttatgatgttgtatgctatatatataaacaagacgggagtgcgcgggacatataaagctgtgagaggaccgtgattgaaggtgtctggtcgcccgccttatcataccttcccattggccgtccagtcggacacttaactaaatctcagtgcggggcgcggcgtgatctaataattcggacacaaatcatctattttatccgccatagacggtgtggtcaagagtgttcggcggcgcgtattgcgctatatagaatccgcgcactacaggccgtatctgaatcgcggtgcagcatcgtcacnacaattcactgacaccaagtaccttgtttttctttcgtccgtcgtattctttaggatcctgatcgtccctacaggtccattgctactgttcgtgctattatatggttggatattgagggggtgcagcgcatacatggagggcgaggtggggctcatataaaaccggcggccgcatccataaatctgttgacagttatgggcgtggtgaaaaatcgtgtgagtttgataatcggggccgtctggcctcgtcggtatcaacactctgcttaggtgtgccaatacacaatgcgtgtgtggtgagtcgtactatattattaatacgaattgggtgttttataaagggggtattagatggaaggaggagaattttttatcgtctacacacctgtactctgatatggataataatcanctccttcacatacttgtctcactcactattccaaccgctcggctcccaccgcacgtcacgcactcacctacatggataatataagttataaataataaccacaatacgcgtgttcctgcatct

SEQ ID NO: 4478 - DNA, 1414 bp, Glycine max
  misc_feature (1)..(1): n is a, c, g, or t
  misc_feature (156)..(156): n is a, c, g, or t
  misc_feature (261)..(261): n is a, c, g, or t
  misc_feature (389)..(389): n is a, c, g, or t
  misc_feature (927)..(927): n is a, c, g, or t
  misc_feature (945)..(945): n is a, c, g, or t
  misc_feature (1180)..(1180): n is a, c, g, or t
  misc_feature (1335)..(1335): n is a, c, g, or t
  misc_feature (1337)..(1337): n is a, c, g, or t
  Probeset Number=SeqID_14257
ngcacggccgcgtcgcggctgcggccgatattcgagtgtgttgatatattataagaatcgcagtgaataggtcgcggcaggcgcagagcggagggtcgtgtatatacatccaaacataacgatacgctcatctatcacacgaagcgatcgagcgtnatctagcgcgttctatgagctatagtcgagtgtcgctacgacatcgagcacgctgacttacgcacgaccatctaccttcacaaccatccgtctatagtcgccacntttactgctcagcgcgtacgagacgtgttaagacagcgtattaccactcgagaggggagaatgtgtggatgtgtgagatcatcgagtctccatatatccgtttcgtttatactattgacgacatgacntagtattagagctagtctgggagtacgactatgtatcatatctcagtgcgtattgcgcgcgtatgatggagaagcaattatatctgattattgtctacctcaatagagcgcgctgacgaggcggagaggataatcgagacaacgacaagatactgataatcgtcatttcatgatacattatattcatcagccattatgagataatgcgcgcgccgcggtgaattgcgctgcgggtaacgcatgaaggaagtggggaggaggcacataggaggactcaccaggcggcgcgggaagcaccgagtgagtttggggtggtggatcttaatactccacatattttactgcggacgtgtttgtagtcggcgcaacgcattcagcatgttgcgtgacggcgaaagcgggtatgtggggctcgatgctctgcttatagagtatctttgcggcggcatcgagtccctagcgtcgcttcgcgctctacacacatactaatagggctatgtcagcgaccacagaaaccgatctgcgctgctggtgtttnttatgtcctcatacgcanatacactacaactcgtggtctacctttcggcatgcgcgcgacctcctatacatcgaggttcagcgtctcggcaggcattatacccgctgcgcatgtcttagcgataagtacctcaccgcgagcagattctctacgtatccgcatatcacttagtatcagtgcgtggcgagcgcgtactacagtacatcaacctagctcgcctagtatataggggtcacgcacgatatgagggtgntatcaatttagtgcgttataggggagagcatattgataggcacatccatcgccgccactccacgcagggaaggcgggcgtgaggtagccattagcgataatcttcatcatatggagagtggcgtgcggatgaataactacgtaatgtgtggaggnanggtgtggtgtgagataatatagtcagataatgattattatacggatgggagagagcgcggcggcgagggagctacac

SEQ ID NO: 4479 - DNA, 920 bp, Glycine max
  misc_feature (920)..(920): n is a, c, g, or t
  Peptide Sequence Number=SeqID_7510
  Probeset Number=SeqID_14258
aacctatattctccgaggatgacatgacaaatgcaccatcaactgaaggtacatttcctttctttcttatttagacagacgttttctaagagaattatagtttaagatgtcccataaatgcattcagaattcacgatatataagcactaagatgactaattaaccatctttggagctcaaatactcaaattttgctcaattattaatgtcctatgcttatatgatattgagaggcatacaaacaaaggcacaacttacagaaggaagataagtgtcaatgtgaactcacttttcatagtagttctagtcttttacacgtactattgcagaaggggacagggatagagctaggttgtagcacatcaaatttcttgtaaaaaaagtgaagccaaacctaggcaaacaacaaatattctatcacaatttttggttgctgatatagcatctttctcttttgcctatacacgtcaaagtttgtatggtttggcccaataatgtgtctcaatgcaataatttgtcataaattgagctgtaggaagtaggaaggttgaagttttggtctggttcagtttgaaacttgaacatggattgaactaatcttaatctcaagtaattcacctgattgttgaatcattctgcaacactaattatgtttggttgtttcaatttgcgtattgcagtttggcttgacaactcctaaattggattcttttttgaagtttaccttttttgtgctaagtttgctttgctgttcatcatggatttccattataatttctcttacatttttaggtttttagttggttcaaagtttaagttttttttttttttttttcattttttggattttgattagtaagttttgtttgattttgttgggaaaacatataattgattgatcgggaaagtcataaaactan

SEQ ID NO: 4480 - DNA, 1666 bp, Glycine max
  misc_feature (10)..(10): n is a, c, g, or t
  misc_feature (12)..(12): n is a, c, g, or t
  misc_feature (17)..(17): n is a, c, g, or t
  misc_feature (21)..(21): n is a, c, g, or t
  misc_feature (23)..(23): n is a, c, g, or t
  misc_feature (25)..(25): n is a, c, g, or t
  misc_feature (28)..(28): n is a, c, g, or t
  misc_feature (30)..(30): n is a, c, g, or t
  misc_feature (34)..(34): n is a, c, g, or t
  misc_feature (36)..(36): n is a, c, g, or t
  misc_feature (38)..(38): n is a, c, g, or t
  misc_feature (49)..(51): n is a, c, g, or t
  misc_feature (70)..(70): n is a, c, g, or t
  misc_feature (87)..(87): n is a, c, g, or t
  misc_feature (89)..(89): n is a, c, g, or t
  misc_feature (91)..(91): n is a, c, g, or t
  misc_feature (100)..(100): n is a, c, g, or t
  misc_feature (114)..(114): n is a, c, g, or t
  misc_feature (116)..(117): n is a, c, g, or t
  misc_feature (138)..(138): n is a, c, g, or t
  misc_feature (196)..(196): n is a, c, g, or t
  misc_feature (336)..(336): n is a, c, g, or t
  misc_feature (365)..(365): n is a, c, g, or t
  misc_feature (512)..(512): n is a, c, g, or t
  misc_feature (691)..(691): n is a, c, g, or t
  misc_feature (748)..(748): n is a, c, g, or t
  misc_feature (848)..(848): n is a, c, g, or t
  misc_feature (903)..(903): n is a, c, g, or t
  misc_feature (939)..(939): n is a, c, g, or t
  misc_feature (959)..(959): n is a, c, g, or t
  misc_feature (1091)..(1091): n is a, c, g, or t
  misc_feature (1143)..(1143): n is a, c, g, or t
  misc_feature (1155)..(1155): n is a, c, g, or t
  misc_feature (1190)..(1190): n is a, c, g, or t
  misc_feature (1193)..(1193): n is a, c, g, or t
  misc_feature (1227)..(1227): n is a, c, g, or t
  misc_feature (1246)..(1246): n is a, c, g, or t
  misc_feature (1285)..(1285): n is a, c, g, or t
  misc_feature (1381)..(1381): n is a, c, g, or t
  misc_feature (1460)..(1460): n is a, c, g, or t
  misc_feature (1474)..(1474): n is a, c, g, or t
  misc_feature (1666)..(1666): n is a, c, g, or t
  Probeset Number=SeqID_14259
ttgttggtgntnatatnaaanananaananaggngnanaaaaagagaannnctaaaaaggtaagaaaaanaataaattgaaaggaanantnataagtgangatgtgggggatgntnnttctgtattatatattatggnatattaatatatgtggtttaattttgttgtatactgtgtcttgatgcattgtggtggngtgttgtgcgggttatctaacataggatatataaaaaaggggcgcgaagagcggcatacctgtggaccccacagccggcgacccacaccaccgtgaggcctccgacctctcgccactccgctccagaccctaacgcgcgncaacaataccggcgtgtgagtgcccaccntcataatagatggcatcgagacatcacaacacaaggagaattctcatacgatggaagcgtacagagacaatatgatgatattggcgctcttcttgtgcgcttctacgttcttctgtgcgtggtgtgttctctccgtggcgtctctcnggcggcgtagctctcatcaccctctccacactgtgggtgtgtctactcacacgggacaccagagcccacaccatccccgtgtggcgctcccacccacaacacgagcgatgttcacatctcgactcactatcgccgcacccaccaccataaccactctgtctctgtacacaccacatacntgttcgtattctcaccggtgatactaagtgatatcatactcatcattatctcatcanatacctcaccacatatgcgcgaacacaacacgggacatatcactatacttatgtaatttatatctatatactgcatatgtcaccagtcacatatacgatntattctgatggcgacctgcgacaacaacacctcagtcctcatcacatatactacntcaaagcacataggtataatggtgggtgactctganctcacacccgcccacatctngtgagtaggtcacaaactacaagcggatcctcgcaggcaacacaccgtgacgcagacgcactctataactcatatctctcctcacatgtcccacacctgggatctcacaaatctcggacgcgactagtgctnatacgacgccatctcttcctcttgattgacatgctatctaccatgctcatcntctctctctgtnatctctctctacactactactttccgcgtgcgacntcnatccaacgctcgcgcgcggcatcgcacgtcatcncgacccagtcacacatccntacccgtcataccatcatcacccgtatttgggcggcatnagtctatatactctcgcgcgaaattagtacctcatcacttcgcagggaggctcgtgtatcatattcacgtgcaaggatgagaagacacacacacangcgtgatgactactatgcgacacgatggctgtgatctacgagcacgcctctcacacgtgaatcacgtccctctcacacnctacatcgcgacgncgcatctacctccatatccatccacatcctcacatcccacaacctccggttatcacttgcggtgctcatcttactctactacacctcctatcttaaacacacacacctcactacatggcgttggcatatactaccacccactacgacacacatcgggcggtgactacactacacatacaccatacacggcan

SEQ ID NO: 4481 - DNA, 1500 bp, Glycine max
  misc_feature (15)..(15): n is a, c, g, or t
  misc_feature (146)..(146): n is a, c, g, or t
  misc_feature (169)..(169): n is a, c, g, or t
  misc_feature (281)..(281): n is a, c, g, or t
  misc_feature (413)..(413): n is a, c, g, or t
  misc_feature (664)..(664): n is a, c, g, or t
  misc_feature (1110)..(1110): n is a, c, g, or t
  misc_feature (1205)..(1206): n is a, c, g, or t
  misc_feature (1209)..(1209): n is a, c, g, or t
  misc_feature (1211)..(1212): n is a, c, g, or t
  misc_feature (1215)..(1216): n is a, c, g, or t
  misc_feature (1229)..(1229): n is a, c, g, or t
  misc_feature (1253)..(1253): n is a, c, g, or t
  misc_feature (1270)..(1271): n is a, c, g, or t
  misc_feature (1360)..(1360): n is a, c, g, or t
  misc_feature (1364)..(1364): n is a, c, g, or t
  misc_feature (1371)..(1372): n is a, c, g, or t
  misc_feature (1389)..(1390): n is a, c, g, or t
  misc_feature (1403)..(1403): n is a, c, g, or t
  misc_feature (1418)..(1419): n is a, c, g, or t
  misc_feature (1424)..(1427): n is a, c, g, or t
  misc_feature (1430)..(1430): n is a, c, g, or t
  misc_feature (1435)..(1435): n is a, c, g, or t
  misc_feature (1439)..(1440): n is a, c, g, or t
  misc_feature (1442)..(1445): n is a, c, g, or t
  misc_feature (1450)..(1450): n is a, c, g, or t
  misc_feature (1452)..(1452): n is a, c, g, or t
  misc_feature (1454)..(1454): n is a, c, g, or t
  misc_feature (1459)..(1459): n is a, c, g, or t
  misc_feature (1461)..(1470): n is a, c, g, or t
  misc_feature (1475)..(1476): n is a, c, g, or t
  Peptide Sequence Number=SeqID_7511
  Probeset Number=SeqID_14260
ttctggggtataganagtagtcatgatagaagtacatatcacgcagacgaatagcagagagtaaatgatcagtatcaaaaacgactatcatacagacaagagagacggtacacatatgacagaacgcagcgctaagcagcaaatanacaatgatgactgtgtgtggttncgtagttatcggtcctgtgtttacactcggataattattcactatcactgtgaagcgcacctgcacgctaatcgctctcatacacacacgcgcggacgtctcgtcgcgtctncacagaggcgaagagagagtacgcacagcaatagacgactgagacatgaataagaagaaacacagaggaccaagagtgagtatgagaaataggagctagcggttggtgagcgcgcatataatgtacggagantgtcagcttattgttctttcgtgatgtaatatagtatgagtgtcgagcataacgcatagttacgtaggtctctgtcctgtgtaatgagaagatatgaagacacaaccagaaagcagcagaaagataaacaaagacacatgagtatggtgggagagtacatgtgtggaggagggagaaagagtatgtacgtgcggtggggagagcggagacatgtgacgcgcgtatatgtggagtgatgtgtttgttgtctnttgatctgttctagtattattgatgtatatttgtattgtgacgtcaggaggtagtgactacagataacaataaaagcagatcagcacaatacatcatgtgtagagcgaagggcagtgaagtagagctcacatcagcgcgcaggagagatcacaaacaacccatgatcgagaaaacaagaagatgcgcaagaataaacacaatatcacacagcgcaaggcgcaacaacaacgggcgagaaccacgtcacacgtcaacatgaagcgcgcggcagccgcataacccactagtgtgtgtgatgcctcgcctggtatcttactcagcgtgtgtcatattatatacataccataaccaacaataagatacacgaagaagagagtagccgagacaagtgaggcggcggtggtcgggcggggaggggcggggtggagggttcagttgaacgatntcaccggggagtgtattgttaagtttttacactggttcgttttggattgacagatgtgggatgttagagttaatatatgtgggtgtttctaaaannganannaannagacgcaccaccnaacacctcccgcgcctcccccgcntccaccctcgcatacgnncataaaatataattagaagtatatatagttgttagagatcaccacccgccgacgatagaggaagagaggaacaaaacacaaacacaatnccanccccctnnccccccggtgtgtagannccgctccgtcgtnttgtggggtgttttnnggttnnnnggngtatnttanntnnnngttgntntnttgtntnnnnnnnnnnaaaannaaaaaagtagattaagtcatataa

SEQ ID NO: 4482 - DNA, 1348 bp, Glycine max
  misc_feature (12)..(13): n is a, c, g, or t
  misc_feature (15)..(18): n is a, c, g, or t
  misc_feature (20)..(25): n is a, c, g, or t
  misc_feature (28)..(28): n is a, c, g, or t
  misc_feature (66)..(66): n is a, c, g, or t
  misc_feature (93)..(93): n is a, c, g, or t
  misc_feature (149)..(149): n is a, c, g, or t
  misc_feature (1032)..(1032): n is a, c, g, or t
  misc_feature (1138)..(1138): n is a, c, g, or t
  misc_feature (1312)..(1312): n is a, c, g, or t
  Probeset Number=SeqID_14261
tttttttttttnntnnnntnnnnnnttntcattaatttaattcccctgtctaatatctccactctngttatcttcccaaaccgccgcccctcncccctactcccccccacaaccgccaacatgcataaataatttccattcgatcacgnatacaacacttctcatgtcacctgccaatattcacatccatcgcacgacgaatcaaatacccatcaacagcacattcgcttagcagccagtcgctcaaccaaagcacactcgccacagcggcatgacataacatcatccaactgcttagatcacatagccagctttttgcgacacctttccctactccacacctctgcagcgccacccccctgacataccatactactaccacttgcctcctgcatcctcacccatcatcaacttaaacattaaaccctatcctaagtctctccaaaactccaccgaagcgtcacatctcctctgacacacagctagtacatcttcatgacccaccaaaccctgaccgccccacctccccataccttaaccctcgacctccacggcagcgccccgcccccgccctacaccccaatatctaaccctcataacccgacacccccccaatttcacaacactacacctggcgccacgtcccatatatataccacaccccatcccatcaacttgccccaacaacaccccctcgacccctctaaccccataaactttcacccccgcccccttgccacagcaaccacacccaccccacttctcccgcccaacaccttcgcacctgtaacaatataaacgcacaacaaaaagtgctcacgcacctcactcgcgataccactccctcaccttactccccaatcaccaaggtttcaccccacaccactcactctcccaccaccacgcaccccacaaccatccacaccacacaaatatgtgctaatcaagcgccgctatctaaaataaaatcatctctcgtaataaacacaaaaactatacgcaccgccacaaaaacaaatgatttcaccatgntctaacaacatacaagagccctccgatatgttatactcctacacaacacacaaatataacatgccacaaatacatatgcttcccgctaaacacaacattcccactnttataactacacatatctcacaatataacataaaaacaacaacctaatactcacacatagtggtcatacccacaaccgccgcctcctcaactcacaatacatacgtgagaaataccattaccagatatcacatccattctctctatagtatgtacaacagcctcagcacatatnccacacatgaccctatacaaccgctctgatcataaa

SEQ ID NO: 4483 - DNA, 1391 bp, Glycine max
  misc_feature (559)..(559): n is a, c, g, or t
  misc_feature (986)..(986): n is a, c, g, or t
  misc_feature (994)..(994): n is a, c, g, or t
  Peptide Sequence Number=SeqID_7520
  Probeset Number=SeqID_14262
gtgagcggcaccgccgcggctccgtccacctcgtgcgctctcgccatctctatcctgcctctatcgttgccaccccgcctctctctctacaacgagtataacacgcatgaagagtccgacggtgagcgcgctgacagcgctgtgtggcggaccctggctcgctaaggcactcctaggatgaggaagtagatgggagagacgcctatgtcagcgcaacgttaccagtgtctacgtagtcaccttccctatcaaatatgaggctccgctgtatgatcccagagatgtatcctatagttagtgctgccagtgtttggaggcattgatgtcacacattgcccaatgcctgccatattaccacgtagcactacgcagcgccacggcgtaacacgtatgttacgagtgtgcacgacacgtgaggcaccattgactgatacttagaactaccatctagatgatcgcgagtaagagaatctctgtgcagttctaagcatctctctgatacgactcagtcatagtcatctatcactggtcgccattaaggaggctagtgtgattgatntgaaggaccgctgggcggagtctcgactgctctgtaagaataacagcgcgccgccagggcgcgttgcattgtcgtcgtaatgactttagagacgacctaaaagaatccgcatgaaagaccactcgcgcgcatgcgatgcgatacctgtattattctcaagtgatagcagttatgcaccgaaagacgagcccgcgcacatctatagttatttgcacgggaatgttatgtctacatatgataatatccgcgatctagtgtttctcaccctattcgctgttgctatcatactcataggtcaccatactctctcggcgcgcgcacgtcgcgcgcactaggctacagcttgcgtcggtagatagtcgtcctcctgtctggcctaatgtgcgcgacattcagctacgcgtgatcgattatcgcacttacgctnaggcgacncgactggagtgatttacgtctcctaccagctcaccgtaccccgtaatacaactattagttcagtatacgagatcatgaacgcacagtaagattattctaccaactaggtggatactagcagtcgctactcctgttgctgtatagaactcgtgcgggtctcagaggaaggccagcagccaagctcatacgtgtgtgcggacttcgtcatagtagtagtacctcgaattagtaagactgttatcagaatctcacaatcgcactgatgcatctgctccgtcatgcagacacactacatctgcatataccacttgatttgatatagaaccgcaatgatatatatgacacacaactgtagacaggtactacgcacacttactcacacgcgtatctctgaact

SEQ ID NO: 4484 - DNA, 867 bp, Glycine max
  misc_feature (586)..(586): n is a, c, g, or t
  misc_feature (867)..(867): n is a, c, g, or t
  Probeset Number=SeqID_14263
atccacccagcaacctacattgttagctacacagccatccacctacgagatagcttggctagccatgggtatgggttccaagatgaagcgtagcagcagcagccttgttgtatcgtgtgtactcctcggcctagcactgctcctcgtcggggcggccgccaccaggaacagcccaagctcctcctgcaaagcgcagtgtagcggacgggaggactacaaaccgtgccacgtcgcgtgcctttggggcctgcgtctgggagaaccaccaaactgccacctgcgctgccgccacgcgaaatcctacgacgcctgtttcgaacagtgcaaaaaagaacaagaagcaataggaggaagagttgcgctactggtggcggcggcagaggggcaaaagcaaggacaagaagaaagagcaaaaggagcagctgggctcctggcgatgccgaccgagcgcgctgaatgaggagaagaagaagagaagaggaggccagaggccgacgccatatgtactatgttttttctgttttcctatcttacagatgctcttatttctggtgtgagcccgcaaccttgtgcgtgtgctgtactntagatcgccatgatgtgctgctaaaacaccatgaaccgcggcgactaaggccgccatcattttccctttcagaataaaaggagttttaggttttacccatggattgtttacacaaacaaatttcctatcttaccgatgctcttatttcttaatcaagtaacccattgaacagggggatttattaggcgtggaaagaggatgactaaattgttaggaagtccttcacttatccaaagaggatgacaaaaattttgttaatagaagcaaaaaaaaaaaaaaan

SEQ ID NO: 4485 - DNA, 418 bp, Glycine max
  misc_feature (244)..(244): n is a, c, g, or t
  Peptide Sequence Number=SeqID_7521
  Probeset Number=SeqID_14264
gaagaatttgccagaactatcagaaatagaagtaaatgggcagccagccctaattcctaagcaatctccaagaagaaggtcaatggctgtggtgctggacttagatgagacacttgttcattctacactggaaccctgtgatgatgcagatttcacttttactggctttttcaattgaaaagagtacacactatatggggaacagaggccttatctccacacattcttgaaaaaagtatcaganatgttggaagtaggaatgtttactaccagccaaatcatatgtgcagagcaactacttgatatatgggagcgctaataaaagattgatgtctggtcgcatatgtcgagatgcggggttttgtgaggatggaactgcgacgaacatgtggctatattaaatagtgagtcttcaaaa

SEQ ID NO: 4486 - DNA, 1447 bp, Glycine max
  misc_feature (68)..(68): n is a, c, g, or t
  misc_feature (151)..(151): n is a, c, g, or t
  misc_feature (175)..(175): n is a, c, g, or t
  misc_feature (182)..(182): n is a, c, g, or t
  misc_feature (438)..(438): n is a, c, g, or t
  misc_feature (442)..(443): n is a, c, g, or t
  misc_feature (510)..(510): n is a, c, g, or t
  misc_feature (521)..(521): n is a, c, g, or t
  misc_feature (532)..(532): n is a, c, g, or t
  misc_feature (542)..(542): n is a, c, g, or t
  misc_feature (547)..(547): n is a, c, g, or t
  misc_feature (562)..(562): n is a, c, g, or t
  misc_feature (732)..(732): n is a, c, g, or t
  misc_feature (1028)..(1028): n is a, c, g, or t
  misc_feature (1060)..(1060): n is a, c, g, or t
  misc_feature (1156)..(1156): n is a, c, g, or t
  misc_feature (1158)..(1158): n is a, c, g, or t
  misc_feature (1229)..(1229): n is a, c, g, or t
  misc_feature (1434)..(1437): n is a, c, g, or t
  Peptide Sequence Number=SeqID_7522
  Probeset Number=SeqID_14265
ctgtggatgagtgggtggaatcgaagtgatgggagatgatatgatgattatgtatgagatggacgggnaggagtagatattgtgtaatagagtatggtgtgtgataattctagtctgaattaagtagtaatagtgttatatatgtgagtgnatagtagcaagtggtgtgatgagnattatgnaagagattagtagagtatatagctgagtctatggtaatagtgatgagaatagatatttgtcggggtgcgtgagtgttgaatagcgtgagaagaatgtgcggtagagatagatgtaaggagagatagagtagggggtttagaatagagagagttgatatgtaagaacagatagaagagagagtgaggatgaagtaagcgagggttgtagactgtgaggtgtaggtgtgtgatgggaatgttgatattttattatganatanntggggatgatgtgtgaggaggtggtgtgttggggaggtgtgatgaatatggaggatagtaagtatgntatgtgtatgncttaatttttnttattatttntcatntattaatcagtgtgntccaaaaatatatatattgatattataataatagtgtgtaggagcggtgatatgtgggttgagtcggttttttattagagtgttgtataatgtatatataatatatatcttaattattctatatatatacttatatatataatattataattatataatatattgctgantgtagaggagagggctgaagatgatatagtatgttgttgttgatggataaagagtgagagagaaagagtatagcagagagagagaggaggtagaaggtaaagagtgggagaggatatgaagaagaatgaggaggaagaggagtgaggtacgggggagggagagaggcagtggatgggagggaagaggagagtagtagtgtgctggagtggtgtgggagagaggaaggggtaggtggagtgagggttggtgtgagttgagtggtgtattattgttgctcgtggttgaggtgtattanagacggagtatgagttattgtattatgatggntcgagcgcgtatatatagatatacaaggagaggtgagagaagagggaagtaagcagaagagaagagagagcaaatgatgatggtagagagtgaagngngtagcttgatatgtagtgaagatgtgattagtttatgtggttcgtcacatgagataatagttagggtgtangggagaggcagtgaattgttgagcatgggaagagatttataggaggcgatggagaggagaggagatatgagaaggaggatgggagtgctagatatgtggtatatatcgttgttgttatataatttgatgaggagtaggcgggggtgggagtggagaagtgaagtatatgaatagtgtatagatatgaggaaagaagagacaaatnnnnaataataaaa

SEQ ID NO: 4487 - DNA, 739 bp, Glycine max
  misc_feature (632)..(739): n is a, c, g, or t
  Probeset Number=SeqID_14266
tcgagtcagctacggtaggcccccccccgaacagaagtaattttatgttcgttttgaaaacagtttgtggtgcttgtggtttataaaatttaatttattgtaacaaaatggctttgcgttggggtatttcatgtgccggcttgattgccaacgattttgttaacgcactgcaaacattaaatccagacgatcatcaaattgttgcaatcggttgccatgatatcaacgaatcaaacaaattggcaacaaaatttgaaattccaaaagcttatggctcatacttggaattggccaaagatccaaatgttgagattgcatacgtcggcacactgaatccatggcattacgaagtgtccgtgttgatgttggagcatggcaaacacgttttgtgcgaaaaaccattgtgtatgaactcaacgcaagccgaaaaattggttgcactggccaaggagaagggcgttttcttcatggaaggcatttgggttcgattcttcccaagctatcaacacgttcgcaaagaaatccgaagcggtgcactcggtgatattgtatcgatcgtatcggaatttggaatcgaagattatgaaagtggccgcttcaaaaaagcatgggcggggacaaacaatttggannnnnnnnnnnnnnnnnnnnnnnnnnnnnnnnnnnnnnnnnnnnnnnnnnnnnnnnnnnnnnnnnnnnnnnnnnnnnnnnnnnnnnnnnnnnnnnnnnnnnnnnnnnn

SEQ ID NO: 4488 - DNA, 512 bp, Glycine max
  Peptide Sequence Number=SeqID_7523
  Probeset Number=SeqID_14267
atccacgactgatccaaaaccattccttcaaagctctctcataccaatcaaccaacgatggcgtttcctaaagttttcttcgacatgaccgtcgacggcaagcccgcgggaaggatcgtgatggagctgtacaccgacaagactcccaagactgctgagaacttcagagctctctgcacgggtgagaagggtgtcgggagcaaaggcaagcctcttcacttcaaggggtcttccttccaccgcgtgatccctaacttcatgtgccagggaggagatttcacggccgggaacgggacgggaggcgagtccatctacggggagaagttcgccgacgagaatttcgagaggaagcacaccggtcctgggatcctctccatggccaacgctggtcccaacaccaacgggtcgcagttctttatctgcactgttaagacagattggcttgatggtaagcacgtggtgttcgggcaggtggtggaagggttggacgtggtgaaggcgatcgagaaggt

SEQ ID NO: 4489 - DNA, 506 bp, Glycine max
  Peptide Sequence Number=SeqID_7524
  Probeset Number=SeqID_14268
ctcttcctttcccacaaatctctcctgaaaaccctaaatcaaaagtcgagaacaatggcgtcgttcgctcgccgagccatgagcctagctcagattccatctgcacgtgcccccgcctctgtctgtcagcgtcgtggtctcgctggcgccgctgatcaccatggatctaccaaggttgacttctggaaacagcccacgaacccaggaaactggaaagaggagcattttgtgcttatttcgctctctggctggggcatgcttttctacggtggatacaagctcttcaccggcggcaaaggagagaagcctgtcgaggctgcacaatgaatttatcactggggaaaagagtcttcttctcgtgcatttactttcactttcagcaccttgtgactggtctttttatcaaagccagcaattacttgtttgtttttctttgacaataatatgcatcatttaatcaccttttgagatctcaatcatgtatccagtggatgattctgtttcat

SEQ ID NO: 4490 - DNA, 2036 bp, Glycine max
  misc_feature (5)..(5): n is a, c, g, or t
  misc_feature (8)..(8): n is a, c, g, or t
  misc_feature (21)..(21): n is a, c, g, or t
  misc_feature (39)..(39): n is a, c, g, or t
  misc_feature (46)..(46): n is a, c, g, or t
  misc_feature (49)..(49): n is a, c, g, or t
  misc_feature (57)..(57): n is a, c, g, or t
  misc_feature (72)..(72): n is a, c, g, or t
  misc_feature (80)..(80): n is a, c, g, or t
  misc_feature (112)..(113): n is a, c, g, or t
  misc_feature (115)..(115): n is a, c, g, or t
  misc_feature (135)..(135): n is a, c, g, or t
  misc_feature (137)..(137): n is a, c, g, or t
  misc_feature (142)..(142): n is a, c, g, or t
  misc_feature (147)..(147): n is a, c, g, or t
  misc_feature (152)..(152): n is a, c, g, or t
  misc_feature (155)..(155): n is a, c, g, or t
  misc_feature (167)..(167): n is a, c, g, or t
  misc_feature (176)..(176): n is a, c, g, or t
  misc_feature (180)..(180): n is a, c, g, or t
  misc_feature (188)..(188): n is a, c, g, or t
  misc_feature (199)..(200): n is a, c, g, or t
  misc_feature (224)..(224): n is a, c, g, or t
  misc_feature (241)..(242): n is a, c, g, or t
  misc_feature (252)..(252): n is a, c, g, or t
  misc_feature (266)..(266): n is a, c, g, or t
  misc_feature (285)..(285): n is a, c, g, or t
  misc_feature (287)..(287): n is a, c, g, or t
  misc_feature (293)..(293): n is a, c, g, or t
  misc_feature (314)..(314): n is a, c, g, or t
  misc_feature (317)..(318): n is a, c, g, or t
  misc_feature (330)..(330): n is a, c, g, or t
  misc_feature (338)..(339): n is a, c, g, or t
  misc_feature (345)..(345): n is a, c, g, or t
  misc_feature (361)..(363): n is a, c, g, or t
  misc_feature (370)..(370): n is a, c, g, or t
  misc_feature (380)..(380): n is a, c, g, or t
  misc_feature (408)..(408): n is a, c, g, or t
  misc_feature (416)..(416): n is a, c, g, or t
  misc_feature (425)..(425): n is a, c, g, or t
  misc_feature (438)..(438): n is a, c, g, or t
  misc_feature (442)..(443): n is a, c, g, or t
  misc_feature (460)..(460): n is a, c, g, or t
  misc_feature (469)..(469): n is a, c, g, or t
  misc_feature (476)..(476): n is a, c, g, or t
  misc_feature (481)..(481): n is a, c, g, or t
  misc_feature (483)..(483): n is a, c, g, or t
  misc_feature (488)..(490): n is a, c, g, or t
  misc_feature (495)..(495): n is a, c, g, or t
  misc_feature (506)..(506): n is a, c, g, or t
  misc_feature (514)..(514): n is a, c, g, or t
  misc_feature (531)..(531): n is a, c, g, or t
  misc_feature (538)..(539): n is a, c, g, or t
  misc_feature (549)..(549): n is a, c, g, or t
  misc_feature (557)..(558): n is a, c, g, or t
  misc_feature (580)..(580): n is a, c, g, or t
  misc_feature (585)..(585): n is a, c, g, or t
  misc_feature (597)..(597): n is a, c, g, or t
  misc_feature (651)..(651): n is a, c, g, or t
  misc_feature (654)..(654): n is a, c, g, or t
  misc_feature (663)..(663): n is a, c, g, or t
  misc_feature (681)..(681): n is a, c, g, or t
  misc_feature (694)..(694): n is a, c, g, or t
  misc_feature (696)..(696): n is a, c, g, or t
  misc_feature (698)..(698): n is a, c, g, or t
  misc_feature (719)..(719): n is a, c, g, or t
  misc_feature (727)..(727): n is a, c, g, or t
  misc_feature (729)..(729): n is a, c, g, or t
  misc_feature (743)..(743): n is a, c, g, or t
  misc_feature (750)..(750): n is a, c, g, or t
  misc_feature (759)..(759): n is a, c, g, or t
  misc_feature (770)..(770): n is a, c, g, or t
  misc_feature (777)..(777): n is a, c, g, or t
  misc_feature (807)..(807): n is a, c, g, or t
  misc_feature (816)..(816): n is a, c, g, or t
  misc_feature (820)..(820): n is a, c, g, or t
  misc_feature (849)..(849): n is a, c, g, or t
  misc_feature (873)..(873): n is a, c, g, or t
  misc_feature (875)..(876): n is a, c, g, or t
  misc_feature (905)..(906): n is a, c, g, or t
  misc_feature (911)..(912): n is a, c, g, or t
  misc_feature (942)..(942): n is a, c, g, or t
  misc_feature (956)..(956): n is a, c, g, or t
  misc_feature (979)..(979): n is a, c, g, or t
  misc_feature (1010)..(1010): n is a, c, g, or t
  misc_feature (1032)..(1032): n is a, c, g, or t
  misc_feature (1034)..(1036): n is a, c, g, or t
  misc_feature (1039)..(1039): n is a, c, g, or t
  misc_feature (1052)..(1052): n is a, c, g, or t
  misc_feature (1054)..(1054): n is a, c, g, or t
  misc_feature (1056)..(1056): n is a, c, g, or t
  misc_feature (1066)..(1066): n is a, c, g, or t
  misc_feature (1070)..(1070): n is a, c, g, or t
  misc_feature (1082)..(1082): n is a, c, g, or t
  misc_feature (1101)..(1101): n is a, c, g, or t
  misc_feature (1104)..(1104): n is a, c, g, or t
  misc_feature (1116)..(1116): n is a, c, g, or t
  misc_feature (1128)..(1128): n is a, c, g, or t
  misc_feature (1146)..(1147): n is a, c, g, or t
  misc_feature (1192)..(1192): n is a, c, g, or t
  misc_feature (1224)..(1224): n is a, c, g, or t
  misc_feature (1236)..(1236): n is a, c, g, or t
  misc_feature (1271)..(1271): n is a, c, g, or t
  misc_feature (1297)..(1297): n is a, c, g, or t
  misc_feature (1313)..(1313): n is a, c, g, or t
  misc_feature (1378)..(1378): n is a, c, g, or t
  misc_feature (1545)..(1545): n is a, c, g, or t
  misc_feature (1547)..(1547): n is a, c, g, or t
  misc_feature (1585)..(1585): n is a, c, g, or t
  misc_feature (1646)..(1646): n is a, c, g, or t
  misc_feature (1905)..(1905): n is a, c, g, or t
  misc_feature (2009)..(2009): n is a, c, g, or t
  Peptide Sequence Number=SeqID_7525
  Probeset Number=SeqID_14269
cccantanttcagtcagtgangcagatctgatgtgcgcnagttgcngcnagggtatnctacggagataagcngactagcnggctcgcaactacgagaagatccggcatgatnngncgtacatcgacgctcatcgncnatcgntacantacgntgncgcgtcgatganagcgacagnaatngctcgtancatcacaccanncgtgcatcgagtatcgatgcgtangtcgtcaactgataagnnaacgactcgngacgacgaatgcgnagcagatcaggtcgcagantngactcnactcaggcatccacgtcatgntgnntgcgcatcacanagggcatnncgatanctcatagtcgatcaannngatcgancctgcgatcnccggcagacctcatatcgcgcatatcgnacaagtancacacacgnccgtcaaccatcnactnncacacatatcacttacntgctcgtgntgacagnactancntgcgnnnccatngtgcgcacgcncaggcagnctatataccactagtanatcgtcnnatcgatgtanaaacatannatcatagatcgtctcttacagntactnatacgtagcgangcggcatatgcagctccagcaaactatgaatcggacagcactctttctgggtcnctngatgtctanaattctcataaccgtganaatcgcacgtcgnancncactgactcataacacgtatnaaaacgancntatatcgtatcgtnatataanatgtctgtnactcagccctnctagccncaccacgtattcatcatcgcgagtgtcgcncttgtctgncgtnttccgggcgcgcgtttgtcggctttgcgngaacagatccgtcagcatcatcangnnacacttgatagcatcatctcgactactannctaanntttgtataaattactaccacggttcgtgtngcgcaccggagcgncgcgcgtcgatatacaaactganatatgtcgcgacggtaggcgcgcatctatanacactatgattcgacgcgttgngnnncgnccgcagggacganananctcaccgacnaatngcgctcagaacnacgcctcagcgctgtcgangangcgcaatatacnctcgacccgctnaaaaaagcatcgggcgannatgtaatctgtcgttcagtccttccctattctactcttcactctntgccgagatcgcggacgcgccgatcaccattnagagtatataangattgatgctacgtatcaatcctccataggtatancactagcgtagagaattaagatgtcntgatagagcaacgtcngtatacaccggtgtgtgcgtagctcctagacctgatgtatgagattggtgtggggcggtgatacnactatagagataggcgcgtcacacacactatgatatactaactcatcactacctcgtgagcagacaccagtcgccgcagtggtggagtataaagctatactgtgtataccataaagttaacactgctatacacgagcgggactgggattaatatactgacgacgatnantcgcgcgacacacccataccacgactacgtctcaacancacgtccgatcgcgccgccggcggctagcttgacctgacacactgacgcatgagtacaacncgacgcgcgaccatagacagatctaaagcgttcatgtagcacggtattcaagcggccgcgctaataaaaagatgagaataaatatgcgtataaccactctgtgctgcgtggaaaagaatcagccagtcggctaaccaagccggacagaggactacagaacaatctacacgagaagcaggaggagcttacgacgagccactaaggacaaaacatagcgtgcacgtaacactgttctcactactattgtcacactaatatntccatatacttatcgctgtgcgtattatacagcggtgcgagacagacacacgggcagggcgacacacgacgcgcgcgcgcgtagaacataggtatgaaaggggnaggggagagaatagtcgtcgagtgaca

SEQ ID NO: 4491 - DNA, 800 bp, Glycine max
  Probeset Number=SeqID_14270
acattcctctcctcaaactctccactcacagcgaaggccggtacttccaacaacatcttcacgtacctttctccatactcatactctttccaccacatcaacctcttcaaacaatcacaatgttcggcttcaccctttaccagagcgcgtgcttgtacgccagcgtgacggccttctcagccacctgggtcgccctcgcactggccatccagcacggcaaggctggtccattcaactaccaccgtgccatcaagagaggtgcccgcatcccatggcgccgtattcctggtatgaagatctagatgcccaggcatcgccgccaccgacggtgtcagcggtggcagtctcgtcgttgcaagatgaccgaggcttcactcaaggcgaggagtctttcaccatctcctcctcgtctttcatgcgcaacgtagcgacatccgcgaacgctctacgccacgactattctctgcacgcccgtcgcatttaattcacgacaggcagttaatctgcatgttctttacgccttgacgccttcgtcttggtgtcttggtgactgcagtctttcttgcacgatgcatccaacaatacaaccaatacattcgtcgctcgagcagcactcttcagcacgaaactcacccgctcgcgcacattgcgacgactcttccagtgtccaagccacagaaactggccctcaccgctgcctttgctggccctgcatacccactgcaggtcggccataggcacacctcgacactcgctcatctctttccagctgtcaccagctcagtccccgcgggatttgt

SEQ ID NO: 4492 - DNA, 425 bp, Glycine max
  Peptide Sequence Number=SeqID_7526
  Probeset Number=SeqID_14271
ctgttggtgccgctctcagcggtcttcaccctgttgtaagccaccccgggcaatgcgctcttccgcagccttgatcccagactactttgtgacaaccatggttctaaccaatatgtcgctacagtgcgagttcatgaccttcaacttcgccatgcaggccatcgatcaggtcgtcaactcggccgccaagaccctctacatgtctggcggtatccagccttgcaacatcaccttccgtggtcccaacggcttcgctgccggtgtcgccgctcagcactctcaggactactctgcctggtacggcagcgttccaggactcaaggtcgtctccccatggagtgctgaggatgccaagggtttctgaagaccgccattcgcgaccccaaccccggagtgtcctcgagggggggcccggtacccaatcg

SEQ ID NO: 4493 - DNA, 1660 bp, Glycine max
  misc_feature (22)..(22): n is a, c, g, or t
  misc_feature (1012)..(1012): n is a, c, g, or t
  misc_feature (1278)..(1278): n is a, c, g, or t
  misc_feature (1296)..(1296): n is a, c, g, or t
  misc_feature (1327)..(1327): n is a, c, g, or t
  misc_feature (1412)..(1412): n is a, c, g, or t
  misc_feature (1478)..(1478): n is a, c, g, or t
  misc_feature (1539)..(1539): n is a, c, g, or t
  misc_feature (1564)..(1564): n is a, c, g, or t
  misc_feature (1570)..(1571): n is a, c, g, or t
  misc_feature (1624)..(1624): n is a, c, g, or t
  misc_feature (1637)..(1637): n is a, c, g, or t
  misc_feature (1639)..(1639): n is a, c, g, or t
  Peptide Sequence Number=SeqID_7527
  Probeset Number=SeqID_14272
tgtccctcgccgctacctccgncgcctgcgtctttcgcgcgctccagattcaggccccgccgcaaccccgccgcgccgtttgtgcgtttggtgttttttactcgacgtacccgccgattatataacccaatatattatacagctaatatagtcatgcgaccacactaattatgtatttaataataagggggtgctgatgttctgcaaatcaacgtaaaacatgggactgttataaactccctcactattttattacacacaatatgccgccacagcacaatttttatctcggccgtgatattattttattatattctacgcgcgtcgtatcgcgctataataatcccgctcggagatgtaacaattatacatatacaccccccctcaattatttaaaattgcgtacgccccgtattatatgtttatactgacttacgcggcgcgcttataaaaacgcgcggggcgtgggtccgccccgcgcgccccacaagcccacacacaagaaaacagtgtatacgtattcccgcgggtgggttattatcttgcgttagtaaaccgcgcgcgcgcgaatacaaataatattattacgccccctcaaaaatataaccagtatccgcggacggtagagaacgtcatctaattcttcatcccccggcatttaatttattgttgacgattaatatgtaaattaagggtaacgcccccggcgataataaaataggcggtgggtgggcgggaagaagatagacacacgcgcgtataaatggtccatacagacatcttgtttgctaggacaggacgaggcggcgtgggcataaaatctatcgaaaatgggtgcgtcgtggttaattaattttcgcgctgatcagcaatgtaatacttgttttgtgcatacaccaccaccacgttatttatttagtgcgcaaaccggcgcgtcgtgctgttgttatacataggcttgtcgttttaagcaccagcgctcgtgtttgtacggactctatgatcttgcttntgttatgctagaccatgtcgcaacatgatgtcggtctggtctataatactgccgacaagatgtgcactgaggtcgtacatcctctcgcaccacacacccttcaccatattactatcactcgccgcgacttgaaatagcgctccgtctgatgatattgtcgatgtatataaatatagcgcgcgccgcgtgacatatatatacgtccggcgtctgcggatatacaagacggtctgagtaataatattcgcggctacccacaagctcgncgcgcgggatatttacanaaaaacactatatatagtggtgtatcaaaanatcatacgtcgcgcgatactacagcgtatctcgtgtaatacaaatatagtgacggcgccgtgcggtcggagtggattaagtgcancaacaaactatcttcatagaccagtacgtcccgtgctctggacatgcgcggcgtatacatatatgngcagaagtgataatagtgtgatgctcgcgcgcacgcgcgcgctgtaaattattatgtatanatgtgtctgactgtgacgcgacggngagcgnncaccggaatgatgaatattacgctcgtttgcgatatacgctacgcgcagtatnacagacagtcgantntgtcgatctctcgtcgcgggg

SEQ ID NO: 4494 - DNA, 359 bp, Glycine max
  Probeset Number=SeqID_14273
tgcgttttaatgaaggcgcttctgtgaaggccgcatggccatgccatggctcatgctaccaaacggttccctctatctaataaacactggctatgagaagagcgagagtgcatgtcaatccacacacggccaagcgctggatgcaggatcacaccacatgctggcagctaaactgactcgaacacagcgtgcagcctgatgggcagatgccaagtgacacgaccagtggtggaggtgatgatgctatcaacaccttcttcagtgaaactggcgcaggaaagcacgtgccccgagcgattcttgtagatcttgagcccactgtgattgatgaggtttggactgcgacataccgacaacta

SEQ ID NO: 4495 - DNA, 3464 bp, Glycine max
  misc_feature (3316)..(3464): n is a, c, g, or t
  Peptide Sequence Number=SeqID_7528
  Probeset Number=SeqID_14274
attgctttcagaacagacaatgaacctttcaaggctgcaatgcaaaaatttactgagaagattgtcagcattatgaaggaggagaaattgttccagacgcagggaggtccgataattatgtcacagatagaaaacgaatatggaccagtggagtgggaaattggtgcccctgggaaagcttataccaaatggttttctcaaatggctgtgggtttagatactggtgtcccctggattatgtgcaagcaacaagatactccggatcctcttattgacacctgcaatggatactactgcgaaaactttactcccaacaagaaatacaaacccaaaatgtggacagagaactggactggctggtacactgagtttggaggcgcggtccctcgtagacctgcagaagacatggcattctcagttgcaagattcgtacagaatggtggttcatttgttaattactatatgtaccatggaggaactaactttgatcggacatccagtggcctcttcattgccaccagctatgactatgacggtcctattgatgaatacggacttctaaatgaaccaaaatgggggcatcttagagatttgcataaagcaataaagctatgtgagccagctttagtgtctgtagatccaacagtgacatggccaggaaataaccttgaggtacatgtgttcaagacttctggtgcttgtgctgcattccttgcaaactatgacaccaaatcttccgcagcagttaaattggaaatggacaatatgacctaccaccatggtctatcagcatccttcctgactgccaaactgcagttttcaacacagcgaggcttggtgctcaaagctctctgatgaagatgactgccgtaaacagtgcatttgattggcagtcatacaatgaagaggctgcatcgtccaatgaggatgattccttgacagcatatgcactctgggagcagattaatgtcacccgagattctacagattatttgtggtatatgacagatgtcaacattgatgcaaatgaaggttttataaagaatggacaatctcctgttcttaccgtaatgtcagcaggccatgctttgcatgttttcattaatggtcaactttcaggtactgtgtacgggggactggactctcataagttaacatttagtgacagtgttaagctgagggttggcaataacaagatttctttgctaagtattaccgtgggtctcccgaatgttgggccatactttgagacatggaatgctggggttttaggcccagtcacacttaagggtctaaatgaggggactagagacttgtctaaacagaaatggtcttacaagattggtctcaagggtgaagccttaaaccttaacactgtaagtggtagttcctccgttgaatgggtacaaggatcattattgactaagaagcaacctttgacatggtacaagacaacttttagcacaccagcaggcaacgatccgttagctctagacatgattagcatgggaaagggtcaggtatggataaacggtcgaagcattggacgccattggcctggatatatagcacgcggtaactgtggggattgttattatgctggaacttacactgataaaaaatgccggacaaattgtggagaaccctcccagagatggtaccatattcctcggtcgtggctgaacccaagtgggaactatctggttgtgtttgaagaatggggaggtgatcctactggaattactttggtgaaaagaacaacagcaagtgtgtgtgctgatatataccaagggcaaccaactcttaagaacagacagatgctagactctggcaaagttgttagacccaaggctcacttgtggtgtccacctgggaaaaacatctctcagattaaatttgctagttatggattgccacagggaacttgtggaaactttagagaaggaagttgtcatgctcacaaatcatatgatgctcctcaaaagaactgcattggcaagcaatcttgcttggtgactgtagctcctgaagtttttgggggagacccgtgtccgggaattgcaaagaagctctcacttgaagcactatgcggataaggatcatgtgatgcaacagtttgccagataatcatggagcagatctattaggttcattatatagaaaaataacgccccccctttactttgtgtagttgaattccccacatacagaatgcaaacatgcaccaggctgcgcgaaaacgaagtgtaaataaaagaaatgtggctgcaaatgtagtccatagtcagattattctgctgattattactccatacactagggggctttcagttttcaacacagcgaggcttggtgctcaaagctctctgatgaagatgactgccgtaaacagtgcatttgattggcagtcatacaatgaagaggctgcatcgtccaatgaggatgattccttgacagcatatgcactctgggagcagattaatgtcacccgagattctacagattatttgtggtatatgacagatgtcaacattgatgcaaatgaaggttttataaagaatggacaatctcctgttcttaccgtaatgtcagcaggccatgctttgcatgttttcattaatggtcaactttcaggtactgtgtacgggggactggactctcataagttaacatttagtgacagtgttaagctgagggttggcaataacaagatttctttgctaagtattaccgtgggtctcccgaatgttgggccatactttgagacatggaatgctggggttttaggcccagtcacacttaagggtctaaatgaggggactagagacttgtctaaacagaaatggtcttacaagattggtctcaagggtgaagccttaaaccttaacactgtaagtggtagttcctcctcggaatgggtacaaggatcattattgacctagaagcatatattgagagtttacaagaatcagccatcactgtatgctggcagaattgcagcggttccctttcttgagacatggcatggatgaagttattgggaactttttacggcaaggcctagaaccctcggagactatgataacacacgtcatagaaatggagatggactacatcaacacttcccacccaaattttattggtggaagtaaggcaatagaagctgcagtgcaacaaaccaggtcttctagagttggtttaccagtttctagggtgaaggatgcactggaatctgataagggaccagctactgagagaagtgggaagtctcgatctattcttgcaagacatgcaaatggagtagtggctgatcagnnnnnnnnnnnnnnnnnnnnnnnnnnnnnnnnnnnnnnnnnnnnnnnnnnnnnnnnnnnnnnnnnnnnnnnnnnnnnnnnnnnnnnnnnnnnnnnnnnnnnnnnnnnnnnnnnnnnnnnnnnnnnnnnnnnnnnnnnnnnnnnnnnnnn

SEQ ID NO: 4496 - DNA, 1344 bp, Glycine max
  misc_feature (20)..(21): n is a, c, g, or t
  misc_feature (30)..(32): n is a, c, g, or t
  misc_feature (96)..(98): n is a, c, g, or t
  misc_feature (101)..(101): n is a, c, g, or t
  misc_feature (105)..(105): n is a, c, g, or t
  misc_feature (107)..(107): n is a, c, g, or t
  misc_feature (247)..(247): n is a, c, g, or t
  misc_feature (867)..(867): n is a, c, g, or t
  misc_feature (937)..(937): n is a, c, g, or t
  misc_feature (1299)..(1299): n is a, c, g, or t
  Peptide Sequence Number=SeqID_7529
  Probeset Number=SeqID_14275
ttgtgggtgggtgttgtttnntttttttgnnngtcggtgatcgtggcgcagggggggggtgacgatcgggaatgggttagatgtataatatgtaannnaantatncnctgcccaccccccacctcatctcgcctaatagcgtcacgcgcgagatcggccacaccagatacacgcgccacgctgcgcacacgtcggagcagtggatccgagtgacgtacaaacactaagaccacaccatcaacacgangtcgttctctcacatctctcttcaccttcgtccggacgcgcgcagccgccgcgtgctccgtctgctgacggtgtagttgtcgtctgggccacacagtctctccgcagctctctgcccacctgtccgatgtatggccagcgcgcgctctcatcccaggcggctactgtaagtgcgtctatttctcttctgatgctgccctttactctttgctggttggttgttggtggagcggcgacgggtggtggtacggcgatgtgggggagagcgtggggcccgcgcacgccggcaggcgcgggggcgacgccggccccgttccgcgtgcgatgttttgcgtctttgctttcttcttcccattccccccgcacataggtatgggaaggcgatgttgcgatgatgacggaagaaagagagcggcgatgaggtgagaaggactgaccgccgccctacaggggcggtgaggtatcgatgcgccgtgtattaaaaggtagcacgacagtactcgcatcaatagaaaatcctgcattgatgtctccccgcgaaaaggtgtgtggaggcactgcgtggcgcgagcgtaggcggggccgtcttgtaggtgtccgtgcctcagaccatcctgcaanacgatatgaatataccgcgcaagacaccagcactcccactgcagcgcccacacatgtcgaacacgggtgntggacgggcagcgcgggcgtctgcatatataattgatggcgagtggccgcccacacaacgcaccggcagcggcacgcaattagagcaccatagagaacgacgcaccgcgacgtcgctgctgagagtcctatcgactgattcaattatacactcccaccacacaaggccggcgctggcgcacaccacgtagtgcgtgtgatacggtagtacgaaacgcgctgaaacgcagagcgcgcacgcgcggcgtcgtgtcgtgagcgtcgttgctacatatcgcctcatccgcactacgcgcctacgatgctgccgtggaacgctcgccgcgagatgcgatctctcaccccgattcctacactaacgangacattaccctgtcatgacacgatacgcgcacaaacgccgctcaa

SEQ ID NO: 4497 - DNA, 627 bp, Glycine max
  Probeset Number=SeqID_14276
ctttattgtgtttaaacattcggatgatttgtaaggaagagctttgccttgctataccgaggttagctcggagagattctcataaacatgtacgtctgacttcagatcaaagggcaacatgagtaccacctaaaaccctcctaaaccaaccacggagatctcatcgaacggacaaggctaatactggacacgacgcacgactctcttatttagatcgtagcgtacacgataacacggtactgacgacgacagtggaccggcactggaacggatctagagctgaccgcagtcggcaatgacgacttgcttgcagaaaaagctcgctgcgggagcccgccttctctaagctcttgacaacttccatgccctcgacgatctcagcgaaaaccataaggttgccgtccacccagttggaaatcaagctgcgcatgaataactgtcatccgttgcggcagcctgcatgcgtgtgaccatgaagatgatccatgccttgactggcttgtctattgacttatatccggcattcttatcgcctcacatggaatcatcgccggctgctatgccttgtggaatgatgcaatctgtatgatgaaaccggtctataagcactggcaaacgctgtcctcg

SEQ ID NO: 4498 - DNA, 1548 bp, Glycine max
  misc_feature (14)..(14): n is a, c, g, or t
  misc_feature (17)..(17): n is a, c, g, or t
  misc_feature (19)..(19): n is a, c, g, or t
  misc_feature (21)..(25): n is a, c, g, or t
  misc_feature (51)..(52): n is a, c, g, or t
  misc_feature (942)..(942): n is a, c, g, or t
  misc_feature (968)..(968): n is a, c, g, or t
  misc_feature (1171)..(1171): n is a, c, g, or t
  misc_feature (1329)..(1329): n is a, c, g, or t
  misc_feature (1340)..(1340): n is a, c, g, or t
  misc_feature (1466)..(1466): n is a, c, g, or t
  misc_feature (1476)..(1476): n is a, c, g, or t
  misc_feature (1487)..(1487): n is a, c, g, or t
  Peptide Sequence Number=SeqID_7530
  Probeset Number=SeqID_14277
tttttttttttttnttntntnnnnnacctctttctgctctgttcgtcgtcnncccccaagaggacgtggggctcccccgcgggcggcggcggagtttaaaataaaaagtagagtcaccgccgagttcggaggtagtttgttcggcagcaagcgacgagtagcaactattctacctaggtggctgacgaccgaacacgcagcgatgacccgtgtactgcacttttggcgccaggtccggcgtatttgcctccgtgttttacgtatatacatacgggaagcagcatgagtgcgatgtgtgctaaggggggcttgtagagaggatctgggcctgggattgcgtgcctacttagctccccagggccggactgtgggccacacgcggcagctgggacagtggttgtgctaacgcggcgacacccgaagaagcccgcctcagtggcttgatataggtgggagaggtgtggtggatagtagagcggggagtaaggagagggggtgcgggtatcattgagatggacttctgtgtaaatagattattattcgttacaccatgtcgcgtttacatgtaacacagcaatgccgtcttgagacaagagattgtggcaacgcatgaagcggctctcagagctctatagtataacaaccgttgatggcggctccgatgataccccggacactcccctccgagtagtcctcggcctcttatctgtcagtatagtgtgagctttagggacacttgttgtatttcttcaatatctaacacgtgtaccagcaggagaagactctttgtggtgataagttactatagagcgtgggcataacgagctgtgagaatgtagtagtctcgcctgggctcgtcctctagaacaagaggatagtcatatcgcgcgtatagtttgatgtctttggcgtgcgtcgcgtgtgggtactcctccacctcgntcggcgccggtacgcgcgccgcctcngccccgaccgcgagtctgcctccgcccttctacagagcgcgctctcacggtgcgtgatgtggaccgctgatgatctatagatacttagagtgtggtctgtgtctctgatctcatattgtacctcgatcatagcgagtcaaatagagacaacgagacaaccagcgatacggtgaagatatagatagtataaccaagccactcantctctatcacatcaaacacagatgtaccacactataaataatgacagtcgggcggttgtgatgatgacatatgtgtcctatatgtgtgggacagcggtctagtaaagtatacactttcgtatatgattctatatctaagacgatgatcataacggttntcccgccgtcntctcgtgtgcgggcgcacgcgttgagataggacgcgtgccgtccgcgtggcagacctctgatggaggatgtggaatgtgagtatttcatagaacacctattccgcctctgctttgttatcccattngtgctcttcntagacgcgccncgcgccacacaggcgagatcagacgttgctagccccacacacacactctgggtcctagact

SEQ ID NO: 4499 - DNA, 1500 bp, Glycine max
  misc_feature (12)..(13): n is a, c, g, or t
  misc_feature (26)..(26): n is a, c, g, or t
  misc_feature (1101)..(1101): n is a, c, g, or t
  misc_feature (1165)..(1165): n is a, c, g, or t
  misc_feature (1199)..(1199): n is a, c, g, or t
  misc_feature (1318)..(1318): n is a, c, g, or t
  misc_feature (1415)..(1416): n is a, c, g, or t
  Probeset Number=SeqID_14278
gaaaaggcaaanngaacgggaggggnaacccttatattaatcctattcactcactacccactaccagcaccatcatcactcctctctaagatacacacgtcgctattctctctcctctctgcgcgcggagcacatatctatatactcatagccatatcgattgtggtttcttcttacaaatacttccattctatactagtaatatatctcctactgtctatctaccaccacattttattactaacattgttccacacattaatattgaatcgtcgtcccatctgtctctcatcttaatatcttatctacatagaataatacaaaatatatattatatatactctatatacttcatatatcccttctctgatatatctggttagtctatattttcttcgtgcttcatcgttcaattccactcgttggtctattattatcctctattttattaccgcatgtgatctaactcgctgtgttacatattatttctctgatggtgtgtttgtttttgttttcctgcacccccaaatattctatatttactaactcaatgtgtgttaacaacaatagtttggtggtattacatataactatatgagtatgatgtggcagcattctgcatcttcactattcttccatcgtgcaactcccctatgtgtgccataatttctcttcgtaactaaactctacgtcaaacactacttcttctccctcttacttatcattatctcttcatatttaatatactcggactcctaccaatatttaccgtctattaattcatgtagctacactctatattgttcaaatataatatcatgcttccgctatgcgaatgtgtataatacagttcttctgtatcgtcacccacgccaccacatatcaaacatataacatgtgcatacctgtcagtttctctctcttcatctattaaacacatacaatctcgctgtccaccacaaatagagtctgtgctcattcaccactacaccacacctgtgctaaatcacacacaaacatattactctgtctgctacctcattcatatacaccttctccatctatatatagttttcacatccatgcctccctatattcttntactattcttctctgcatgttgtggtgtcggtacacgtagcacaggtactccatcgtggtgatnttggactaatctattactaatcgataactatatnatgattatacaatctcatatcaactcactatctctcctagctactctctatcaagactaatctatcatcctacgtctctttctctctcacaccgtctctcttgtctctctattctgatntgaagtgaccgttccaccagttactactcattacacacactacacccgctatgtctcttctcacaccataatatattcgccgcgttatatgttatannacataaaatctacaccacacacacactctatcagcacttctattacaaccacaacatctctcaccatacatcgaatatatatag

SEQ ID NO: 4500 - DNA, 1509 bp, Glycine max
  misc_feature (1)..(1): n is a, c, g, or t
  misc_feature (8)..(8): n is a, c, g, or t
  misc_feature (46)..(46): n is a, c, g, or t
  misc_feature (57)..(57): n is a, c, g, or t
  misc_feature (130)..(130): n is a, c, g, or t
  misc_feature (154)..(154): n is a, c, g, or t
  misc_feature (180)..(180): n is a, c, g, or t
  misc_feature (229)..(229): n is a, c, g, or t
  misc_feature (251)..(251): n is a, c, g, or t
  misc_feature (316)..(316): n is a, c, g, or t
  misc_feature (347)..(347): n is a, c, g, or t
  misc_feature (426)..(426): n is a, c, g, or t
  misc_feature (456)..(456): n is a, c, g, or t
  misc_feature (582)..(582): n is a, c, g, or t
  misc_feature (591)..(591): n is a, c, g, or t
  misc_feature (697)..(697): n is a, c, g, or t
  misc_feature (733)..(733): n is a, c, g, or t
  misc_feature (769)..(769): n is a, c, g, or t
  misc_feature (781)..(781): n is a, c, g, or t
  misc_feature (788)..(788): n is a, c, g, or t
  misc_feature (1011)..(1011): n is a, c, g, or t
  misc_feature (1134)..(1134): n is a, c, g, or t
  misc_feature (1286)..(1289): n is a, c, g, or t
  misc_feature (1291)..(1291): n is a, c, g, or t
  misc_feature (1295)..(1295): n is a, c, g, or t
  misc_feature (1298)..(1298): n is a, c, g, or t
  misc_feature (1336)..(1336): n is a, c, g, or t
  misc_feature (1338)..(1339): n is a, c, g, or t
  misc_feature (1379)..(1379): n is a, c, g, or t
  misc_feature (1418)..(1418): n is a, c, g, or t
  misc_feature (1420)..(1420): n is a, c, g, or t
  misc_feature (1422)..(1422): n is a, c, g, or t
  misc_feature (1424)..(1424): n is a, c, g, or t
  misc_feature (1426)..(1456): n is a, c, g, or t
  misc_feature (1460)..(1460): n is a, c, g, or t
  misc_feature (1462)..(1462): n is a, c, g, or t
  misc_feature (1464)..(1464): n is a, c, g, or t
  misc_feature (1469)..(1478): n is a, c, g, or t
  misc_feature (1480)..(1480): n is a, c, g, or t
  misc_feature (1482)..(1484): n is a, c, g, or t
  misc_feature (1488)..(1489): n is a, c, g, or t
  Peptide Sequence Number=SeqID_7531
  Probeset Number=SeqID_14279
ngttactntagtcagacacgtcacgtcacctgcgtacagatagcgngtccgatggangtcacacgttgcgtcgggccgcaggtcgagctgttgtacatccagtcctcactgcactgcgcactcagcactncgcttcgcgagagacgtcagcgangcgatgatatatacacactagtagtngcagttacacgcacatatacaccaaccgcagagcgacgcgttcgtactnctacatctacacactcatattnacaccgcgttcgcatgccgctcgagcgtgacgcgcggcgcgtcgctacacagcatattgtatgangtatccacaatgagaaatcgtgaatacatgncaccactacgtatatatatggagacgaagagagtacagtcctcgtcgtcatgtgattctactctcatgagtagcgcgtntgcgacgtgtacacgagacagtcagtagtncgatacatcactgtctatacgcgatgagtgagtgtcagagatatagagtaagtagaaggacaaggcaagaggcacacacacacaacactagctgctacgtgtgatattactctcagcgcacatccngtgcggtgngcggagcgggaggcgcacgacacacacatcacaaataacaaacacaactcactaccacagtacatatagctacgactttatcaatgtgtatgaggcacatcacatncgatattatactactctacaacgaagctgatgacangcattatatatagtataccgacaatacagaacatangacacacgacgngaccacncgagcagcgaagagaagtacgcgaacacaagcacacagcaccacaagcgattatatactcataatcagtaatagatctcgtagaacatataccagtcatctacacctcactacaatccccatcacacaaccacacaacgacgcacaccatggacctcatacatgccacaccagcgcacacacaagcatattaccctaacatatagtattatcatctacgatangaagtacacactactcttcattactagagacacatacataaatcagaagacatagagacatactaatctcatagatggagttcagaatactaattaggtatatcatctgtcgacccatcacanacatcactcacacatctatacaacgactatcaaatcacatactacagtaccacacatctacacgagacatcgcatcaagtgcgacgacacacgagctacgtgctacacagaccagcgacagtcacatcgcataacacagcgcacaccacaannnngnctgnagngtgtgctcatctttagtactactaccagtgtgtggggntnnttgaggcgtgcgattaaattatatgtcgtctctcatagangggtggtcactctcctcgtaatgaatctcttcggtcggngngngngnnnnnnnnnnnnnnnnnnnnnnnnnnnnnnnctgncncnggggnnnnnnnnnngngnnngggnnggggggggggcgggcccccc

SEQ ID NO: 4501 - DNA, 516 bp, Glycine max
  Peptide Sequence Number=SeqID_7532
  Probeset Number=SeqID_14280
ccttttgcaattttctgaatgatctttgtgtcaacctgaatttgttggacaaagcatgtgaacttctggacctggggttgccccttgaaatatatacggataaacagtccaagtctcaaactcagtggtctctacattaaaagagtctctcgcttggagcttcgctggctgcattacatgtttggataaatgacttgtccaagactttggaatcaggagaggatcttccccccctgcttggaattaaacccggtcatgggaaacacaggtattcggacaaaggtttggcaaatgttgtcaaatcccatttgaaggaactcaatgctccatcccataaggctccgaaaaaggtgggttggtttttgcctccccaggtaccaccaaagtcagggttggagtttcggaaattggttccggcaaaatttttgatctcaagggttttaaggaaggcccccaccttttttcccattaaaaaggtaattccagggaataatatcccacccagtttttttgccc

SEQ ID NO: 4502 - DNA, 1443 bp, Glycine max
  misc_feature (1)..(1): n is a, c, g, or t
  misc_feature (10)..(10): n is a, c, g, or t
  misc_feature (25)..(25): n is a, c, g, or t
  misc_feature (58)..(58): n is a, c, g, or t
  misc_feature (78)..(78): n is a, c, g, or t
  misc_feature (98)..(98): n is a, c, g, or t
  misc_feature (126)..(126): n is a, c, g, or t
  misc_feature (260)..(260): n is a, c, g, or t
  misc_feature (267)..(267): n is a, c, g, or t
  misc_feature (274)..(274): n is a, c, g, or t
  misc_feature (882)..(882): n is a, c, g, or t
  misc_feature (892)..(892): n is a, c, g, or t
  misc_feature (999)..(999): n is a, c, g, or t
  misc_feature (1193)..(1193): n is a, c, g, or t
  misc_feature (1314)..(1314): n is a, c, g, or t
  misc_feature (1328)..(1328): n is a, c, g, or t
  misc_feature (1366)..(1366): n is a, c, g, or t
  misc_feature (1387)..(1387): n is a, c, g, or t
  misc_feature (1390)..(1390): n is a, c, g, or t
  misc_feature (1395)..(1398): n is a, c, g, or t
  misc_feature (1400)..(1400): n is a, c, g, or t
  misc_feature (1403)..(1405): n is a, c, g, or t
  misc_feature (1408)..(1412): n is a, c, g, or t
  misc_feature (1414)..(1425): n is a, c, g, or t
  misc_feature (1429)..(1429): n is a, c, g, or t
  Peptide Sequence Number=SeqID_7533
  Probeset Number=SeqID_14281
ncgcgcgcantgtatagtcacattnacaatgtcagtactcgtcatcacatacgcggtnacgcagtaggtgtgcgcgcngcgtagcacgagagcgtgtnaggtatagacgcgcgttgcgtcggcgtnggtgtagctacgtgatgtgtagttgtctatagttattctatcccggtgtatatcacaatgagaccgtgtgtgtagatagatctcgagctagcgtgcgactatgagtgcggagagagagctgcgagccagggatnataccgntcgcagnatataacggtgatcgacatgacgctcactgccgtcgacgagttaatatctgagagagtgagagagagacagccgtcgccgccgctgctgagtatatgtggtcgatgatgtagtgatatgttggtttgtatggttgtgacagtggtgatgagctctcgtcacgtttatgtgtggactgatgctccgcgagcagtactagtcgctacgaagacaagtgtgacagatactccggacgtgggcatccgagaggtaaatgtgtaaatatagtgtgtaggctgcaagtgcgatgtggatgatggatatgtgtgtgttgaatatttgaagaattgtaggattcgtggtcggcgtgctactttttcgtgtaatgcgttataggtagcgtgatccagacaggctgcaccacgcataaacgttatatatggtcaggtatctatacgttagagagtcgtttacacatctcacatcacataacacgaagactacgtctgcgcacggcctgctttgaggtaagggaagcggcagtgggtcttctgtactgggagggtggtctattaatcgtagagtatctcgcaacgctaatggacagacactgattacagaaacatatanacaagacacncgtggtcgtgtgagaacacacacgcgcgcggtagggaagacgaaggtgtgcacttacttgtgaatgcgagtgaatgatagcaacaacagagaaatgacaggcaaganggaaagtagaggcagataggggtgaagaagggatatagagggcgagtggagagataggagtgtgaagtatgtcgtaataaaaaatatgcatatggcaggctctctactagcgtcgaggaggaatagacatggcgatagatgttcgagggaggagagggagtcgcgatacaagagatggagcttatcgctctcanagagtgctactaataaatagtaaaggcgcaggcgtgtagagatgataaatagcataagaatatatagcatatttctcttcgcaggtctcccggcgcggcatcttcatcttatcttctctancatggcggtccgcncccagcgccgctgcggtcgacgtgcgcgagcggtcgtngtgggggggcgcgcggggggnggngcggnnnnangannnagnnnnngnnnnnnnnnnnngggnggggggggggacac

SEQ ID NO: 4503 - DNA, 1355 bp, Glycine max
  misc_feature (1)..(1): n is a, c, g, or t
  misc_feature (61)..(61): n is a, c, g, or t
  misc_feature (232)..(232): n is a, c, g, or t
  misc_feature (355)..(355): n is a, c, g, or t
  misc_feature (399)..(399): n is a, c, g, or t
  misc_feature (858)..(858): n is a, c, g, or t
  misc_feature (1277)..(1278): n is a, c, g, or t
  misc_feature (1286)..(1286): n is a, c, g, or t
  misc_feature (1291)..(1291): n is a, c, g, or t
  misc_feature (1327)..(1327): n is a, c, g, or t
  misc_feature (1340)..(1340): n is a, c, g, or t
  Probeset Number=SeqID_14282
ngtctctctcgcagtaagtctagcgtatgtacatcgtggtctgacgaagcgcgctacaacnggcatgagcgtaggtgtcgggatgtcgtgcagatctcgagcaaacgtatagtcgactggcgcgcgatttgtaatctgacgatctctgtactgtgagagtgtgatagtgtcgtctcgtgcggttatgtgctaggtggtgggatgagatatgctgcatgactattgactccanaatgcctcggagtcttgtctctatcgtctattgtattgtgatcgagccgtttctaatttgcgagccgcgcctgtgtgttgtgcaatacgaaggcgcgagtgggcacctgcgctagcgatatcngtctttaacagcaaagtcgtggtagcgtgctgtcgctgctgggngtagtacaagctatgagatgctagttacgatgtttgatacgattagtgacgccgagagatacagatgtatcgagttgaacgtgaaggcacatcgactggtagattagatcccaggaggagccacgccacgctgttgttggcccgtggaagtggctctgtggtttccgttcgagcgaggccaggcgcctcaagtggggcgttgatagtttatccctagttatctgctgagcagagtaagcttcaggtgtccagatgacacccagactcgagtagcatgtccacgagtatgggcgcctcgtcgggcctactcagagtgtgagatggagggcctgagcgccgggagggcgtgccgcgccctctccccgaggtgtgttcgcttgtcacccctacagagtgtgctgtgaaacagtaattcgggacgtgatgctaaggtctttctgcactagcgtgggagttganctgtcgcagtagaccgaatattatttattttgtgatcccagctctgagacgaccgcgcggtggcgtcacgtcccctagtcgtctcgagagctaatcaagatagttcctgattgtcgcattccggtgagtgcgcggccgcgactagcttcactctttcggccgaggcgggggcacggagtggtggaggagtgattcttgctggctaaacacatactgtctcgctgcctgaggttatgcggtgtgacgcgggtgctcgttcgttgtctcacggcataatctactctgtctatgagggtacatccgctctcccgtacattacattcacacctccgcggcggggttggcttctctgtgttatatatagtataaccctccccgcgcgctggcgggggagcgacaccatccctacccgggagggnngaataacntaatnggataaatatactacttacaaatctcatagaattanaaaaaaacaaaanagggccacataccac

SEQ ID NO: 4504 - DNA, 1542 bp, Glycine max
  misc_feature (9)..(41): n is a, c, g, or t
  misc_feature (52)..(52): n is a, c, g, or t
  misc_feature (54)..(54): n is a, c, g, or t
  misc_feature (65)..(65): n is a, c, g, or t
  misc_feature (69)..(69): n is a, c, g, or t
  misc_feature (72)..(72): n is a, c, g, or t
  misc_feature (92)..(96): n is a, c, g, or t
  misc_feature (100)..(100): n is a, c, g, or t
  misc_feature (120)..(120): n is a, c, g, or t
  misc_feature (130)..(130): n is a, c, g, or t
  misc_feature (165)..(165): n is a, c, g, or t
  misc_feature (251)..(251): n is a, c, g, or t
  misc_feature (294)..(294): n is a, c, g, or t
  misc_feature (439)..(440): n is a, c, g, or t
  misc_feature (1021)..(1021): n is a, c, g, or t
  misc_feature (1038)..(1038): n is a, c, g, or t
  misc_feature (1096)..(1096): n is a, c, g, or t
  misc_feature (1434)..(1434): n is a, c, g, or t
  misc_feature (1442)..(1442): n is a, c, g, or t
  misc_feature (1461)..(1461): n is a, c, g, or t
  Peptide Sequence Number=SeqID_7534
  Probeset Number=SeqID_14283
ttttttttnnnnnnnnnnnnnnnnnnnnnnnnnnnnnnnnnttccaccccananataattacttnatanggnattaaatttggttgttgtgnnnnncccngaggcgcgagagacaacacnatctcctctnttaataccattctatacctttctaccctatacgcntcactctcccatctaacctttgtcactttacaccaccctcctcaggaaaatagagagggtggaatgttaattatattcattccacntatcctcctttctcctctatcttacatctctccattttatctntatatcctagtatctctaatctatacctctaacgtatatctatcactctcttccttacttccaagtttcatacaaattatatgccttaagaaggttaacgatatttgctcttgccctaaacaccagtctcgcgttctcgcatacnntttctttttctcttccctcggatgtttctttttcccctccccaccccctagccgcaatgagcgcggcggggtcggtgtgtcgctatctcctctctcatccgagatctgtctgcttccctctctgttactcgatctacacatgcagtacttctctcttctttagatctttataaagtgtattagtacttcgtctcatctacatattgctaattattaatattaactacacttctgtatacgcgtgtaaccctaacacttatgtcaagtttcgtcttgtgtgtcttgttgaccctgcctgctcgtcgcgtgcctcgccccgtcttcgcaccaccctctccaatacacactccgtctagtttcggccgttattcattgcacgttgtataattagtattctcaggagctcctctcccaccttatcctttatcattatgatatgtatctatctagcacccaccacacaacgtggcacaagagtggaacgcatcgtactaagactacatttaatcccagcagtagtaggtgatgttagttacactcatctacatatatctttactactatatatgtaatatctatgnaacattccagtagaaanacatctatagtatatacatcgtctcctcctgctcttcgccgtactgctcttccctatnatgtatagtcgcacgctctctatgtatattaaccatctcatcgacacataacatccacgtcatataattcgcccgacccacatctataatcgctacttctatcagatactgtctctgcctgatatcgtgttgaatgctctctctggacagtctatctgttctcttctcatctgccgttctggcgctgttagtgacacgacgagatgacgtacactgtgtcatgtacactgacgaggagcctcgtgccgtattatgtacttacgacatccgctatacgacaagtactcattgagcagcagtgatgacaagacaatagctctgatgtgtgcgctcacgcnagaacganacgatagctgtctagacanagagatagagaggaaaggtagcaaactagtctatgtagatgaatgaacttgtatggtcttctacacgagatatggaatgcg

SEQ ID NO: 4505 - DNA, 582 bp, Glycine max
  Probeset Number=SeqID_14284
caagtggagatagagcaatagcggatgggaatcttctttcttgtcatcaagcagagtcgccacgtaagcttctagtctcaagtgagagtgttatacagtacaatagtacagatggtctcttgtatgtgatagatgccatatccttgattctagagaattgacttgtaccaggtatggtccaaagatgaaatacacgtaatgtgatgttggctcagttaatggactaaagcccatggtttgagcctatcatccctctatattaactcataatagacgtattgcacgcatttcatgtcatatcatatgtaccaccaatccactgagaagcgtagatcatatctgatgtcagaagcaccatatttatgagctcgcagtaatgccttcgtcgaagagacagtcactacaagcatcccctaacaattgagtcattgtttaagaggcaaactgatatatcggctggtccagatgctctggcacgggtgttgcatataatagggtacagcaacagcctcaacaggcagcaaaaagtgatgcatggaacatcagatccaggtcgaagaaaatgggcaggttctcctgcgg

SEQ ID NO: 4506 - DNA, 1664 bp, Glycine max
  misc_feature (1)..(1): n is a, c, g, or t
  misc_feature (70)..(70): n is a, c, g, or t
  misc_feature (131)..(131): n is a, c, g, or t
  misc_feature (134)..(135): n is a, c, g, or t
  misc_feature (149)..(149): n is a, c, g, or t
  misc_feature (156)..(157): n is a, c, g, or t
  misc_feature (159)..(159): n is a, c, g, or t
  misc_feature (161)..(162): n is a, c, g, or t
  misc_feature (164)..(164): n is a, c, g, or t
  misc_feature (173)..(173): n is a, c, g, or t
  misc_feature (194)..(194): n is a, c, g, or t
  misc_feature (204)..(204): n is a, c, g, or t
  misc_feature (223)..(223): n is a, c, g, or t
  misc_feature (225)..(225): n is a, c, g, or t
  misc_feature (254)..(254): n is a, c, g, or t
  misc_feature (270)..(270): n is a, c, g, or t
  misc_feature (377)..(377): n is a, c, g, or t
  misc_feature (446)..(446): n is a, c, g, or t
  misc_feature (463)..(463): n is a, c, g, or t
  misc_feature (472)..(472): n is a, c, g, or t
  misc_feature (476)..(478): n is a, c, g, or t
  misc_feature (493)..(493): n is a, c, g, or t
  misc_feature (541)..(541): n is a, c, g, or t
  misc_feature (582)..(582): n is a, c, g, or t
  misc_feature (585)..(585): n is a, c, g, or t
  misc_feature (607)..(607): n is a, c, g, or t
  misc_feature (611)..(611): n is a, c, g, or t
  misc_feature (697)..(697): n is a, c, g, or t
  misc_feature (718)..(718): n is a, c, g, or t
  misc_feature (724)..(724): n is a, c, g, or t
  misc_feature (773)..(773): n is a, c, g, or t
  misc_feature (812)..(812): n is a, c, g, or t
  misc_feature (816)..(816): n is a, c, g, or t
  misc_feature (823)..(823): n is a, c, g, or t
  misc_feature (842)..(842): n is a, c, g, or t
  misc_feature (889)..(889): n is a, c, g, or t
  misc_feature (905)..(905): n is a, c, g, or t
  misc_feature (942)..(943): n is a, c, g, or t
  misc_feature (945)..(945): n is a, c, g, or t
  misc_feature (1141)..(1141): n is a, c, g, or t
  misc_feature (1168)..(1168): n is a, c, g, or t
  misc_feature (1229)..(1229): n is a, c, g, or t
  misc_feature (1491)..(1491): n is a, c, g, or t
  misc_feature (1570)..(1572): n is a, c, g, or t
  misc_feature (1574)..(1579): n is a, c, g, or t
  misc_feature (1619)..(1619): n is a, c, g, or t
  misc_feature (1630)..(1630): n is a, c, g, or t
  misc_feature (1646)..(1646): n is a, c, g, or t
  Peptide Sequence Number=SeqID_7535
  Probeset Number=SeqID_14285
ncgggcgcgcgcctcactattgtgagtatgtgcacacgacgccatctacacagcagggtgtgtgtggtgntggtcgggacacctcgagtagtctacacaaacaaacacacacacaacagatacacatcatnttnnatatatgtttatcntttattnntntnntngggtgtacntcaccactacccatcaacatnacagtcacgncacttcgattcgtcatctntntatacagccatgatatacgcagagcgatnagcgcggcatcagtgnacacactccacagcggagacgacgaacgtgtgtgcatgtatatctatatatctaatatcatccatatagagacacacgtcgcaagaccataggagagagtagagagnacatgaggagtcggtaacactaggggagcacagagcaacgcgccaccatcacacacgttcaatcatgcnctcaccaactcctgcanttatttttntttnnntatcaaaatcagagngagagtcgcgacagcagcgctagtagtgagagtttcgtcaaagacacnggacgcgccacgactctagacataatgacatcgggtgtcanacnggaggggggcagcgagcactcncctntctcctgggttcatcatatcacgcacgcgccgacccatcaccacagccacacctctgccatcagtgcgccctgtctcgagcagtgngtgatgtgtgcgatgacactntcatcncacctatcctggcatatgtcgccgacgctcctcttccgtacttgtgcgnacatggccataccactccaaacgatcacatatctacacnggancataggncacgatgtcgatggtgagntatcactactctacttgaggtatttagaataatatcctatgatcctntccctacactctcctntgcacacccatcagtcatctacttccgtatctccttnntnttgtgtcttctctctcttatacaataatgtaataatatttcagaatttggggagatagtcctctcgaggtggattcttggaagggcgctcactaatctgcaaatggatcatgaggtagacagcgcgccgagagaatgtataatataatgagtcagagagcgtggcggccacacctcgtcttctggtgactcgtgcncatagtacggagtcaggccgccagggnttgcggcgccgccccacaccacacgagccctgtcatctcagcacatgatatatgtcccgcnggcgccgcgcgggctctctcccgcggccgtgcccccgtccgtgcctcgcctcagttgttgagacttcgctgccgcccaggtcgacacacacgagaagaaggaacaaaccagataccaggaccgcgcggcatgcggcagcgcgtgcaacatcacacacagaaggtccaacgtagacactcctttacacttcacgcgccagcgcgcacaggcaagccacaacccagtaaggcatgtagcccccctctgctcaccctccacccanatcccaagaggagcggtgcccagctagcattatgcaccaccccatacagacacccccgttcggcgccccgggggggggnnnannnnnntttgtgggccatcacaccactaactattagtcaatatagnaattaagctcncgcactgcgtggtggntgggcggagcggccgcgg

SEQ ID NO: 4507 - DNA, 304 bp, Glycine max
  Probeset Number=SeqID_14286
gtctgaattagacgatcaaattcctactgcctgcgatccttttgctgatgcaaatgctgatgactcgggtgctgggtcaaaggagtatctgcctattcgtgtacagcaccgaaatggtatgaaaagcctgacaaccgttcagggattgccaaaggaattcacctcttccaagatacttaaagacgtcacgaatgagttctgttgcaatggaacagccgctcaagacccagcacctggacaggttattcaacttctaggctaacaggaggtgagtgtattctgcttcctacatcacccttgtctc

SEQ ID NO: 4508 - DNA, 600 bp, Glycine max
  misc_feature (105)..(105): n is a, c, g, or t
  misc_feature (230)..(230): n is a, c, g, or t
  misc_feature (249)..(249): n is a, c, g, or t
  misc_feature (582)..(583): n is a, c, g, or t
  Peptide Sequence Number=SeqID_7536
  Probeset Number=SeqID_14287
gaaacaagagaaagatgttttgagtaaagatcaatgtaaagttaaaagccctaatccaaactctgttaattcacctcatatcaagaaaaagaagaagaagaaggnataaggataagacgaagaagagggggatgcgacggaagaggagtgattctccggcggatgagatcactccggtgcggcggctgtttgataccctgcaggaagtgttctccagtggcggtcctggnagtattccttctgaagatnaaatcccacagctacgagacattctttgatatatgaaaacaggggaatgtcggggttaactcccgaccatggccctattttcccgaaaccgactacgggacagaaaaatggtctttcccacccaaaaaagtactttggttttaacccaatggggacaaattctccgaacggggaattttttttggttgccgccccttttggggggggtttcccctttttaaaaccctcccggggggggaggttttttaaagaggtttccttttggaaaagggagcataaaggcccttttatggggggggggggggggggccccctataaaagaaaacacccannaaaaaaaaacggcgggt

SEQ ID NO: 4509 - DNA, 1396 bp, Glycine max
  misc_feature (53)..(53): n is a, c, g, or t
  misc_feature (69)..(69): n is a, c, g, or t
  misc_feature (352)..(352): n is a, c, g, or t
  misc_feature (1066)..(1066): n is a, c, g, or t
  misc_feature (1182)..(1182): n is a, c, g, or t
  misc_feature (1190)..(1190): n is a, c, g, or t
  misc_feature (1192)..(1192): n is a, c, g, or t
  misc_feature (1379)..(1381): n is a, c, g, or t
  misc_feature (1385)..(1385): n is a, c, g, or t
  Peptide Sequence Number=SeqID_7537
  Probeset Number=SeqID_14288
aaggatagcgaataaagtgttagatctagttgtgtgagagagatgatatagtnatgattgcaagacaanagctgcctagtatatagggagatactgaatacgaatacatatgctctcgattacatttagactcatatgatatatatgcttgaattacaattggggtatgatgtaggagtggagttgtgcgatttatatgatctgttcgttgtggttgtatggttatggtatagattgtgcttgtatgtagtatgataatagtcactagatgttgctatagcgagtacgagtgattagtgctctaatatgatagaccatattagtggaggtgtcggggcagagagattacaanacaagctaagattaagcggagtagcagagtggatgaggtgagtgttaggaggtatcatatatctcactgcaacgcagagtaacgaatatataaggtctggagcaggtaacgcgggtggagcgagatatagtttgcagtgttgtctagtatcggcgtacggagagtatagaggtggatcagcgggagcaataaaagtacactagaatatgaagaataagcacaagtgtggaagatatttgtattgtcatctcttgttgataatatatctttattatgtgtgtgattgttgtaagaatttataatgatatatacaataatgttagtgctgagctacggtctgcaacatctgttcaatcatagtactagctttatatctcttgatcgtctccttcgtaccatgagtatgtgtggtgtcgctaagaatatttgttttcgtgtgttatttatagtttactatatatgtatgtatgtaatgagagagtatattacgataaggctggttcgtgcactagtgggatgcgcacatcgacgggcgacgacctgcggactcgcatggtggatgtggcctacttctcttaattggtgcaggttgattgaaatacaagagagatgtgtggtggttggaggaaatgacggaagaacggtatggctatgggaacatgtgtgtttcgtggtgagagcgagccgcgggcgtttttttgttcatgtcatagngtttaattattatatatttgttataatatatcatgtatgtactcacttattccagctggttgtgattaagaatactaaataattctgatggtaggtattggctttgtgggcgtcanttattctncnctattcgccctccctgcagtgaccccgtggggtgtctacatcttatttatggtatgtggtttacgccccccttatcggtgggagacacggttagttgtggggggggggagggggggcgggggtttaaaataaaataaattatctatacatatatatttattttgatgtgaagtagtaaaaaaaaaannnaacnaacaaaaaaac

SEQ ID NO: 4510 - DNA, 503 bp, Glycine max
  Probeset Number=SeqID_14289
caggcccggccgagccctcatgggcccgtaaagctcccgccctcgcgctgctgccggcacgccgtcggcgccgccgcccacatccgagccgctcctcctccacaccgagccgcagacagcgaggccacgtcggcgccggcctgctaggacccaaatatgggccgggggcgcgccgccggccaccagcgccaccaggccaccccgccgccaagaggcagcgccaccaccgcgccagccgccggcccccgccaccagggcgccggaccaccgccagccgagctgctcccgccgccgagccctgccccgggaaggacgctgcgcgcggggaaaagaaggcccgccgccgccgagccacccggccagatccgggggcgccgtccggcggcggcgggggagggagaacggaggggcgggagcgaggaacctgtggtcgggagagggagggagctaagcctttccgccttctttcattgaggaacctgtggtctgaatgagcagaaatt

SEQ ID NO: 4511 - DNA, 461 bp, Glycine max
  misc_feature (1)..(1): n is a, c, g, or t
  misc_feature (39)..(39): n is a, c, g, or t
  misc_feature (45)..(45): n is a, c, g, or t
  misc_feature (51)..(51): n is a, c, g, or t
  misc_feature (54)..(54): n is a, c, g, or t
  misc_feature (169)..(169): n is a, c, g, or t
  misc_feature (189)..(189): n is a, c, g, or t
  misc_feature (192)..(192): n is a, c, g, or t
  misc_feature (212)..(212): n is a, c, g, or t
  misc_feature (251)..(251): n is a, c, g, or t
  misc_feature (307)..(307): n is a, c, g, or t
  misc_feature (317)..(318): n is a, c, g, or t
  misc_feature (327)..(327): n is a, c, g, or t
  misc_feature (330)..(330): n is a, c, g, or t
  misc_feature (334)..(334): n is a, c, g, or t
  misc_feature (337)..(337): n is a, c, g, or t
  misc_feature (343)..(343): n is a, c, g, or t
  misc_feature (345)..(345): n is a, c, g, or t
  misc_feature (352)..(352): n is a, c, g, or t
  misc_feature (356)..(356): n is a, c, g, or t
  misc_feature (359)..(359): n is a, c, g, or t
  misc_feature (365)..(365): n is a, c, g, or t
  misc_feature (391)..(392): n is a, c, g, or t
  misc_feature (404)..(404): n is a, c, g, or t
  misc_feature (410)..(410): n is a, c, g, or t
  misc_feature (412)..(412): n is a, c, g, or t
  misc_feature (431)..(431): n is a, c, g, or t
  misc_feature (433)..(434): n is a, c, g, or t
  misc_feature (436)..(436): n is a, c, g, or t
  misc_feature (441)..(441): n is a, c, g, or t
  misc_feature (443)..(443): n is a, c, g, or t
  misc_feature (447)..(447): n is a, c, g, or t
  misc_feature (449)..(449): n is a, c, g, or t
  misc_feature (451)..(451): n is a, c, g, or t
  misc_feature (461)..(461): n is a, c, g, or t
  Peptide Sequence Number=SeqID_7538
  Probeset Number=SeqID_14290
ntcttagtatttattctcttttatttgtttcttcagagnccctcnatgaanaanaagaagggtgaagctctgagtgagacttctctcccaccttcaaccatgtcttcttcctcctcttctcttgtcaccactcttgttgataataataaccctactcaaccttctcagntaagagcggcacgccgtcgnttnacctctgatcatcaccttcntgagataagcctcaaaacccctatggttaggccttatgntcgatcaaaaatgcctaggcttcgttggacaccagatctccatcgttgcttcgtgnatgcagctcnnagacttggnggngaanacngggccncnccaaagntggnttnacagcncatgaatgcaaaggcgcttactatannctcacggtcaanagccancnttcagatgcccatgaccangnncnccccngncccncncncccgtggtgn

SEQ ID NO: 4512 - DNA, 244 bp, Glycine max
  Peptide Sequence Number=SeqID_7539
  Probeset Number=SeqID_14291
tgcctgcagacggttgatgatactatggcagtacatagccattgaaaccagattgttgaagaaagagcaggaaaacttgctctagtgaagtatcagcaagtgctttggcagggaagggtattgactattgaactctcaattcattgatgaattgaattgaagacttgagaaatcagggatgttgcccactgactcctgaagagattggattacaaggcaatgcgtgtacatcacaatctaatag

SEQ ID NO: 4513 - DNA, 1359 bp, Glycine max
  misc_feature (13)..(13): n is a, c, g, or t
  misc_feature (15)..(15): n is a, c, g, or t
  misc_feature (21)..(21): n is a, c, g, or t
  misc_feature (103)..(103): n is a, c, g, or t
  misc_feature (105)..(105): n is a, c, g, or t
  misc_feature (250)..(250): n is a, c, g, or t
  misc_feature (312)..(312): n is a, c, g, or t
  misc_feature (787)..(787): n is a, c, g, or t
  misc_feature (990)..(990): n is a, c, g, or t
  misc_feature (1129)..(1129): n is a, c, g, or t
  misc_feature (1173)..(1173): n is a, c, g, or t
  misc_feature (1241)..(1241): n is a, c, g, or t
  misc_feature (1270)..(1270): n is a, c, g, or t
  misc_feature (1308)..(1308): n is a, c, g, or t
  misc_feature (1329)..(1329): n is a, c, g, or t
  Peptide Sequence Number=SeqID_7540
  Probeset Number=SeqID_14292
attatatattttnanataacnttttttgctgctttatatgtatgattacgtagcgcgtgtcacagcggaccacccgggccgtgtgcgcgtcggctaaatatananaaaagagggccacacccgcccccgggacataacttacttgtctgcggccctggctcgagtggagaacataatctctcacagtattcacgatggttagcgcgacgcgcgcggataaacgaagaggtgatagcgtgtctgtgccggntaagattcgcttcttagtacgcagctctttgtcagtggatcggccccgccgtgcccccactncagtgagaggttgatcgctttactatttctttcacctcaatcctcacgtcaattcccacactgaaagattgaatacactcgaaaacctccatgccaagtatccccttctctgggtcgccctccgggtcccacctctacagtctcactcttctgtcttgttcttcccctcacctatgtccccggcgcgctctacgcccctctcccctccccagccggctggccggttggcgggttgttatattaacgaatctcgtctcttctggtttatgagcgcgtgtttctcttatatcagtccgccatcaatcccctcccttgaattggcatgccgctgtgggcctgtccagtctctgttctcgtgtggccgacgcgatctgacaagagacaacatcatatacctcgcctgtattaatgtcgctatttactctctagctctctagcgctattactaactcactgtggaggtattcggtacggnggccgcccgcgtgcgcgcgcaccatcattcctccacactgagcctttcgtgtgcggtggttgtgtgattatttattgtcgaacatcaaatatgttcatcgcgtgtgaatgtgtacaaacattaatagctatctctctggcacatccgcatctgtatcccgttattgctcttatcgatcgcctctgtgtccactcgcgaaccgnccacatgacatcatcattattcacatacatatatatacactgctccgaatacggaccatcgtcatgcgtcgggctagaacggttccgtagatctcagtgcgcttatcctatccgccgcgaccttgagacggtgatgtgnttcatgtcttgtatacatgcacggacgtgtatctgtgtacgatnatccaacgcagcacattctacaacgtatgcgtgtaactcacacatcgacactcacacgcacccgaccncataacgctgagagcggatgtgcgagcgntgacagaagcatacgcgcgcgagtcgctatgcatcgcntgggcacaactcatgctatcncagtgcacgtatcgtcacgcgtcgcacacc

SEQ ID NO: 4514 - DNA, 474 bp, Glycine max
  misc_feature (107)..(107): n is a, c, g, or t
  misc_feature (113)..(113): n is a, c, g, or t
  misc_feature (118)..(118): n is a, c, g, or t
  misc_feature (142)..(143): n is a, c, g, or t
  misc_feature (171)..(171): n is a, c, g, or t
  Probeset Number=SeqID_14293
gagttgtggtgcttttgaaagatgaggccgattctgatgaaaagtcatgagaggccattgacgttcctgaaatacaacagggacggcgatctcctcttctcctgcgncaaggnacacnaccctaccgtctggtttgccgacnnacgcgaacgcttgggcacttatcgcggncacaacgggggccgtttggacctgcgacgtctcaagaaatttcgttcgactcattagggaagagtggcaatcagaccgccaggttttgaacggggaaggggcctgcattttatccacccttcaattcaattcccggcaagggccggggatttttctgggggggaaaaacttgccgtttaaccccgggccccttttgggggggggccccccaaacccggggaaaaggttcttttaagatcttccccaagaaggggggaaatgggggtttccttaaggggccccggggaaaagataaaaaaaaat

SEQ ID NO: 4515 - DNA, 566 bp, Glycine max
  misc_feature (561)..(561): n is a, c, g, or t
  Peptide Sequence Number=SeqID_7541
  Probeset Number=SeqID_14294
tcagctacgtaggcccccccccccctcaaggatgagaacctcatgaaacaagagttcgagggaaactatgaggaagttgttgataacttcgacaacatgaacctccttgaggacttgctccgtggtgtttatgcttatggtttcgagaagccctctgccattcagcaacgtgccattatgcccctcgtgaagggagtggatatcattgctcaagctcagtctggaaccggaaagactgccactttcactgttggtattctccaacgtcttgacttctccgttcctgactgccaagccctcgtccttgcccccacccgtgaactcgcccaacaaatccaaaaggtcgttattgccttgggagactacttgaatgccaaatgccatgcttgtatcggaggtaccagagttagtgatgacattaccaagctccgcaatggtgtccacatcgttgtcggaaccccaggtcgtgtccttgatatgttgtgccgtaatgtcctccgccccgatagaatcaagatgttcattcttgatgaggctgatgagatgctttcccgtggattnaagga

SEQ ID NO: 4516 - DNA, 2070 bp, Glycine max
  misc_feature (1)..(1): n is a, c, g, or t
  misc_feature (11)..(11): n is a, c, g, or t
  misc_feature (20)..(30): n is a, c, g, or t
  misc_feature (33)..(33): n is a, c, g, or t
  misc_feature (36)..(36): n is a, c, g, or t
  misc_feature (44)..(45): n is a, c, g, or t
  misc_feature (48)..(49): n is a, c, g, or t
  misc_feature (58)..(58): n is a, c, g, or t
  misc_feature (66)..(68): n is a, c, g, or t
  misc_feature (70)..(70): n is a, c, g, or t
  misc_feature (112)..(112): n is a, c, g, or t
  misc_feature (114)..(114): n is a, c, g, or t
  misc_feature (148)..(148): n is a, c, g, or t
  misc_feature (242)..(242): n is a, c, g, or t
  misc_feature (346)..(346): n is a, c, g, or t
  misc_feature (422)..(422): n is a, c, g, or t
  misc_feature (444)..(444): n is a, c, g, or t
  misc_feature (454)..(454): n is a, c, g, or t
  misc_feature (495)..(495): n is a, c, g, or t
  misc_feature (508)..(508): n is a, c, g, or t
  misc_feature (570)..(570): n is a, c, g, or t
  misc_feature (584)..(584): n is a, c, g, or t
  misc_feature (588)..(588): n is a, c, g, or t
  misc_feature (749)..(749): n is a, c, g, or t
  misc_feature (795)..(795): n is a, c, g, or t
  misc_feature (833)..(833): n is a, c, g, or t
  misc_feature (993)..(993): n is a, c, g, or t
  misc_feature (1099)..(1099): n is a, c, g, or t
  misc_feature (1101)..(1101): n is a, c, g, or t
  misc_feature (1165)..(1165): n is a, c, g, or t
  misc_feature (1244)..(1244): n is a, c, g, or t
  misc_feature (1250)..(1250): n is a, c, g, or t
  misc_feature (1472)..(1472): n is a, c, g, or t
  misc_feature (1504)..(1504): n is a, c, g, or t
  misc_feature (1540)..(1540): n is a, c, g, or t
  misc_feature (1569)..(1569): n is a, c, g, or t
  misc_feature (1631)..(1631): n is a, c, g, or t
  misc_feature (1662)..(1662): n is a, c, g, or t
  misc_feature (1664)..(1664): n is a, c, g, or t
  misc_feature (1700)..(1700): n is a, c, g, or t
  misc_feature (1711)..(1711): n is a, c, g, or t
  misc_feature (1724)..(1724): n is a, c, g, or t
  misc_feature (1744)..(1744): n is a, c, g, or t
  misc_feature (1788)..(1788): n is a, c, g, or t
  misc_feature (1804)..(1804): n is a, c, g, or t
  misc_feature (1816)..(1816): n is a, c, g, or t
  misc_feature (1818)..(1818): n is a, c, g, or t
  misc_feature (1823)..(1824): n is a, c, g, or t
  misc_feature (1827)..(1827): n is a, c, g, or t
  misc_feature (1836)..(1836): n is a, c, g, or t
  misc_feature (1878)..(1878): n is a, c, g, or t
  misc_feature (1882)..(1882): n is a, c, g, or t
  misc_feature (1903)..(1903): n is a, c, g, or t
  misc_feature (1936)..(1936): n is a, c, g, or t
  misc_feature (1946)..(1946): n is a, c, g, or t
  misc_feature (1949)..(1949): n is a, c, g, or t
  misc_feature (1965)..(1965): n is a, c, g, or t
  misc_feature (2018)..(2018): n is a, c, g, or t
  misc_feature (2070)..(2070): n is a, c, g, or t
  Peptide Sequence Number=SeqID_7542
  Probeset Number=SeqID_14295
ncctttctttngggggcccnnnnnnnnnnnttnttntttttttnntanntgcgctgcntggtcatnnncnggtgcgtgtcgcgtctgcgcgcgagtgttggctgctgtggancntgcgatcgcgcgaatcgcggactccgacgcgtgncgcttcgtcgtcgccgcgcgacccgcgccgtgcgctcagtgacgggtgcgcggccgtgctcgcgcaacgctcgcgcgcgtgactcgtatgcggntgtcctctctgcgcgggcgtccacctctcacatctcatactatacactgcacaatgatagtcgctgagtttcaacaatgtacattgttaatacatttatatagncgaatgttgatatatgctagacgtagagatgtgttatctccatttcctcttcagagcgagccacgcagatacaggnctagatggagcgaacacacgcnctaccgacanctatgggtcaccgcacagaacataacggtgtcaggtgtcgncgctgctggcgantatctgtagcgtatgtgtcgttggttacgtgaatcgatcataatcgactgaacatcatcgcngtcatattaatgangttnagtccggatgcgcgcacgctgttcgtgcgaggacgagcggtgctgtatcggaaccacgcttcaccgacgcagtgcgttatgtgtcgcttgcacgctctccgctatttctccaatatcatgtactattatatacacgactcatatccgtggttgcgtactangtctcgccctctatcgcctctatgcggcctgcccctctattacttngtatctctcttactcacctatattgtgctgcgtcaccncgccttcgcttacacgcgcgctctctatctactctcactctctcttccttcgatacctactcgctatacgttgtgatagtactcatgatgactatatagtgcgtgccgcgcgtggctgatgacttcactgttgtgtctgacttctaccagtgtcgtatgngtgtataaggctgagatcatatttatgaatactgtgatgtgactaagctgatcggtaggtggtctgtactatgcgtataacctctgtgcatactacactgacatcngncagtgtaactctatcagttcctacatgttggtcgtctagtctgtatgcgttctttgcatggtgntgagctgcggacaggcctgctagctgatctgcgctttgtgcgtccctctaccagagtgctcatgtctcgctgcgatccntacccntctcagcgcgtgtcatgagagcggatgtacctgcgtgcgaagctcagatctctctatatctactcggcggcgtggtgtgagtgcttggtgtatatctattacgtgctcgtctttcttcttcgtgttgactctctgctcgagtcctctatacacacgctgtgtgtcatgagctgctctcatgagtgagtgccaactgatatgtcagcgagtcgtgcgtggctnattcgatagcgatgctataagacactatcttngttgtcctagtgcctgtagcggtatcgcgactgcgnatgacctagatagacgatgataagactcnctcatgtacgcatgcgatcgcacatatatgcgcatgtcgtcgtctcgcacgcgctcgctacnatcgacggtcgcgcgcatggcgtgctgaggntngtcgatcgcgtgcgagtcactacgatgactatgtgngtctcgcatcnatgattgcgccgnactccgcgagtgatcgtccntacactcgtgccgtctggtgctacgtcgctggacgctattatancgtatgcacgcatgtncatcatcatgtntntgaanncanccatgggcngcgcgcactactcgttccgactacgtcactgtcatgcacgcntgtnctcatcgtgtggctgatgtgngggtactaatatgacggatcgactactgtcgtngagaggtatnttnacgtagtgtaatctanactgatatgagtggtggttgtgacgtctcgtgtgtgttgcagtgtagtagttngtttagagatcatcactgactacacgtgctggtgagtttcagatgctgatcn

SEQ ID NO: 4517 - DNA, 1938 bp, Glycine max
  misc_feature (24)..(24): n is a, c, g, or t
  misc_feature (37)..(37): n is a, c, g, or t
  misc_feature (76)..(76): n is a, c, g, or t
  misc_feature (91)..(91): n is a, c, g, or t
  misc_feature (123)..(123): n is a, c, g, or t
  misc_feature (149)..(149): n is a, c, g, or t
  misc_feature (154)..(154): n is a, c, g, or t
  misc_feature (157)..(157): n is a, c, g, or t
  misc_feature (210)..(210): n is a, c, g, or t
  misc_feature (212)..(212): n is a, c, g, or t
  misc_feature (234)..(235): n is a, c, g, or t
  misc_feature (310)..(310): n is a, c, g, or t
  misc_feature (362)..(362): n is a, c, g, or t
  misc_feature (425)..(425): n is a, c, g, or t
  misc_feature (445)..(445): n is a, c, g, or t
  misc_feature (467)..(467): n is a, c, g, or t
  misc_feature (523)..(523): n is a, c, g, or t
  misc_feature (639)..(639): n is a, c, g, or t
  misc_feature (685)..(685): n is a, c, g, or t
  misc_feature (729)..(729): n is a, c, g, or t
  misc_feature (911)..(911): n is a, c, g, or t
  misc_feature (931)..(931): n is a, c, g, or t
  misc_feature (935)..(935): n is a, c, g, or t
  misc_feature (1003)..(1003): n is a, c, g, or t
  misc_feature (1012)..(1012): n is a, c, g, or t
  misc_feature (1031)..(1031): n is a, c, g, or t
  misc_feature (1115)..(1115): n is a, c, g, or t
  misc_feature (1117)..(1118): n is a, c, g, or t
  misc_feature (1207)..(1207): n is a, c, g, or t
  misc_feature (1237)..(1237): n is a, c, g, or t
  misc_feature (1245)..(1245): n is a, c, g, or t
  misc_feature (1250)..(1250): n is a, c, g, or t
  misc_feature (1320)..(1320): n is a, c, g, or t
  misc_feature (1393)..(1393): n is a, c, g, or t
  misc_feature (1429)..(1429): n is a, c, g, or t
  misc_feature (1450)..(1450): n is a, c, g, or t
  misc_feature (1479)..(1479): n is a, c, g, or t
  misc_feature (1486)..(1486): n is a, c, g, or t
  misc_feature (1519)..(1519): n is a, c, g, or t
  misc_feature (1525)..(1526): n is a, c, g, or t
  misc_feature (1531)..(1531): n is a, c, g, or t
  misc_feature (1554)..(1554): n is a, c, g, or t
  misc_feature (1556)..(1556): n is a, c, g, or t
  misc_feature (1564)..(1564): n is a, c, g, or t
  misc_feature (1580)..(1580): n is a, c, g, or t
  misc_feature (1587)..(1587): n is a, c, g, or t
  misc_feature (1609)..(1609): n is a, c, g, or t
  misc_feature (1614)..(1614): n is a, c, g, or t
  misc_feature (1679)..(1680): n is a, c, g, or t
  misc_feature (1692)..(1692): n is a, c, g, or t
  misc_feature (1696)..(1697): n is a, c, g, or t
  misc_feature (1723)..(1723): n is a, c, g, or t
  misc_feature (1730)..(1731): n is a, c, g, or t
  misc_feature (1733)..(1733): n is a, c, g, or t
  misc_feature (1764)..(1764): n is a, c, g, or t
  misc_feature (1774)..(1775): n is a, c, g, or t
  misc_feature (1794)..(1794): n is a, c, g, or t
  misc_feature (1814)..(1814): n is a, c, g, or t
  misc_feature (1834)..(1834): n is a, c, g, or t
  misc_feature (1841)..(1841): n is a, c, g, or t
  misc_feature (1874)..(1874): n is a, c, g, or t
  misc_feature (1884)..(1884): n is a, c, g, or t
  misc_feature (1907)..(1907): n is a, c, g, or t
  misc_feature (1938)..(1938): n is a, c, g, or t
  Probeset Number=SeqID_14296
cggcactctagtctactctacgcncctctcgtcatgnctcgccgtctactcgctacctcacgcgtctcatacgctntgcgtttgcagcttntcttcttgtcttggcgccgctccaccatcacnctcttgcgcgaacttctcccatactntatcnctnctctatgcttctttatgtctccgtactatcgcgatctcttgcaattcgcgccncnccacgtacacactagacgtctnnctgtcgttatataccaaacacaccccacttccttctatgtcatgatgcactctccttcagtctcatgacattaanacccacacctctctactctgtcatctccgcctcactagtatactatcgtctntgtcgttttagatgttcgtgctttgctgcgtgtctaactcgtatttgtgtctctgccgctccntatctacgcgctctgttcancgcgctgacattatattatgtncatcgtctgtacataattgttcggtgcgtgtagtgagtattcgacacatattcctnctatattcttattcatctatatcgtctactagtctaatatataattatatatagtcattatatacagcgtatggtgcgctgtcacgacgccgctcctcgatacgccatctactgtntcagctattcctatatctcttacatcgtgatattatatagttgaanatgctacacctccacgatctagtcactagaagcagcacagggcnatcaagcgtagatgtctgatgtatacgtagagtgttcaactcgcgaggagtcgactgcctcggcgacggggaccgcgcgatagttcgtccgcactattgtagtattcgtctgcgatatgatgataatctgctatgtatgattgtcgtactggtgatgtgccttcgttgtcaatgatctgctntgatatctgcgggtagaccntcanacgctatacgcgacgatacgacgcacttctatgtagcgtgtcagtcgcgacgtatcattcactctctntttcgagtngcgctcgactagtgcatcngttatcttgctatacgctatcactgtcattactcgcattctaatagcactctcactacatcttacgatactagtacacgcctcncnnctcttatttgagtagtacgtacagtaagagatcgtgcgaggacgtgatctatgactcgtgacacatatgtgcagttcgttctgcatctncgtcgcttcgtatagttgatatctcatctncgccccgntcttngttctaatcgtcgagcatgcgcgagacataccaagaagcacgctacacttcatgctcgcttagtatgacntacagtccgatagtaccgcgtcgcatgtcgctctcgttcgctgcttgtgtctctcatatgcgcgctcttcatnaccttccgactcgcatctcaccagtctcgtctactntcaaatctgcagatatctacnatagtgcgtcgcagactgcacgtatagantacatantgcatagacgtatcatatctcatgctgcatatngcacgnnatccnctgcatcatccctcgtttgcgtngncgatgcancacacgacggtactgntattganctgtcatcacttcagctcactnacatncccccattatcgtctgtctagtcgtcgatgtcgttactagtgatcagtacgtcatatgtcgaccnnctcgaccgcccnattnnacccgtgtgtcgtcactctacatctncgtatgnntnagcgtatcgctatactactatctctctgcgncgctctcatnnacactttcgctcgtgtcantgttattgattatagtcgancatctatctaacatattttngttgtgngcgccaccatcagccgtccagcagtggttgctncttcctcgtnttgtattatcggcgtgccgcgantcctgcctacgtactcgttgtcgtacatcgn

SEQ ID NO: 4518 - DNA, 1351 bp, Glycine max
  misc_feature (199)..(199): n is a, c, g, or t
  misc_feature (533)..(533): n is a, c, g, or t
  misc_feature (699)..(699): n is a, c, g, or t
  misc_feature (728)..(728): n is a, c, g, or t
  misc_feature (825)..(825): n is a, c, g, or t
  misc_feature (1044)..(1044): n is a, c, g, or t
  Peptide Sequence Number=SeqID_7543
  Probeset Number=SeqID_14297
tgaaacctcccatatcatccctctctctcaatactttgcatcacgcagtgccctgcgttccccaataaagctaggaaccagcgcccgaagtgagggaaggcacgccattcatagaaatgaggagcacaccccccccgcgtgccttgcaagaggagatctctatgttatgtactctttttcttctgattgcacgtagctnaatcattaatacatgatcttgcttgcatcgcgatatgttggtgattagacacagcttacaactgcagtcttgtcgctccgtgcttagtgctctctatacaagtactcaatgacgtcatgtcgctctataagtatcttcatcatcagcacagccactcatattttcggatggtatttctatgctgtctaattcgatattatgcctagtataggagtttgtagactggaagcagacactatctcacatagatgatagtagaccaggtatctttactccactctatgttgctacagtcgtatgtgttatatgcatgatgtgtatccctagaactctnctagtacttacctggtagttgtgtagttgaggctcggtaggcagaatgatgcgtcatctgcacttcgtgcattttaggctgtgtgccaacgctgtcacagcccaaatctatgactataatctgtataatatatttatagagatgatggtatattgtttggaggttntatgtgtgtcatttccattagtcatattncttattacatagtaaagattagtccataggctctgacatgaaagtgtgtcagtgagttgtgtttgttgtagtgctttattatgtctgtagatgtagncttacgatttatacacggcgagactatgagacgatgcgaccagcgtcccacgatttatactctagactcttctccctcactctatgttcttagggtgtgcctcggattgtggacgcttacatctcgctacaagacgatttacatatatgcgtatcgtccgctcccgcacctacaccgtcagctgtagattgttcggctgtcacgcttcatgcgacatantattctctcgagtgcgtatactatgttaactcacgtaatcgcgctgataggtacgtgcgtcagcaatagtattagttgtgatagactcttcatctggtcaatgaaacacggcgaatagtgttcggttatcgctaggggctgagggatgcaccagagccatacatcgctgcgccggttgtctctagacggttctatcgctcgagcgcattgcgctactaccgatggctctataacgacgcgagacagtgagtatgtcgctcgctaagtgctctcaggtgctcgatctgactactgatagttccgtgtg

SEQ ID NO: 4519 - DNA, 1537 bp, Glycine max
  Probeset Number=SeqID_14298
atcccgagcaagtggggaccattgggctcagtcactacgccatgctgccatgataacaccacccgccctcgctctgccctgctgctgctgctcttgagcttttgctcggaagccttcacgttcaacttttcctctcaaccatcaccaatcgatcgtctctcttgcgccattccatgtgaccagaaaccaagagccagcccgccgtcgtcgagtctgatctcactcactacaacaactacaccaacttcgccatggacaccaagacctcaccctcgttcatcgactcaccgcttgcacaggcggctatggcctcgccgaagacggagcagatcgcttcgcagagtaccgaagccctgaaggacattgtctttggcagtatcgctggtatgcttggaaagatcgtcgagtacccgttcgacaccgtcaaagtccgtctgcaatcacagcccgaccacctaccgctgcgatatgctggtcccctggattgcttccgccagagcatccaccaggatggcgtgagagggttgtacagaggcgtcagcgctccacttctaggcgccgccgcagagacgtcgtgtctcttcttttcgtacagggtcgcgcaggacgttattcgcgtcttccgtgctccaaccaccaagagcaaggctgacgacaagctgccactcccccagctcgttgcggcgggtgcgatgtctggtgccgtcacttctttgatcctcacgccgatcgaactcgtcaagtgccgcatgcaggtccctctcacttcatccatggacccaacacttcgcaacgcatcgatcggcccggctgcggtcataagagatgtatacagaagagaaggcattgccgggttttggaggggacaattagggacgctgctgcgtgagactggtggtggagctgcatggttcggctgctacgagaccttctcgctgttcttccgccaacgtgcacaggctgccacaggcgagaaggaccccaccttgccgatctggcagagcatgcttgcaggagccggagctggactcggatacaacttctcattctacccagccgacacaatcaagtcgaagatgcagacaggcgacctatcktytattggcgccaacggaggacgtmagactttcttcggmgtcggtcgwgctctgtkccacacccacggccttaaaggcctytatcgcsgatgcsgyatcacactgctscgaarcggacccagctctgcattgatttttacgatttatgagagtctgaggacgtactttggctaasgctcttgtgtgtttccgcggkgcatgacatgacacagctctgacgattaagagcacacttattctattacgacacgttttattcccttttggttggcgatttgagcgagtatttgtgggcatagcactggagtttcatggcgcaaggactgtgaactttcaggtggtggaagatggggaaaaaaagcatcatgcatagcgaagaggtggacaaaagtgatggatatagatcattgatacccagatctgacaaaaaggcgttgttc

SEQ ID NO: 4520 - DNA, 549 bp, Glycine max
  Peptide Sequence Number=SeqID_7544
  Probeset Number=SeqID_14299
tacgcgctgatgattggcgtgacctcgatcctggccatcggcaccgtgctgcaagtgttgttcggcgggccgttctgggtgtcggtgctgttgggcggtggcgtggtggtggtgtattcgaccatcggcggcatgtggtcgctgaccctgaccgacatcgtgcaattcgtgatcaagaccgtcggcctgatgtttatcctgctgccgatctgcctgtaccgcgtcggcggctgggatcaactggtggcccagttgcctgcgtcgaatttcagcttcaccgaaatcggctgggacacgatcatcacctacttcatgatctactttttcggcatcctgatcggccaggacatctggcaacgggtgttcaccgcccgtgacgaaaaggtcgcccagtacgcaggaacgttcgccggcttctactgcatcctgtacggcctggcgtgcgcgttaattgggatggccgcgcatgtgctgctgccgaacctggacaacgtcaacaacgcgtttgccgccatcgtcaaagcgtcgttgccggatggcattcgcggc

SEQ ID NO: 4521 - DNA, 405 bp, Glycine max
  Peptide Sequence Number=SeqID_7545
  Probeset Number=SeqID_14300
acgagtctctctctctctctctctctctctatctctctctctataacaataagagggagaacgcaaatgggaatgatgacgatgtgcacgctaagccacaaacataccctggtcctgaggtgaatgtaactcaagattaacataaaaagtgggggatgcacatggagcgcataaccctcgagaatgtgaatggttccaccgtcaacgttgggattcacccctccaaggttgtgctagaccaagctcaaattggacaaagaccgtaaggccattctcgatcgcaaagccaaaggtcgcgccgccgccgataaggagaagggtaccaagttcgctcccgaagatatcatgcagaccggtgatgagtctgtgttgcccccttatcatacaaacaaattttctctatgg

SEQ ID NO: 4522 - DNA, 1411 bp, Glycine max
  misc_feature (25)..(25): n is a, c, g, or t
  misc_feature (27)..(27): n is a, c, g, or t
  misc_feature (93)..(93): n is a, c, g, or t
  misc_feature (183)..(183): n is a, c, g, or t
  misc_feature (628)..(628): n is a, c, g, or t
  Peptide Sequence Number=SeqID_7546
  Probeset Number=SeqID_14301
cgttataatatattaggcgtggcgngncgtgtgcgcggttaattaagatctgtgtagcgaaaacgcgattagatatttagaatgtgcgcgcgncgcggaatcatataggaggacgatgtgaccagctattgactagagcgagtaagagaagtggcgtgttcgtagagcacgcgtacacgatgnaagatagaagagacggacggacgagagagaagatgtctttaatgtggtccttgctatggcgcacactattacatgaggagaccggcggttgccgaagcgctttcaatatcacgaagctccggttgttgatggatctggagcaatcgcttagtgtgctaatgcgtgtgtccggctgtgtggtattgatagtaataactacatacgctgacgatcggcgagcgtatgagcatgaatgtagggtgataactgaggctcgctgggctatagacctctgggccatattataatcgagatcctttaattatagcaaacccgcgccgagtaagaatcagcacaatcaacactcgagatccgaggactacactgagagactatactcggtgtagtgtggggaattgcggagtgagtgagataatcatatgggagacaaactatgtcacagatncgcgaggatgtgtgactacgacgaattattaaaacgagtagtgaggagatagatagatacgccctggctgactacagaaaaaagaccactataactggcgaccacggtccacaactctcagagagcacaccgattgctagatatatccacaccgggtatatatcggttaccagcgaactgccggcttacctcgaaaatagcgatatagacatacgcgcgaaatcctacaaggacagaatgagtgttatattaatatttaccaaggtgtggctgttgtgagtatataatctaagcgtgatgacacttgctattgggtgacttttgccttcgctgcgatatcgcgctggtcctggtataatgctcctaattctcgactgggtatacgccgtggggccagtgctttaatcggcctgctcacaagtgaggttcgccccagggagaatacggatacacgtctcgtctcatctcagagctgttcggaggggcggggcttccgtcccttcctgtagcatatgttgcgataaactagcttcttggagcttgcatagagtgtcaccgtgtgcgtgctcagccgataatgattagtatcaacatattgacgatgtccatctttttcaatctctctactcttaagggatgagggggagccttcgcatggctctacctcctggcgcgggaggggtgtgttgtctacatccttgctgttgggcgttccggatatatacccatgagtacgcgcgagttccacaacttccatgaatgagcgattctttattggcctcg

SEQ ID NO: 4523 - DNA, 527 bp, Glycine max
  misc_feature (57)..(57): n is a, c, g, or t
  Probeset Number=SeqID_14302
ttttttaatccaaaatcaaaatcaacataagagaatgtggctgcaatgtacagacanagtagcaaagagagaaacagaaatgcaaacaagatatcccttctgtttgatcctacacggattttaattttgttcatctcttctaagcaagtatttctgccaactgcatgatggttcaggatattatgtggatcaaatgattggattctttggttgtgaatttatcttctgttttctatgtaaatatatgtctctttcttttttcttttttaaatgaagaatttgatttcttcccttccctccccatttttttctctttacttagatgtccactgctggaggccggcttgttatctgcagtgatggtgtttgggattctctacctgcagaagtagcccttgattgttgtcgtggaatgccagccgatgctgctgcaccacatattgttaaagtgagattaatgtgcatattttgaatcattgtgaattttttttactggacccattttaatgttagtagtaatctggtgc

SEQ ID NO: 4524 - DNA, 636 bp, Glycine max
  misc_feature (636)..(636): n is a, c, g, or t
  Peptide Sequence Number=SeqID_7547
  Probeset Number=SeqID_14303
tcagctacgtaggccccccccccaatcatttccttttctacaacaaaaacaactcctcccaaatgactgtaaaaatctgtttcaacaaccaaacccatagaatctccaagaacccagttgactataccgctttacttcaaaaagtcattgagatctttggaaatcaactccctcaaaactggactctccagtatcttgactctgatgatgacaagatcatgctcagtacccaagaagactacaagactttacttgaagaagaagctggaaactcaagcaaatctataaagatctttgttttagctttggaagaaaacatgaatcaaagtcaagttttggcatctttgatggcagaatctcaaaagaaaggaagcgtcgagattatcgatgaacctatcgaagaacctcaagagccagtcaaggaaaataaagctgaagaagaagaaattattcaaaaagaagaacctattgttcaagaaaaggttattattgaacaagaagagccaaaggaagaagccccagttcaagaagaagaacaacccaaagcccaagaagcacaagaagaatctgatatgcatcctttggacaagcttttattcaagttccttcgtcctcaacatgtagtcagagtgagan

SEQ ID NO: 4525 - DNA, 1513 bp, Glycine max
  misc_feature (1)..(1): n is a, c, g, or t
  misc_feature (37)..(37): n is a, c, g, or t
  misc_feature (195)..(195): n is a, c, g, or t
  misc_feature (218)..(218): n is a, c, g, or t
  misc_feature (624)..(624): n is a, c, g, or t
  misc_feature (633)..(633): n is a, c, g, or t
  misc_feature (694)..(694): n is a, c, g, or t
  misc_feature (938)..(938): n is a, c, g, or t
  misc_feature (951)..(951): n is a, c, g, or t
  misc_feature (1305)..(1305): n is a, c, g, or t
  misc_feature (1382)..(1382): n is a, c, g, or t
  misc_feature (1408)..(1408): n is a, c, g, or t
  misc_feature (1412)..(1412): n is a, c, g, or t
  misc_feature (1414)..(1414): n is a, c, g, or t
  Peptide Sequence Number=SeqID_7548
  Probeset Number=SeqID_14304
ntaaggagtaggagatatacaaatagcagagcatatntctacttaatatacgtcgcatggatactagcgatccatcttgctatctctttatcctactgtatctctgtgatatagagctgcgcgggtgtgtgttcttcgtgatcgtgtgtggagcacgcgtatcgttagcatgtagtggcgcgcacaatatcgcanatcatagtatacacaatattcgntataacgcggtcgattgtataacatctgcgcgtgctacatgtgagcagagggtgtgacatgtatgtgtcataaagagtatgagggcatgagtgtgacatagggagaggagtagagtgtgaggtcgtgtggtatatatatacacatataatacgttatatgtatgtgctagtgtgtatagtgtggcggtcgaggtctggggtgatatgatctcctgtatgtattccgtacattgggaatgggtaggtgcagtacatctcacgtgatagtattgcgccgtcatcacactcgacattcactcttcgttccttgcgcagggtggagcgtgagacgacgttgctatatcttacacatcttacgatcatctgtgcacatattacgctatgtgtggtgatcttacctactctnccactcgtntctaataccacgacaaagttgtaaggtgacgaggacgagttcatcatcagggtatggtgtntgtgaatatttactataagtgaataactaggatacgtgtaatgcgtggatgcaagttcgcatatcgcgtgaattatacgatcaattgaggagggggcgtgaagacacgtcctagcactcgtcactattgtgtagatagtccgcgctcgattcatccgcttgatcatgtagtattctattacatcaatctattgtactctcagtgagtagtggtggtgcagaggcggcggaaggctaggtgcgcngggaccgaccgcnccgggcctcgatcccttgcaggtgtcgactcgaggatgaccgaccgcgcgatgtaattctctccttcctacatcaagctctatctcacagtataacgtatagaaaaacatcatatattggcgatataggtatatacataagcgagggcacgcataaggcactacattatgttattttgtgtcggttcctttttcttacttttcctcgtcgcaccgtgtgcgggtgtccatttatgttgtatgtgacgggagaggccatagagcatggagcgtagcagagcgaccgacgagccacagcacgcacccggcaccgcggcgaaacagcaacagaagagtgcacaaactctcttgtgantcaccgccgggttgcggctcggcgccggccctttcccagagtctgtaggagatgcgcgatgcgttagcgtgcaactngggcgtcccttcgtgcggtggcgcgngggncntgcggtagtctaataaattacagtctacacaatataacataaaaagtgataagatgaagagagaaaaattaaatcataatccatttacatacaacttaa

SEQ ID NO: 4526 - DNA, 452 bp, Glycine max
  Probeset Number=SeqID_14305
ccgctctctctaatttctccgtttctttttgttttctccaccttccttcttcttgttttttcaatgagagacatggactctccagagaaaaaacaaggccttccctctaatgaaggcgtgcaggatattttgtacactgaactgtggcgtgcatgtgctgggtcattcgtttatgttcctcgcgttgatgacagggttttctacttccctcaaggccacttggagcaggttgctgcatatactcagaatcagccagatagtcacctggaaattcctgtgtatgatttgccttcgaagatcttatgcaagattatgaatgttgaattaaaggccgaagcttactcagacgaggtttatgctcaagttacattagttccggaggtccagaaagataacctttgttttgaggaggaggtaaacatagatcagataccttccagaaatgcagctta

SEQ ID NO: 4527 - DNA, 1352 bp, Glycine max
  misc_feature (89)..(89): n is a, c, g, or t
  misc_feature (112)..(112): n is a, c, g, or t
  misc_feature (291)..(291): n is a, c, g, or t
  misc_feature (651)..(651): n is a, c, g, or t
  misc_feature (1197)..(1197): n is a, c, g, or t
  misc_feature (1251)..(1251): n is a, c, g, or t
  misc_feature (1288)..(1288): n is a, c, g, or t
  misc_feature (1327)..(1328): n is a, c, g, or t
  misc_feature (1338)..(1338): n is a, c, g, or t
  misc_feature (1352)..(1352): n is a, c, g, or t
  Peptide Sequence Number=SeqID_7549
  Probeset Number=SeqID_14306
ctatcgaccggacgcggcgtcagcagcatgagagaacgctcaaggagacacgctcatacacggtcagcgcgacgagagaagctgccgantcgcacgtgcagtgtcacgaacntgccgcacccacagacctacgcgattagagtacatcagcgcaactacacaagcacatcatctaatgcacatactgatagtatgactgcgtatattgcactagctcgtaattatcgatagattaatcttttatcgtgtacactctattcctgctccggcgtaccaccaccgaatacgtcngcgccggcgactctcgtcggcacagacgccacgggcgtcttcacgcccgagcgcgcctaggccaatgacgtgaggagtagggaggtggatgtagcgatatgtcacacacccacgcgcgcgcatctgagccagtcaggcaagtatatacagagagggcgcgccggagtatctattaccaccatggtcatcgatagtactcatcaccagcccaaagtattccgtcgtcactcagccatatccattatcttgcgaccgacgcctcgacgtatgggaggataggatggaggtttgattccaaacaacccactgcatatatatagccatccggcgctaataagtttaatttgtgttagattattntcactcaactattttcatttcactaccatcacaaaaaaccacaacctaccacagctcatcgccacccccccgccgcaccctacgacgcgcacaagagcagcaaagagagagatacgcagataagtcagaagaatatgagagcggggtagtcctcacaggaagcctccgccctccgtcgagggccgagggcaacgccaactaactctcctcactagaaggagacagaggcacgatcccgccacgccctcgtgccgcgcacctgatggcgatcttccctatacattatacatacatgtgcaattaatatgtcgataggtgagacttcagccaccgctcactccggcagacaagacacgagaggcaaggacataatgtacatattctcagtgttaccacaaataaaaaaattcccaccccttcatacatatcacagccactcatacttattacccacaaccccgcgacatctagtagtgaagcggtcggcccgagccgtacaacataagtctgcacatcccatataacacctcacgacggtctgtggtnggtgtttcgcttatggtgcgacgcgcgcgagccgtcggtctaggagtggcagtnagatcggcctagcaattgatgagggggtgggggtagnaggcacccccggcgaacagcaaccagtgagaacacaaannaaagcaaacnaaaaaaaaaaaccn

SEQ ID NO: 4528 - DNA, 1505 bp, Glycine max
  misc_feature (17)..(18): n is a, c, g, or t
  misc_feature (20)..(21): n is a, c, g, or t
  misc_feature (23)..(23): n is a, c, g, or t
  misc_feature (25)..(25): n is a, c, g, or t
  misc_feature (28)..(28): n is a, c, g, or t
  misc_feature (39)..(39): n is a, c, g, or t
  misc_feature (52)..(52): n is a, c, g, or t
  misc_feature (110)..(110): n is a, c, g, or t
  misc_feature (114)..(114): n is a, c, g, or t
  misc_feature (276)..(276): n is a, c, g, or t
  misc_feature (641)..(641): n is a, c, g, or t
  misc_feature (1306)..(1306): n is a, c, g, or t
  misc_feature (1336)..(1336): n is a, c, g, or t
  misc_feature (1425)..(1425): n is a, c, g, or t
  misc_feature (1445)..(1445): n is a, c, g, or t
  Probeset Number=SeqID_14307
gggtgtgtgccgccggnngnngncnccncccccaacgcngacctcgtgtgtnttatggtgagatgcccaccatccccccgcgatggggtggtgagtgagggggggctccntttntatggagagaagtattaatgacaaagaaccccacactaataaaaatggagagatagaagggggatatctaatgttactagattagactactctggagagtgtgataacacacacgctcactcgtgttcgacacaggcgcccgcaggagcatccgcacgaagnccgcgcaatactatatgtgttataggagaccagcgctggggtgggcatccacacattaaaagaatatagcaggagtagcctgcccgcccacccataatacttgcatccccgagaaaagttagagggtgtaggtgtggggagggctagaggaggtaacgagaatgagagttcttctctccccgcatctccctgttctcattttgtagtgtagtgatggtagataaagaagtaaggagtatggaggttggaagtgaaaaagatggaggcttccaccctcgacctgagcaccctgcttccaacccacggcaaagcatcatgaagaggtgccggcgcacccacctgcggatagtgagtgtgggttgggnagggtaatataatacaaaacaactatcggcatggccgatctgccaagtcgtatatgatgcccgtcactcctctccgttctggtgtggctaagaccccacgcacgcagagccaagtcaagaagcacatgtcacacctaacgcaagacatttagaagaggggagacacctagcgacgccacagagtagggcgagaccagccccgccgcgacccgcatgtggtgtgggctgtcggcccgcacacccacccgcccacccgtgtcggggcgcgagataggcgtgatgtgcagtatacgagtacggcctgggcggagacaggccagtcgagagggagagggagtgtgtgtgtccctcctgtgcctccgcctcagacagaacaggaacgcatgcaataaacgtacgatattataactctgatctcttgtcttgttcactggacgacagacgtggctcaagagtggacgagagtatatgaccgacccgagccgcgtataagaagatgaacaaactatatctatggccactgactgtcgctggagcgtgcgtgggtaactagtgtcgtagacgatagcgtctgcatgtgtgacgtccagtatctcatgtagtaaatctacggatgggttgcgaagcgagatgcctatctgccgctcacacatttcggatgggcntctctcaccacacaactgctatatatctgnttctctatgacactataaattctgcaccacacctgtacacaatacgccgcacgcgctcactctataagacacggtgactgtaatcagcncactcgtcggcgagtcgtcncgcgagcactgctcactctcacctagatatatcagtgtgctgtactgcctcactcctccc

SEQ ID NO: 4529 - DNA, 564 bp, Glycine max
  Peptide Sequence Number=SeqID_7550
  Probeset Number=SeqID_14308
agattactttctacaaactgaataagtttattctggttttagctgtgaatttggtcagatactataatgaagattattccgtttattctcattgccttctttctactcttgacatcatttccggctcagattaaagccggtagacgcggtagacgccctatgccaaataacccaatgccagcagaatgcaaacacattgacgattgcgtcgctcccttgataaatgtgtcccaacggaacaattcacactgttgtaatgcgttcaaaagtagagaatcgattcaatgtatgcgtacactatttgcgtccaatgattctttcataaggtttgggactgttggtatttgtaaggcgatatgtcctgaactcagcaattgtagctatcgtccaaagacatatagactcatacccagtagcggatctagaaaataaattaagatgggacaatataaatattatattttacaaaatatttaatataatttaattaataaattatataataataattttttttctgtaatgatttattatataataaatttaaaatgattgacattaact

SEQ ID NO: 4530 - DNA, 1467 bp, Glycine max
  misc_feature (1)..(1): n is a, c, g, or t
  misc_feature (64)..(64): n is a, c, g, or t
  misc_feature (128)..(128): n is a, c, g, or t
  misc_feature (285)..(285): n is a, c, g, or t
  misc_feature (578)..(578): n is a, c, g, or t
  misc_feature (770)..(770): n is a, c, g, or t
  misc_feature (783)..(783): n is a, c, g, or t
  misc_feature (931)..(931): n is a, c, g, or t
  misc_feature (1401)..(1401): n is a, c, g, or t
  misc_feature (1423)..(1423): n is a, c, g, or t
  misc_feature (1427)..(1427): n is a, c, g, or t
  misc_feature (1432)..(1432): n is a, c, g, or t
  misc_feature (1443)..(1443): n is a, c, g, or t
  misc_feature (1467)..(1467): n is a, c, g, or t
  Probeset Number=SeqID_14309
ngcacgcagcgccctgcgtaccgattctgcagtgaatgagcgtccgcgcagtgagtgtcacatntcttcagctactgtgatcaagtagtagcgcggctgtgcgcacacagctctcacagcagcagtgntgcgcggagatcggtcgctctacactagcaggcatagcacggtagctgtgtgcactctcgtctgcatgccgcaccgcgtagtgagataatctactatcagtctgtcttatatctgatcttgcatatcaatctggtagatgaggtgtctctaatacanacatctccacagagagctacggggcgtgcatctctacatctcgtgtggtcgactcaatcatgatgacgagatcaatctttcactgaccagcgcgtgcgggcgctgccatccgacatatctcatctatacattgtagcttcaagctgcatcagcaacatgcattgtgacaaacgtccatctagtgctatataatacatatgtgcgatactactgctacatgcagagagggagggatatattgacatgattactctcacgcagcgttgagagcatatacatcactgtggattgtntagcgggcaacgcaccactcatcatatgtttgcgaggtatcagacacagcgtctgtgcccatgcccgtcgatagtgtgtcatgtcgtctcgcactacgtctctcgtctgctagctgttcacacacatatatatcttcatacactaggatcgtgtgtggcacatacaaaactataccatcccattgagcgtgnatgtcgtatcaancagcacgctggttagattatttatgtggtgtgtgttagttatatatatattatcaccttaaaatgatagatgatgaagccgcaactagacatgggatatgaccatacaaggaggtagtagatgtgcatcactcatcatccgcactcgntgtatctcgtctctcacacatcagcatacatcattccatcagagagtatctagctagctgcccataaccacggcagtattagcagcgggagatataagaagcagctgagcaaccccattatctcgcttcccatataacctcccataacactcataattgcgcggctggtgagcgcgagccgggctcacatgagcgcacggggtcaagcgccatggtggtgaggaagcaccggaggcacactaaccatcagtcgatctgataccttcacacagagatagaataatcatatctccaccatgcgcgacaattccttgttctttatcatttattctacatactatcattataatacacacatgttgatgatcatttgttcgtacccatattccaatgattactcattaagtttagcacgggggagaggggggcgtcccccacatatttcaagctgtagttcgagcgctcatttnttccccctcgcgcatggcgggngagntaagngaggaaacagnaaacaacacaaacaaaacaacccn

SEQ ID NO: 4531 - DNA, 487 bp, Glycine max
  misc_feature (429)..(429): n is a, c, g, or t
  misc_feature (462)..(462): n is a, c, g, or t
  Peptide Sequence Number=SeqID_7551
  Probeset Number=SeqID_14310
tacagggcgacgatcctagatccccccgcctccgactcgagcaaggagcagctgctgccccaacctcacaccgccgacctcacaccggcccaagcaggggtggcacgcctcatcctcatcttcctctcagcgcagatagagatggcggcggctggatctggctaagtggccagtgaggatgacggcttcaccccccccgcccccagtcaaagtcaacggccacttccaatgggcgtcgccatgttcttcctcacgcgtcgccgaccggcagtgagaaagaggacatcgtgaggctcgaggaggttgccatcaccaacggcgaagaggacgaggacctcctactcgatatgacaactcagccgtgaactttaaaagagcaaacaaggttctggtattggagtctgagctggtgggaaagtgatccaaganatttatatagcgttacctgaatgcacaagagtngctgctaggactccatcagtacagt

SEQ ID NO: 4532 - DNA, 1755 bp, Glycine max
  Probeset Number=SeqID_14311
agaaaactctgaaaactttttccgatctcaatgtcacaaaatcctcgtcttagatctcttcagactgaagcaaactgcactatcgacaaagaaaacgcattcatctcttccaacctgtctcaagataaaaagttttctatatcacaaaaattccgaaaagttaatgaaatactccttaagccaactgccaagcagtatggacaagaagcgtaccattcacagacaatgaatccccaggcaggaaacgtgcagaataagtataaccttgaacaggattttgagagcaagatgaatataagcagagtaaaaaagacgttgagctttgagaggaattccatgaacgttcagcgagcttccgatctgttggcagcccagaaagaaagacaaaattatatggagaaagaaaacaggctttcaataattgagcaaagagaaagatattcttttggtgagaagcaaattatcaatgagtcaaagaaaggtttgactttaaacgctgcgagagccccctatgctgagaaggaaccaattcgtctcaatcccattcttgaacctgtcgcaagggaggataaatatcatgaagaggtgattcccgaaatcactgaacgagaaattgagaaaattcccgcacccactgtggacataaatgagcaatgcaacaactctttaaaggattatatttcagatattatcaggaccctgaaaattaaagataaagaatcaacacctatttactcattgaagaaacacaagattcctgtcaatctcagatcaaaaatggttgactggatgattgaagttctttcgagctataaatgctcagaccaaacatttttcattgccgtcaacttgatggatctgtttcttgagaagaccaatgttcaacatgaagtatctgatttgcacctaactggagtgacctgtatgtttatggcttcaaagtatgaagagatttatccgctccgattatcagtgatccatgagaagattgctcatcgaaaaattcatcctgatcagataaagaagaaagagatggagatttttatgactcttggctacaaaatgacaaatagcactccttacgaatttatcatgaatgttctttatcaattaaatgtgaaagaaacaatggcaccaagactgtataattatctgagaaaggtttgtgtctaccttgcaaaagcaaatatgcatgactatgaactcttgagccagcaagactactctgagctggcagcatccactctgtttgttgcttttaagattattgaacaattggataaaagttttccccttttcgaaatgttgaacaaggtgagacaaattttgaaagttgaagaagatattgtttatgattgtgcttcacgaatcctttcgatcgcaaagaattttgacaagttgtatcccaaccttgagaatctgaaaaaattccactcctttaattttgaagatttgccagaatcaaaagactctaaagtatgccaaaaaactattttctgaagtaaataggcattgtatcattttgttggaatttttattcaattttttcgttctcatttttttttgttgcagaattgagaaggcatgaaagggtttaataaaatccaagagagtgaataggacacttggagtgtttcagtttttatatttatttgtcaatgactgtctatttattggccttcgctaacttcatttattatatattggatgcaaagaagcagtaactttttttatatgatgttttttatttcgaag

SEQ ID NO: 4533 - DNA, 1355 bp, Glycine max
  misc_feature (95)..(95): n is a, c, g, or t
  misc_feature (167)..(167): n is a, c, g, or t
  misc_feature (409)..(410): n is a, c, g, or t
  misc_feature (491)..(491): n is a, c, g, or t
  misc_feature (540)..(540): n is a, c, g, or t
  misc_feature (651)..(651): n is a, c, g, or t
  misc_feature (961)..(961): n is a, c, g, or t
  misc_feature (986)..(986): n is a, c, g, or t
  misc_feature (1015)..(1015): n is a, c, g, or t
  misc_feature (1099)..(1099): n is a, c, g, or t
  misc_feature (1272)..(1272): n is a, c, g, or t
  misc_feature (1278)..(1278): n is a, c, g, or t
  misc_feature (1307)..(1307): n is a, c, g, or t
  misc_feature (1322)..(1322): n is a, c, g, or t
  misc_feature (1341)..(1341): n is a, c, g, or t
  Peptide Sequence Number=SeqID_7552
  Probeset Number=SeqID_14312
acaacgtgagcgcttgttctaattgtttagagagggcgtcctctcacgcgctttgctctccgcgcaagaagtgcgctctgtattatgagcggggngtttctcttcgggcgccgcttgtctttgtatgcgcctcagcaccctccttattggtgtgcccttccacatgnagcttgtgtgttatgcgtttcgcgaggtgtgtgtgtgtccgcactctcagcccgcacaccgcagatgtggagacggcgctcgcgacagatgtgtataatcaacatgcgtgaagtagaattatccatgcgccccacaccagcgtttcgaatgtgtcgcttgccgcgccgcgcgagagtagttgtagcacacgcacacctttctatatccagcgatgaacaggcattttgtctgccctcccgcnnttgatgtggatcgaccggcgcacaccacccgtaggtctgtcgaggaccacacctatattctcgtatgtggaagatgctgcncacacccagcccatcccgccccacacagattgtgtggatgatgctcagngctgttgtggagacacgcgtttataggtcgccccccccacgcaatattgagactcgctctacaccgttggtagtggccaccactggtggttttggtgggcgcctcccacgnatcataccacaccagatacccacattacttcatgcaccatgattatagggtatgcccacccactaattattgtggacgacgaggcgtatgtgcccctctcgagtgttgtgcagcatgtgtcagagtgtaaaggatcgttgaatgtcctccaccgacgcacgagttaggagtatgaccaagtttttattatccccccattttatatacacagccccatagtggtgaatcgcacagtaggtaagtccacctggtgtaccacgccgcttttctcttagggtcatgtccacaatacacagagaagtatctaccnctatgtgtatcgtacatgttgtaanagtgtgcgaccgtatgtatgtcctcgtanatgattgcacaggtctgttgtaatatgaatgtgaatgctgtgttggaggtcttaccatcccgatggtccacacgggatggtgtngtgacaccattgttagttagacgcagatgatgtagacgcagatattttactcactatatgtacccctctgtctaccactctctcgtggtgggcgagaggggttatcgctacggatattcttgcgacgcggaaggggcgcgcgccccgcgcttatatcgacactcgggcccctntataanaacaaacactcctcccctcctcaacgcgnccctccgcgccgccncggcgcggcgcggaggcgngggggacccccccc

SEQ ID NO: 4534 - DNA, 1599 bp, Glycine max
  misc_feature (14)..(16): n is a, c, g, or t
  misc_feature (19)..(22): n is a, c, g, or t
  misc_feature (25)..(26): n is a, c, g, or t
  misc_feature (30)..(30): n is a, c, g, or t
  misc_feature (42)..(42): n is a, c, g, or t
  misc_feature (92)..(93): n is a, c, g, or t
  misc_feature (152)..(152): n is a, c, g, or t
  misc_feature (194)..(195): n is a, c, g, or t
  misc_feature (208)..(210): n is a, c, g, or t
  misc_feature (212)..(212): n is a, c, g, or t
  misc_feature (266)..(266): n is a, c, g, or t
  misc_feature (283)..(283): n is a, c, g, or t
  misc_feature (383)..(383): n is a, c, g, or t
  misc_feature (406)..(406): n is a, c, g, or t
  misc_feature (408)..(408): n is a, c, g, or t
  misc_feature (435)..(435): n is a, c, g, or t
  misc_feature (438)..(438): n is a, c, g, or t
  misc_feature (568)..(568): n is a, c, g, or t
  misc_feature (638)..(638): n is a, c, g, or t
  misc_feature (704)..(704): n is a, c, g, or t
  misc_feature (1158)..(1158): n is a, c, g, or t
  misc_feature (1204)..(1204): n is a, c, g, or t
  misc_feature (1219)..(1219): n is a, c, g, or t
  misc_feature (1256)..(1256): n is a, c, g, or t
  misc_feature (1293)..(1293): n is a, c, g, or t
  misc_feature (1436)..(1436): n is a, c, g, or t
  misc_feature (1573)..(1573): n is a, c, g, or t
  misc_feature (1596)..(1596): n is a, c, g, or t
  misc_feature (1599)..(1599): n is a, c, g, or t
  Probeset Number=SeqID_14313
ggtgtggggtgggnnnggnnnnttnnttgngtaatttgtatnaatgattatattactaaatcacaatacacaacacacagacaatgagtatnnaaagataaggctaggtaagagattggtgtatatataactattatatatgagagatatcntagtaagcggaggtagtatacaataattagaagaccagcagnnaagaatgatagannntntgcgactctcgcctgtcacggcggtagctgcgacgtcgtgtgtgggagtgtggnggagtgctggcaggacntgtgtagagtgtgtcgtgtgtgctgttctccacgtagacatatcactactataggttgtgcgtccgcaggagtagagagaggcgggctcgctgtcgctcngtcgctgccggccgtcgcgcgcntnctacgctctcacatgtcagccgtcatnacntatctcgcgatgaccctatcacgccctgtacacacatctctaatgctctcctatgtcgtcataggagcagtgtggaattgaatgttggtgttatgtgttgattagtgaatgagggtcgtccatatatganattttaaatcatgcttagtatagttgcatggatgggctgtgggtgttggaaatgctacacgtctgccgtncgtactcagagatagtaagatagaatagagagcatatcgtggactgacgacaatgaggagtagtangtacaaagaggtaggagagagtgaaatacatgagagcagatgcacgaagcgcgaatgtatactcagctcaaccgagtcatcgataacagcgctaggaagagcgacaaggacgattctgacgaccgctcgagacgtaatactgatcaatggaacacgctgaagaagtgatatgtatgtaacacacgtagctatcactaagtatcagtcacttcaaataataacggcctccacatctcacctattcatcaataccctgtgattttgcttcgtctctgcaccgtcgacacctaactgtcgctccgacacaccttcatagctcacgtctcggtgacgtggtggagcgacgcgagatgaccggcaacacgacaaactccatgactcacgagaagagacgcaagatacaacacagagacgatcctatcgtgctcagcacgtaacacacagatatgtgtgngtatgagatactacgtattctatgagtcgcgtaggtacgatcttgnaccacacatatagcntccctgcagcttgcgcgcgcctcgtccacacggacantatgtctatctgtctacagatagatcagagcgtgtgnagtcgtctacacactactcggagtaaacgcactcgatgaggctgatacgcatctctgactgcacactacgttagagattatgatgcattaagtgagcatagtcatactctgtaagtgtctaacacctcactataatacaaaancgtagacacaggtacactgatcggtctctataggcacacaatgtgtctcatctatctgatcacaacgcacgccgcacactctatcaccctcatgccctcactacctgtgcgcgtaggtcatgcgatgtctgtgttgngtgcagcgagactactagaggtnagn

SEQ ID NO: 4535 - DNA, 859 bp, Glycine max
  Peptide Sequence Number=SeqID_7553
  Probeset Number=SeqID_14314
gcggggagtttgaattgatgaagaaaggatggggaaaaaaatgaacgacaagcgtgccgaattaaaaaaagaactattgaaagtgtttttcagaccactaactcgcgcattaacagttaaccttgaagaaggaggagttcaaatggaagagaaattgaatgatttattaagtgaagtggcagctgaggcatcaccttcagattctgctacaacactcgatgtatctcagccagcaagatggatttttgcaagactttcaccaggaactgtcattagcattgtcactgattcaggagacttaatcgggccagttcaattcgtatcattcgatgcgtcaacaagtgttgtctttgttacacaagaaagctcagtcacaccaacaggctctgctacgactttattagatgtagataaagttgaaagtgttacgttcacgtcttaatgtgagagggccatcatgaagcttctttatattagctctggctacggcggaatctatcacatgtttgatcaatgggtagaagagagcttcattgattcccccttttcatatgtaaagattgatagagaatctctacccgctcacatgcacaaaatccggacattttctccggattttgttttgatgatgatcggtgatcatgttccgagcgaagtacttcatcaattcaaacaagaaaagatcccgatcgttctatggatgacagaagatcccttttatacagatgtatcggctgcttgcgcacaagatgcgcggatcatcttaacaatcgatgaaggggttttgccattttacaaacaattaggcgctgatcatgcgcactactttcccattccggcaaatacacgtatctttcac

SEQ ID NO: 4536 - DNA, 877 bp, Glycine max
  misc_feature (601)..(601): n is a, c, g, or t
  misc_feature (603)..(603): n is a, c, g, or t
  misc_feature (607)..(607): n is a, c, g, or t
  misc_feature (625)..(625): n is a, c, g, or t
  misc_feature (633)..(633): n is a, c, g, or t
  misc_feature (635)..(635): n is a, c, g, or t
  misc_feature (660)..(660): n is a, c, g, or t
  misc_feature (719)..(720): n is a, c, g, or t
  misc_feature (722)..(722): n is a, c, g, or t
  misc_feature (736)..(736): n is a, c, g, or t
  misc_feature (739)..(739): n is a, c, g, or t
  misc_feature (742)..(742): n is a, c, g, or t
  misc_feature (753)..(753): n is a, c, g, or t
  misc_feature (760)..(760): n is a, c, g, or t
  misc_feature (772)..(773): n is a, c, g, or t
  misc_feature (781)..(781): n is a, c, g, or t
  misc_feature (783)..(783): n is a, c, g, or t
  misc_feature (785)..(785): n is a, c, g, or t
  misc_feature (804)..(804): n is a, c, g, or t
  misc_feature (829)..(829): n is a, c, g, or t
  misc_feature (850)..(850): n is a, c, g, or t
  misc_feature (856)..(856): n is a, c, g, or t
  misc_feature (859)..(859): n is a, c, g, or t
  misc_feature (864)..(864): n is a, c, g, or t
  misc_feature (876)..(877): n is a, c, g, or t
  Peptide Sequence Number=SeqID_7554
  Probeset Number=SeqID_14315
aaaaccgtaaataaataaaggaaaatacccattaaacatttgtaaaaaaaggttttttggggattattaactaactaacataatggtgcgccttcacgtagctctccttcttctcttcattgccgtctccaccgccatcgtatcagctaccgataaaccgtcggtaaccaccgccggacctccaaccgcaacaactccgaccagtggagatgtcgaggcagcagaggctccaggagacgacaatgccatcggaacaaccgacgatgatgcacctggtactcccggagatgatgatgtggcagtcgccggacctatcggaagcgaaacttcgtacgcaaactatccgccgcctcagcaaacttccggcagtggcgtcactgctatgattggagtcgtttctgtcgctgctacgacggttggatcgttcttctttttctgaggtgtgattggtgcatgtaatttaagaaattaataatgtttttattgaatgttttggagtaatacttttttccttgtagatgtatcatgtataagcattttgcttgtcccttcatgtataacattgggacggtacatatcattacaacataaaaaactttgngnatgngattctcatatatatggntttattgngnataatacccttgggaatatttacgngaaaaaaaaaaaaaaaaaagcttatcgataccgtcgaaccctccaggggggggccccgnnanccaattccccctanaanggngccgtattacncgcgctncctgggccgtcnntttaaaancngngtgaatgggaaaaaccctngggttacccaatttaatcgccttgngagaaattccccctttcccangtgggnganaaaangaaaaaggcccnn

SEQ ID NO: 4537 - DNA, 1622 bp, Glycine max
  misc_feature (19)..(19): n is a, c, g, or t
  misc_feature (50)..(50): n is a, c, g, or t
  misc_feature (76)..(76): n is a, c, g, or t
  misc_feature (100)..(100): n is a, c, g, or t
  misc_feature (102)..(102): n is a, c, g, or t
  misc_feature (119)..(119): n is a, c, g, or t
  misc_feature (214)..(214): n is a, c, g, or t
  misc_feature (266)..(266): n is a, c, g, or t
  misc_feature (301)..(301): n is a, c, g, or t
  misc_feature (347)..(347): n is a, c, g, or t
  misc_feature (468)..(468): n is a, c, g, or t
  misc_feature (503)..(503): n is a, c, g, or t
  misc_feature (506)..(506): n is a, c, g, or t
  misc_feature (776)..(776): n is a, c, g, or t
  misc_feature (1612)..(1612): n is a, c, g, or t
  Peptide Sequence Number=SeqID_7562
  Probeset Number=SeqID_14316
cgcgacgcgatcagtccancagtcgcagcgatcgacagcacgccaagtcncatcatcgctctgtcacgacgtaganctgcgtgtttgtcgtctcggctcnanatgtgctctaggacaangcatgcttaacggacgcgcaggagcagtagatctcagagtcaagcgcagagtctctagatcgcatagtagcgcacgcgaggacgacgtcagtgcngatgcgaccgctctatacatattaccagagtatccatccacagatgctgcgntcgtcagcggcgacgcgcgcgtagatccagcaccntagtcgcccgagtccttatatatacgtgccacgcatcgcgatcgcnagctgtgtacgcgcaggtactcatccacctgctcgctgctgatctactacgcacatcatgacgtcgaagatagatgtgcgctgctgcgagtcctcacgtcaagcagcaagatgtattgatntcgtatgtcgggatctgagtacgtgtatacaagtntcnagaggacgtctcgtcaatacgcgtagaccgtccgtctctgatcgtacgcaaacaaaacacgtatgcacgggcagtgcgcgcctagtcatatcatatatatataagaatagaaagaggggtgggcgggatgagagcgtaagagtagcgggtcggctcgttcatctcacactgcgtgtgctgtcgcgacagcgaaacataataataattaagagacgcgcggatagtcgacagcctccatccagtacagagcgcacgcagcatgcaggcgcngggctgtggagtacgtgcatcctactgcgactccatccagaatatgcgcgcgagtcacaagagcagctcatagcctggcgcgcgcgcaccggacagttacaacggcgatgccatcaattcggaacctgacgagccgtgcgcgtgtgtggataagctggtcgcgcctcacaaaacacagtccctgttactatgtcggacgcccacccagactccatgcgcggggccgcgccactcctgagcgcgcgcacaaatcagcaggcgcgcaaatgttagtttacaacgcgtgcgtctcgagtccaaatcccatccctgttctcccgcttgagatcggtggctcacagcgtcggagctaataaatgaggctatcgacaacccagcgcggcgtcctgcattctcggtaagtggtgtgtactctgcgctatgggatcgttagccgcacaacataatctatggtactgcgtttgcggagcggacatcacgctacggatccatcaccagcgaacgcagcctacgcgcggtcttacaacaacacgcagcgcgcgggggccagtacagagcgacgtgatatatactagacccccgattactaggtccctctcgaaggaataaattacacttagattcaaatgcatgcgcgcgtaaccagagggcacgcgagtcaatcgagagggggcggcggcgcggccagagaggccggaggaccaatatggcgggcttacgtttacgcccctccacgtcgccacacgcaacaccaacaaaacatacacaaagaccgcccgaccaccgcgcgcgatgccacggccacgtagtgaacaaaaagaaggagtggagcgaantgggacagtt

SEQ ID NO: 4538 - DNA, 1800 bp, Glycine max
  misc_feature (1)..(11): n is a, c, g, or t
  misc_feature (16)..(16): n is a, c, g, or t
  misc_feature (22)..(29): n is a, c, g, or t
  misc_feature (32)..(36): n is a, c, g, or t
  misc_feature (41)..(42): n is a, c, g, or t
  misc_feature (44)..(45): n is a, c, g, or t
  misc_feature (49)..(51): n is a, c, g, or t
  misc_feature (56)..(57): n is a, c, g, or t
  misc_feature (59)..(59): n is a, c, g, or t
  misc_feature (61)..(61): n is a, c, g, or t
  misc_feature (67)..(67): n is a, c, g, or t
  misc_feature (76)..(76): n is a, c, g, or t
  misc_feature (130)..(130): n is a, c, g, or t
  misc_feature (136)..(136): n is a, c, g, or t
  misc_feature (162)..(162): n is a, c, g, or t
  misc_feature (391)..(391): n is a, c, g, or t
  misc_feature (406)..(406): n is a, c, g, or t
  misc_feature (419)..(419): n is a, c, g, or t
  misc_feature (423)..(423): n is a, c, g, or t
  misc_feature (488)..(488): n is a, c, g, or t
  misc_feature (890)..(890): n is a, c, g, or t
  misc_feature (906)..(906): n is a, c, g, or t
  misc_feature (997)..(997): n is a, c, g, or t
  misc_feature (1015)..(1015): n is a, c, g, or t
  misc_feature (1059)..(1059): n is a, c, g, or t
  misc_feature (1176)..(1176): n is a, c, g, or t
  misc_feature (1191)..(1191): n is a, c, g, or t
  misc_feature (1302)..(1302): n is a, c, g, or t
  misc_feature (1346)..(1346): n is a, c, g, or t
  misc_feature (1353)..(1353): n is a, c, g, or t
  misc_feature (1424)..(1424): n is a, c, g, or t
  misc_feature (1435)..(1435): n is a, c, g, or t
  misc_feature (1443)..(1443): n is a, c, g, or t
  misc_feature (1567)..(1567): n is a, c, g, or t
  misc_feature (1572)..(1572): n is a, c, g, or t
  misc_feature (1616)..(1616): n is a, c, g, or t
  misc_feature (1637)..(1637): n is a, c, g, or t
  misc_feature (1659)..(1659): n is a, c, g, or t
  misc_feature (1692)..(1692): n is a, c, g, or t
  misc_feature (1698)..(1698): n is a, c, g, or t
  misc_feature (1721)..(1721): n is a, c, g, or t
  misc_feature (1727)..(1727): n is a, c, g, or t
  misc_feature (1754)..(1754): n is a, c, g, or t
  misc_feature (1779)..(1779): n is a, c, g, or t
  misc_feature (1800)..(1800): n is a, c, g, or t
  Probeset Number=SeqID_14317
nnnnnnnnnnnggggngggggnnnnnnnnggnnnnnttaanncnnaaannntgcgnntnanggcgangcacgggcnataatatagagcttgtggtctgacaccgcggatgtacgagcgctcgccgctagncgctgnagcttacgtagtgtcgccgatcaccnaccgagtgtgatgtcggcactagatcgcgactacgcgccgcgtaccttcgccgaccacacaaccgcttgcctgtaatagtctgcgacagaaagtatgtataattgatatgtgatgtgctcggtctcgagcatactatgtgttaagcgcgtgatattagtaatattgttgtgtggacaatatagactgttagcggcgtcatgtgtccgttgctgtttcccgttcgtgctnttctcttcatgcacnttgttcagcatgntctngggacttgagtatatggatgatgatctctatgcagcattagtttgatatatcatatataagagantatcgtatatttcatatgttcatattcactattatggtatagtaataacgatgttacacttatattattttatatatagtttttatatctttattgttttgtaatgtatgcctgcgcgactgtgctgtgttaggttctcatgtgtgtccctctctctctccgtggttgtgtttatgtagcgtttgatgatcatcacgtaatagatcggttgctctgtctgttaccctcgtctaactcgtatctcgtttcttcacactcacgcactactttcccacatcttctcatctatgcgaaacgtatcacatttgacagtaatactcgatgcgcttgatactactcttaccgcatcgctatctgcaatcctctcccttcctaatggcgctcgaagagacacgctctgtnttctccggatctaccncgctgtacgtatctcgccacaacatcgttgcaatgcgtcacaatatttataattatatagatctatgtctctttggacacgtgaaatatantctactctatacctgtgnttacatgcactcatgctcgacctatctcgtatccgacccgtatnacactatgtgatgatgatatcactactatctcttctctcgctgtgtacatgatctattctacatcatctatctgtgtatatctgttatatcttcgtatgcgcacacagctcgttatncatatatcatcaccngtaccacgcagatcagatacgactgatctcaatatctctgatcttcttgttcgtgatgatactagtctggttactatttatctgcgccgtccactatcacacatccgtgangtgcgacttcgctctgtacgtcactctcgtgctcgcgctctctntcgactnccacgcacctatacatcactacacgcacgccgctcgtgctcgatacgtctgtacgcgctacggagcgatgngcctagcctantctagatncagtcagatctatacgactaactctcgttaatccacatctctcactgcggcctcctgtactactaatgtagcactatgatcattaacactacacatttcaatcgacgttcgtcgctgtccgcangtctncgcgagtagacgtctctctcgtgtctatgtttatactatcagantcgtaagtatctctcgtatgnctcttttcacatctcgatatcncacacattactacatcgtatcctgatactcgtnatctcntcgcgttacagatcgatatcatnacaccncgctgtacgttgtcacgcatatgttangctaccatccgcatccgactctgcnacacacagtatagaccgtaan

SEQ ID NO: 4539 - DNA, 1353 bp, Glycine max
  misc_feature (886)..(886): n is a, c, g, or t
  misc_feature (1001)..(1001): n is a, c, g, or t
  misc_feature (1105)..(1105): n is a, c, g, or t
  misc_feature (1332)..(1332): n is a, c, g, or t
  Peptide Sequence Number=SeqID_7563
  Probeset Number=SeqID_14318
gagtggccgctcatctgatttatttctgcacaacatcaacagcacttcgtcggtccgcccgccgtcgcccaccttttcacctcctactgccgcgtaaggaacagtgactatttttacccatagtatacgtatgtatatacgtatacaaataatccggatcaccgcgcgagcgactcctaggtgacctgtctataaacgtcccgcctctcgcacacacgctagctgcgcatatataatatatgaggttactcagccaactcatcgggaatagtagtacggctgtgacgatttaaccaagggccgtctacctgtgcggcgcgctatcaacagcgcggtgtaaagcgtacacatggccgacgcgcgccgtctataaatgtagggacgccgccccgcaccgaattagcgcggtgagcttctccaaatcccctacgcgctatatgttacgctttcccatcgtcgccttaccttttaatatcctcccctaatagtaatgcttcctatagagccgcaccgcggcgactactgagctcgtattggtacggcggtgtgggtggttcgcgttgtgacttgctcgggcgccgccgcgacggtttgatcctcataacacgccgccggacgccgtgtcattaaccctctcgatttcgactttcgtattcgcgcgatggatactatagcaatgattcactccggtgcttcgctatattcgtgagccgttctaccgcccgctctcggtatacgggagatgtataggagagtcgcgcgaatcgacgcgcatatacagaccgaatactcgatctataatagctggcggcggcgtgtatatacacgaaccgggcgcgccgcagtattttatcggctacattccgtgtcgcggtgctggacaaanaccgcgcgaacgttgcccgctattccactattgccatcggagtgttgatattctatctgtatacgcgcggccagcggggggaggcggtggggctgatttggcggcgtctgtaccncacacacttatcggcagatataccttcgtgcgtggtattaatatgatactcccgcgcacgtctctcggcgccaaatgcgctatacggacatcgtatattacgantccacctccggacggtatgcggctactgttaatatgattccgactcgcaccggtgcgcgcatcacatatcatatataagggtgagatgcgagccgacggcggcctgcgaggggcacatgcaaggaacacaatatcttaactaatcgacaacgtgcgacgcgcgtgcgttgtatacacggacactatgaatatcaatttatacagctgcgatccgtctatccgctgancgcgcgtcgatgtgacacatg

SEQ ID NO: 4540 - DNA, 973 bp, Glycine max
  misc_feature (1)..(1): n is a, c, g, or t
  misc_feature (15)..(15): n is a, c, g, or t
  misc_feature (717)..(973): n is a, c, g, or t
  Probeset Number=SeqID_14319
ntgagcatgagctcntgatgtacattttttatgcaagaacatgagctcttgataggatcaaatcaagtgagtacaagcaacatggcccgacaacttcgcaccagtgaccaacaactgttcttagccttggcaatctcctggtgggtgcttctgccttgtagaataaagagcaaccagttggaaatgaaaaggtccatatcctccttaattctgcatttccccaatccagtcataccaagatccacactgggattcaaaaaaggcattgctctctcgtttagcatagaggtgaaagttttgtgaaacacttgataatgcattcttccctttcaatgaaccaacctttggcatgggatggcaagataagatgaagtccttgaaatgtacttgtcctagctccagcagatatctgaaaacccattaaacttgtcccagacattccaccagtaaacccaagatgtgtataaataaagttcagaaaaataggggataaacttggaagttctcagtaccaatttttagaggaaaaacaaaacttcaggtttcaagaccttctggtaggctttttctattatttggaaatttaaattggaaggaaggtgaagaatttttatttgcattttaactcttatcagccaaattaccttcaaaatttttaaaactaatttttttcaaagggttaatttattttaccatattccttaaatataattttcnnnnnnnnnnnnnnnnnnnnnnnnnnnnnnnnnnnnnnnnnnnnnnnnnnnnnnnnnnnnnnnnnnnnnnnnnnnnnnnnnnnnnnnnnnnnnnnnnnnnnnnnnnnnnnnnnnnnnnnnnnnnnnnnnnnnnnnnnnnnnnnnnnnnnnnnnnnnnnnnnnnnnnnnnnnnnnnnnnnnnnnnnnnnnnnnnnnnnnnnnnnnnnnnnnnnnnnnnnnnnnnnnnnnnnnnnnnnnnnnnnnnnnnnnnnnnnnnn

SEQ ID NO: 4541 - DNA, 433 bp, Glycine max
  Peptide Sequence Number=SeqID_7564
  Probeset Number=SeqID_14320
aagccgatctggagcgatggcccgtcagcgacgccggagaatccgtcggaatcggagaacggtgaggagacagacgcggcgacgatggtagttgaagagctggtgacatcactcaacacacagagactctacagggagctaacactatccctccgaacaggcttacgcgacgcttgcgctgaattctccttcctccgcatccgcggccttcgatctcttctcaaaactctccgatctatcgccgaatcagactccatcattcgcctcttctcccacacccaaaccgtctccgatctccaactggttccggtgctttttcgacattcgttgaaagaagcggaggatgatagagtgacgagcttagatcacatattcagcgttgagccgatgaagataacgagtccttctacggatgatgaggtcgcggttgctc

SEQ ID NO: 4542 - DNA, 227 bp, Glycine max
  misc_feature (33)..(33): n is a, c, g, or t
  Peptide Sequence Number=SeqID_7565
  Probeset Number=SeqID_14321
gtattcgagttgttctgttgcaaaatgcttgtntcactctccaccgtgtgattatgatcaaacggccgctagcttccctccttggagtcacacattgaccacgtacgctgggccgtcccctctcccccagccggaggaagcttccagaaccttcagccggagcaacggagcgcgagacatggtggtgctgcacgtgaaatcgtcgacctcctcctcgtcctcgtccc

SEQ ID NO: 4543 - DNA, 1747 bp, Glycine max
  misc_feature (1)..(1): n is a, c, g, or t
  misc_feature (25)..(31): n is a, c, g, or t
  misc_feature (34)..(38): n is a, c, g, or t
  misc_feature (40)..(41): n is a, c, g, or t
  misc_feature (43)..(45): n is a, c, g, or t
  misc_feature (51)..(53): n is a, c, g, or t
  misc_feature (55)..(56): n is a, c, g, or t
  misc_feature (58)..(58): n is a, c, g, or t
  misc_feature (60)..(60): n is a, c, g, or t
  misc_feature (62)..(62): n is a, c, g, or t
  misc_feature (76)..(76): n is a, c, g, or t
  misc_feature (98)..(98): n is a, c, g, or t
  misc_feature (113)..(115): n is a, c, g, or t
  misc_feature (118)..(118): n is a, c, g, or t
  misc_feature (120)..(120): n is a, c, g, or t
  misc_feature (144)..(144): n is a, c, g, or t
  misc_feature (182)..(182): n is a, c, g, or t
  misc_feature (193)..(193): n is a, c, g, or t
  misc_feature (214)..(214): n is a, c, g, or t
  misc_feature (220)..(220): n is a, c, g, or t
  misc_feature (224)..(224): n is a, c, g, or t
  misc_feature (233)..(233): n is a, c, g, or t
  misc_feature (345)..(345): n is a, c, g, or t
  misc_feature (380)..(380): n is a, c, g, or t
  misc_feature (606)..(606): n is a, c, g, or t
  misc_feature (652)..(652): n is a, c, g, or t
  misc_feature (654)..(654): n is a, c, g, or t
  misc_feature (763)..(763): n is a, c, g, or t
  misc_feature (765)..(765): n is a, c, g, or t
  misc_feature (865)..(865): n is a, c, g, or t
  misc_feature (919)..(919): n is a, c, g, or t
  misc_feature (921)..(921): n is a, c, g, or t
  misc_feature (936)..(936): n is a, c, g, or t
  misc_feature (942)..(942): n is a, c, g, or t
  misc_feature (1045)..(1045): n is a, c, g, or t
  misc_feature (1057)..(1057): n is a, c, g, or t
  misc_feature (1061)..(1061): n is a, c, g, or t
  misc_feature (1089)..(1089): n is a, c, g, or t
  misc_feature (1127)..(1127): n is a, c, g, or t
  misc_feature (1153)..(1153): n is a, c, g, or t
  misc_feature (1172)..(1172): n is a, c, g, or t
  misc_feature (1244)..(1244): n is a, c, g, or t
  misc_feature (1272)..(1272): n is a, c, g, or t
  misc_feature (1279)..(1279): n is a, c, g, or t
  misc_feature (1299)..(1299): n is a, c, g, or t
  misc_feature (1342)..(1342): n is a, c, g, or t
  misc_feature (1464)..(1465): n is a, c, g, or t
  misc_feature (1470)..(1470): n is a, c, g, or t
  misc_feature (1497)..(1497): n is a, c, g, or t
  misc_feature (1516)..(1516): n is a, c, g, or t
  misc_feature (1518)..(1518): n is a, c, g, or t
  misc_feature (1538)..(1538): n is a, c, g, or t
  misc_feature (1588)..(1588): n is a, c, g, or t
  misc_feature (1604)..(1604): n is a, c, g, or t
  misc_feature (1617)..(1617): n is a, c, g, or t
  misc_feature (1624)..(1624): n is a, c, g, or t
  misc_feature (1665)..(1665): n is a, c, g, or t
  misc_feature (1690)..(1690): n is a, c, g, or t
  misc_feature (1731)..(1731): n is a, c, g, or t
  Probeset Number=SeqID_14322
ntttttggggtgttttgtggggggnnnnnnnggnnnnncnncnnngaaacnnnanntngngngtggttccttgatnttgtgcggctgtgtggtgtgcngggcgaggaggggcnnnaancngtaattacaaatagtagactgganatagtgatattatgtgtagtagatgtaagtgtctcttnttctttatagnctgaggcgacatagagcgtgnaatatnatantcatgattntgtgtacatgtatatgctatcgtatgagtacatgtacattatctatactattatacatgatgatgtatgtattctatttacatatgtgtagactgagtgagagcgactggtngtagatgagaggcagcggtgtgtcacttagaatanaaatactaatattatgtctagatgtgtgtagagtaaataggatagttagtagtgatattagagtgttgtagttgtgatggatactatgttgacatgtggagagatggaggagtggatcagatagatggtcaatgcgtgcgtaccgtgtagagagtgtagtaggtcgttgacggtgtgtaataagtgtgtacgctcttactgtttgtagtagtcgtgtttgaagatntgatagttaatatcatatattgtatacagacggcgctgctgaagananatgagtgttagtttatagtcgagacgatgtgtgcatgtgtgtgatacgtcgatagcataactggagatctctgtgttgaatatgagtggtatggtcattaccgatgagnangtgtcttatgattgataaaatagtataaataataaatcgatacacatatgtattatgctaatacaactcttgtatgacgagtgcagagtaagagcgagtnatgtcatatattttgagtgtgacagaactatagacacacaaactatacgaattncngaacggatgcacgcnactgcnaacagagagtcgctgtgagtagtattatgtcatatgcaagtggtagtggcgagcgctcgagtggtgtgttcggtgtatgaggatgagtatgagtatacacacnccctacctggcntagntagagtcatgaggatatgatgatgactncttgcatgtcatggtcctcgttatctgatttcatcaanatacatatgatagttatagcgtcgancgagataggtagtgtaggntgccgagaacacacactgatattgccgcctctcgcgtaattgcgtgctagctgtatatcagtgtagttggancgtagtgagatgcgctacgtatgcatgntgttgancacgactacgcgtgtctcgnatccgtacaacgtgacgaggtagacgagtgcaccatagcgtanagaagcgagtcgtgactatatagcacgaggatcgcgctggacaacaatctgcgtcgcacattcacaactacatacagacacagactagagatgcgttggtatatgtaaatgtgtgtggtggnnagatnagatgcacttcggcgacgagcgagtgngaacgcatagtacgcaggngnaggaggcagcggacgggagngtcggcggcgtcgctatcgagcgtgcggggatggcatgagctggagtcgngtccatgtcatgatgnacgtcgtgtcgangccgtanctttggtatgcgaactcatactactaataaagacatgcccntgcgctcatatagattatacagttnattcactatagactcttaatcaacgagtagcgtgtggagangtacatacatacatcg

SEQ ID NO: 4544 - DNA, 1441 bp, Glycine max
  misc_feature (337)..(337): n is a, c, g, or t
  misc_feature (1029)..(1029): n is a, c, g, or t
  misc_feature (1150)..(1150): n is a, c, g, or t
  Peptide Sequence Number=SeqID_7566
  Probeset Number=SeqID_14323
tcacctctcacttttcattctacttcatttactatacatacttcatctctctaatgtatatcacgggaagagagagagaagagcggcggccttcctggtgcggggagtcgccgcatctacagatgtcgcccttctcttttctctattctccacccgcatcacccgatttccgcctcaccttaatttcatgtaaaacttctcaccgtccgatatccgactcactcccaaaaccaacccttatccctcataattctattcctaactatacaacaatctctacacatctctcagatccacgcccaccgaatttaacgacactatacatttcttatactcnacccccacccataatctagttccaccatcccaagctcctattctgcttccccacagccctaataactaaccctccgacccctatttaataacataatattataatcacactgtatataattactcacagacagcagcattcggtatgctaactccctacatcgcaaccgatagactatatcccactcctcccctcactaccatctccactttcttatcccctctctgcccatctactcacaaattatgtctatcgcccttaccctacttcatcttccacccaactcttcactaatatcattacctgctaatagctaccatccatctttacgcaatgtgctactcttaacactcctacaatcacgaaccaacttacactatattgcaaacgcgttcacattatcaatccgacacggcactacatgcaataacacttcctaactcactaatcctcgtatcctcttgatgcgtcactttctccctccactctctcatcccgcacataacacctacacgacggaattcgccttctatcgcacaatacatttattgtcctcatattatactatagatgctcatcctatatcttccctactcccatactctgtctatccccttctctcgcgaatgttcacgtatgttcatatacacgcctagatggtctgtacaacaaacagcagatgggtatctcgnctctgagccgctctctcgaattagacgtctcttacctcgcgcctctcttgctacaacactcgactcctccttcactatctcgtctcgcttcgactctcgttgtagtttcttaacatacccncgtaaatacaacctttcactcctcaccactctctagactatcaagacattatattgatacatactttctattcaactctgagatgactattgcttcctctattttctttctgctctctatctcagaatgtactgcttatcatacctctacgtctcaccatctcgcacctatatataatactgctccacatcggatacatactgcaatctgatcgccgatatcgctcttctcactcgtatcaccctatcttcgtctacctcgtatctctcgtttctcatatacactattgct

SEQ ID NO: 4545 - DNA, 550 bp, Glycine max
  Probeset Number=SeqID_14324
aaacacactgaaaggaaaggccagatgtactgagcacaagaaagcaattaaattaacaaagagagctatatatatatatatatatatagctaaaacatytataatagtcatcatgtcagggcagagaaggtcgtcaagaacttcaaagttcactgagattgagattaatgaacttgtgtytaggttacaagttytgcttytgcaagtgaaccaaagaggcaactcaaggcaatcagcgtccaagatyttgcaggaaacctgctgttacattaggaagctgcaggaagaggtggaacagctcagtgagagactatcagagctcatggattytgtggatatcagtgacattgacagaagaactttacaaaaccttttgcaacaatattaacaaaatggccccttttytacagtgataaataccttgtctcccttatatatgtttgttcccccagtactgtagctaggttgtaatggagcctttcctaattttgtttttttttggaattatggagccttttcaagcatgcaataataacataccatatgttgg

SEQ ID NO: 4546 - DNA, 536 bp, Glycine max
  misc_feature (361)..(363): n is a, c, g, or t
  misc_feature (408)..(410): n is a, c, g, or t
  misc_feature (412)..(412): n is a, c, g, or t
  misc_feature (449)..(449): n is a, c, g, or t
  misc_feature (451)..(453): n is a, c, g, or t
  misc_feature (468)..(469): n is a, c, g, or t
  Peptide Sequence Number=SeqID_7567
  Probeset Number=SeqID_14325
ccccttttttttttttttttttttttttttttttttttttttttttttttttttttttttttttttttttttttttttttttttttttttttttttttttttttttttaagaaaagcatcaccaaactaatgaattaaggtgcaacaatttcacttgttttcacaaatatgacaaaagtaataaactcactatttgtcacaaatatgccaaatcactataacaaaataaaaaatccaagatatagatagaattagaacagcaatggataagattacatcagatatagactatattgaacagtcgatgtcgcacgcgtccctgagtgtgtcaaagacctctgccgagctactctgcccatcnnnagaacgaacccaacttctatctatttcgtgctaatcactgactcnnncntaggattggcccacgatacctttgacaatatcgcctncnnnattacctgcagcatnngctcctggccgaatagatacagtgaatgcccatgcgctatgcctatgaccccgtgaaaacatgatat

SEQ ID NO: 4547 - DNA, 521 bp, Glycine max
  misc_feature (37)..(37): n is a, c, g, or t
  misc_feature (39)..(39): n is a, c, g, or t
  misc_feature (41)..(41): n is a, c, g, or t
  misc_feature (44)..(44): n is a, c, g, or t
  misc_feature (156)..(156): n is a, c, g, or t
  misc_feature (202)..(202): n is a, c, g, or t
  misc_feature (220)..(220): n is a, c, g, or t
  misc_feature (311)..(311): n is a, c, g, or t
  misc_feature (324)..(325): n is a, c, g, or t
  Probeset Number=SeqID_14326
tcccgcctcgcccacgcgtccggctctctgtctgcgncncncanaacggggtggctctggttgtctcattaacgtcgtcaaaaatgctgcaaacccgtcccggcggctccggtggccgctcggtgctggtgggggtgaagatggtctcccccagcnaggaattgctcacttgggctttggtcaaagttgcacaccctggtgntgccgggggggctctgcntgttcttgggatcattgaaaccgtgaatggagacgggaaatcgtcgctgctttcgcttgtcaaggcgtttgactctgttcttgctgcttgnttaggattctgcnntttgaaacaggtggatctcaagctctttatttgccgtggttcgtcagtgttgaaaactttggttcgtgaagcgtctggttgttccgcacctcatgttgtggtctgggctactcgtggcctgcgtgggttccggtcttctaccggtgttgctggtctctgtgctcatacgtcttcccgggtttgttgtgttcttgct

SEQ ID NO: 4548 - DNA, 1780 bp, Glycine max
  misc_feature (10)..(10): n is a, c, g, or t
  misc_feature (15)..(15): n is a, c, g, or t
  misc_feature (27)..(27): n is a, c, g, or t
  misc_feature (34)..(37): n is a, c, g, or t
  misc_feature (53)..(54): n is a, c, g, or t
  misc_feature (109)..(111): n is a, c, g, or t
  misc_feature (115)..(116): n is a, c, g, or t
  misc_feature (119)..(119): n is a, c, g, or t
  misc_feature (122)..(122): n is a, c, g, or t
  misc_feature (126)..(127): n is a, c, g, or t
  misc_feature (129)..(129): n is a, c, g, or t
  misc_feature (150)..(150): n is a, c, g, or t
  misc_feature (161)..(162): n is a, c, g, or t
  misc_feature (201)..(201): n is a, c, g, or t
  misc_feature (232)..(232): n is a, c, g, or t
  misc_feature (238)..(238): n is a, c, g, or t
  misc_feature (275)..(276): n is a, c, g, or t
  misc_feature (278)..(279): n is a, c, g, or t
  misc_feature (337)..(338): n is a, c, g, or t
  misc_feature (343)..(344): n is a, c, g, or t
  misc_feature (348)..(348): n is a, c, g, or t
  misc_feature (433)..(433): n is a, c, g, or t
  misc_feature (483)..(483): n is a, c, g, or t
  misc_feature (490)..(490): n is a, c, g, or t
  misc_feature (543)..(543): n is a, c, g, or t
  misc_feature (571)..(571): n is a, c, g, or t
  misc_feature (584)..(584): n is a, c, g, or t
  misc_feature (644)..(644): n is a, c, g, or t
  misc_feature (660)..(660): n is a, c, g, or t
  misc_feature (716)..(716): n is a, c, g, or t
  misc_feature (907)..(907): n is a, c, g, or t
  misc_feature (982)..(982): n is a, c, g, or t
  misc_feature (1139)..(1139): n is a, c, g, or t
  misc_feature (1259)..(1259): n is a, c, g, or t
  misc_feature (1416)..(1416): n is a, c, g, or t
  misc_feature (1486)..(1486): n is a, c, g, or t
  misc_feature (1562)..(1562): n is a, c, g, or t
  misc_feature (1585)..(1585): n is a, c, g, or t
  misc_feature (1589)..(1589): n is a, c, g, or t
  misc_feature (1603)..(1603): n is a, c, g, or t
  misc_feature (1605)..(1605): n is a, c, g, or t
  misc_feature (1696)..(1696): n is a, c, g, or t
  Peptide Sequence Number=SeqID_7568
  Probeset Number=SeqID_14327
gtgttttttntgttntgcgcgtcctantctggannnnttgtgccacctctggnnctccattatatcttttcatacttcagctgtatcctactttctctttgtctctttnnntgtnncgncgngtannantgtgctcggttgtcacatgangagagagtgcnncggtgggctaccgggcgtctctaggtacgtcatgtctcntctcagtcgtcgtgagatgtagtagtatggngtatanttatgaatgtatgtgtatattacaatatattgatgcnntnnttatcgtccccctcagaccatatcatactattacactttcatgttatattatttagtnnttatnntaantgatgttattaacgcgtgtaatattgattatctagtgatagtcgcgccgcccgcgcgccgcgaccggcgcgcgctttgtgctatnctgccggtttctccgctatctctcgcgcgcgttctctctctctcttcgcnctcaccncatactccgttatcatcctcttctcgtcctcagactagccggtatgcgctgcnattgatgtcacgcgtccgtcgactccgngtctctgcccgcncgcggccgccacacggccaaacctctcgactgtccctcagctgtcgcgctcaccgccagnactacgcctcgtatanctgcttagtcactacatctagtgatacgtctgggagacgatgcgaatgtcaatganctcgcaaacatctctcgaagctcgcctactagtatctatttctctcgctacgttgttgttagtatttactttgcgctctatgctatgatgatctttctcttatatgcgttctgaagatctatgtatgtggattaacttaatgaattagtagaatataggagaactgatgctgcggtagagtgcttgtgcanagtctatcagtaaatacacaactacgctcgactgagtgcacgacatatacgtgtacaatcttacgtgcccgcagnctagcgcacacatcctcacccacaaccgcacggtgcgactgtactagcgccaccccgcgctgacacgcgacccgcactcaccgctcacatcacacccaccgtctactatggagcgcgcgtgagctcgacatgtcgatatacaatgtcaacaccgccnacgtcgacctctctgacgctactactcgcttactcattgtctcatgacgtctatctcatatgctgccgacacgacgctgcgctgtgtcatatactatatatgatttcgtgggttcatcancacgatgcttgctacagtcgatgtacagctaatcgcgctgtgagagaagagtatatgtctgaagacagtggagtggagagcgagtccgtgtgcgtggtgcaccaccaacacaacctcctcactcaccctgctcacgctctatctctgtccttcttanttaactcacgtactatctctgctgtgtgcgcgtagcgtctaacacatacgcgcgcgcgcatacacccagncgcgtgtctccacatatatcgcacgtgcgtgtgacatctatatctgtacgataatatcattgtctagctgctgtgncgcgcgctgccgacgacgccccnccangcgataggaaggcncngtggtcgtataacgatcagatataccataaacaaccaatgacttctgcgcgcgtggcgcgaggtgtgggaaccagaagaggaggacgcggngcagcgtgatgtcggatgtgagccacgtttacgtgataatcacccgcaactacagcgacatcatctattagtatcaatatgttg

SEQ ID NO: 4549 - DNA, 1477 bp, Glycine max
  misc_feature (1)..(1): n is a, c, g, or t
  misc_feature (55)..(55): n is a, c, g, or t
  misc_feature (60)..(60): n is a, c, g, or t
  misc_feature (70)..(70): n is a, c, g, or t
  misc_feature (113)..(113): n is a, c, g, or t
  misc_feature (139)..(139): n is a, c, g, or t
  misc_feature (187)..(187): n is a, c, g, or t
  misc_feature (220)..(220): n is a, c, g, or t
  misc_feature (224)..(224): n is a, c, g, or t
  misc_feature (232)..(232): n is a, c, g, or t
  misc_feature (296)..(296): n is a, c, g, or t
  misc_feature (374)..(374): n is a, c, g, or t
  misc_feature (422)..(422): n is a, c, g, or t
  misc_feature (578)..(578): n is a, c, g, or t
  misc_feature (608)..(608): n is a, c, g, or t
  misc_feature (610)..(610): n is a, c, g, or t
  misc_feature (711)..(711): n is a, c, g, or t
  misc_feature (887)..(888): n is a, c, g, or t
  misc_feature (968)..(968): n is a, c, g, or t
  misc_feature (1279)..(1280): n is a, c, g, or t
  misc_feature (1423)..(1423): n is a, c, g, or t
  misc_feature (1428)..(1428): n is a, c, g, or t
  misc_feature (1440)..(1444): n is a, c, g, or t
  misc_feature (1449)..(1463): n is a, c, g, or t
  misc_feature (1468)..(1477): n is a, c, g, or t
  Peptide Sequence Number=SeqID_7569
  Probeset Number=SeqID_14328
ncgatagcgctgtgcgcgtgggctcgcgtccaatatgacgtgtggagggcatctntctancgtagtggtntctgctgtactgagtgctagtcttcgcgctcgacacaatctcngagccggcgcgcgcgtcacccttcanccacgcatcatcatccctacgatccacaagacaacaatcatgtcctanctagacgtcccgctcgcgatagagaaggggggnaganaggagcanagatccgagctagtctgatcctgtcgccacaactgcgagatcaacacatcaccacacactccanaaccgcagacgcagaggagtatcgactattcacacagcggctcgacatatccgcacgaagactggacgtatccttatnctgtggtggacatgatacgactcaacgacgccccgcagtccagatagntatccagcgctaagacacgtgtaacctgtcttggctgctgcggaaggcgagagcacgcgggccgaggactgcacggaagatctacggtggatgagccttgtaccgatgcatagtatataacatacactacacctacaataactacgctgtgcagcnagcgactccatcggcatagagtagacgagnanactggcgggccgcctcacaagcagcgtatcgtgacatctctcatcacaccccaccgcaccgagacacaggcacattgtgccgcctctgtatttactccaangctcgcatcaccactagcgccagggccgccgcacagccggcacaagagataaggacagcggcgaacacgcaccatcctctacacaagcaaaaacactgacaacagacaagacaagacacacgagcaaactctctgtctctacatcgtcttatggatgtggtgcagcggggtagggnnccgttgcacagctgtggggaatccatggatgggcggagctctgcgccgagtcagcactgagcacaccctgccgaacacanccacccatactactccgctgcacccacgagcctctacttatataatatcgcgtctcaccgtcacctaatctcttagcgctagtgctgaagaggtgcagcaatactcttatctcgcgaagaactgcagtatacgctatatatctcaggtctgagcccctctctctcttctcttaaaccctagttacatgtctacacctcactcaagtacagacggccctggcgcaaaggaaccaggctcaatacagactttatcctacagcacttgagggactatggagggcttctcctagggcttgatctgtcctcaagtnnacactgagatccaaaactaaagaagtccacctccctgccagccccccgggggggatgcccacctcacctctcaggatcgcgaccccgcccccgccgcggggagggccgccccgcctctatccaactttctcgagccattcagnggttnggtgtcggtttnnnnnggggnnnnnnnnnnnnnnnggggnnnnnnnnnn

SEQ ID NO: 4550 - DNA, 662 bp, Glycine max
  misc_feature (662)..(662): n is a, c, g, or t
  Probeset Number=SeqID_14329
tcagctacgtaggcccccccccccccagaagtgacactcatggtctaaatctaaacagatactatacaaaccctagtgttattgaccatccgagtatatatgccgctaagagtgttgtacttgagctaaataatagtaaaagactattcctgtattgtgacttgcatgcacatgcaaccaaaagaggatgctttgtatatgggaataactttgaatttagagagcaagttgagaatatgcttttccctaaacttttatcgttgaactcgcaatatttcgactatgatgcttgcgatttttcggaaaagaacgtacatattaaagacaaaggcgatggcaaaaataaagaaggagctggaagagttgctttatacaaatcaactaacctagtcaaatgctatacactagaatttaactataattctgggaaacagaaaaatatcctgtcaagtcctcgaaaaggagaagagctatcagcacaccaccaagaagccaagactcaacaagaggcagatggattagctactctcatgaatgagaagcttcctttacagggaagctatattatagagcactttgaggaagttggagagggaattgggccaactctacttgatatgataaaagcaaatccacaatcaaggatctattcaagtgtatan

SEQ ID NO: 4551 - DNA, 1596 bp, Glycine max
  misc_feature (21)..(21): n is a, c, g, or t
  misc_feature (24)..(24): n is a, c, g, or t
  misc_feature (30)..(30): n is a, c, g, or t
  misc_feature (35)..(36): n is a, c, g, or t
  misc_feature (39)..(40): n is a, c, g, or t
  misc_feature (56)..(57): n is a, c, g, or t
  misc_feature (90)..(90): n is a, c, g, or t
  misc_feature (96)..(96): n is a, c, g, or t
  misc_feature (104)..(104): n is a, c, g, or t
  misc_feature (106)..(107): n is a, c, g, or t
  misc_feature (125)..(125): n is a, c, g, or t
  misc_feature (224)..(224): n is a, c, g, or t
  misc_feature (245)..(245): n is a, c, g, or t
  misc_feature (253)..(253): n is a, c, g, or t
  misc_feature (280)..(280): n is a, c, g, or t
  misc_feature (301)..(301): n is a, c, g, or t
  misc_feature (325)..(326): n is a, c, g, or t
  misc_feature (330)..(330): n is a, c, g, or t
  misc_feature (361)..(361): n is a, c, g, or t
  misc_feature (519)..(519): n is a, c, g, or t
  misc_feature (633)..(633): n is a, c, g, or t
  misc_feature (639)..(639): n is a, c, g, or t
  misc_feature (659)..(659): n is a, c, g, or t
  misc_feature (685)..(685): n is a, c, g, or t
  misc_feature (759)..(759): n is a, c, g, or t
  misc_feature (812)..(812): n is a, c, g, or t
  misc_feature (829)..(829): n is a, c, g, or t
  misc_feature (892)..(892): n is a, c, g, or t
  misc_feature (910)..(910): n is a, c, g, or t
  misc_feature (918)..(918): n is a, c, g, or t
  misc_feature (1110)..(1110): n is a, c, g, or t
  misc_feature (1401)..(1401): n is a, c, g, or t
  misc_feature (1430)..(1430): n is a, c, g, or t
  misc_feature (1487)..(1487): n is a, c, g, or t
  misc_feature (1498)..(1498): n is a, c, g, or t
  Peptide Sequence Number=SeqID_7570
  Probeset Number=SeqID_14330
tattgttatgtgcctccgcgngtngtgggngtggnnggnngtgagggtgtgtgttnntgggcgctggcggtgtacttcctctctgagggnaaagangacagaangnnaaaaatagagtatagggnaatatagagagagatgggagacagaaataggggaggatatagcatagagtaatatcaagaaatgagagacatatatatcttttttctctctatcatctnatcagtgataggagtggtgcntgtgcagnagtatgataccactatcactctctacncacccccacatcaagttaatnggagcgactatttgtcaatgcagnntggncaccctccagagccacagcgtcagtagaggnggcgagcgagtgtgtcgacgcacacgccacgcacccgccaccctcgcacttagtgttggtgctggtgttgtgtgtctttctgaccagcgcccgcgacgccacacccgtctcacctcgtttgttctttgtctgtgtgcgtgtcgctcgacgcgcccttngttcacctcttttatctccttttgtttattgaataatgatgagcatcacaaataatagagagagagatagggatgcagatgagagatgagcagtactacacgagtcgacgaccncgcgancatcactcaaacgacaaacnacagtcaccgtgcggcgagtgcaggngatggaagagagcgataggagagtgtgtggccgaacggcatcgaggcgcgatatagtgttgtagcaacaataantagagcgatgtatattgatctctatactaattatagtacattatatatgaaanagatgagcacaacatanacctatactcgcacgatctcactctgtctcgatgtgttataggctactgcacacgtcataganatgatgtgtgagttagantctgttgngatgtgctgtctttcgatcgcaacatcatctgcttcgttgtcgcgtgattagggtgtatgtctcgtgtatagttgacgggaatgatgcatgcaccaacaacagtagatgaataaggatgcactgattatagcaccgcacatagagacacctatctagtatacatttgtatacattatcagagaatgtgtggnagcacaactacacgcactactagcgtacgagacagagatagggcagtgcagacaccgacaaccgcgcatggcactcagccactcgtgctctgtggcttactgtgccactagttagtgtgataactaccactgaatctagcattgaatcacatgttatgagtacgaacattgctattatgaaatatatatacatatatgtaataatattagcaaatatactcataccattgtgacgagtcatgagcacgagagcacaagcaactatcacatcatgttgaactggtgacccgnagagagtgttctcgtgtcgtgactcattngaatgtgtgtctgatcgcaatgatctctctctcgtattctgatatgctatcgtcaangactctcttantatatagcttgcgtattcataattcattgatgatattctgattgtcatctacatgtatactatgatatgactcccgtcctactatgcgcatgatctac

SEQ ID NO: 4552 - DNA, 429 bp, Glycine max
  Probeset Number=SeqID_14331
aaaaagtcgcttaacatcgaagcaatctcaccagaaaagaaaaagaaaaacatcgagaggctttcgggagacaatctccaagaaatgggcaagggcggggtccacccgtcgccgtcgccgccggcggccggcggcaagacggcggagggggtgctcctccggctgctccccgcggtcgtgctcgccatggcggcgccgctggggcccgaggggaaggaggtgctcgcgtacctcgtcctcgcctcgctgcgctcctcggcgccgcccacgccggcgagggaggagccctccgcggccggggaggggtgcgggaggaagccccaccgcccggagctcgcgtgcggctgcttcgggtgctacacggcgtactggtcgcgctgggacgggtccccggagcgcgaccgcgaggcgattcaccgggccatagag

SEQ ID NO: 4553 - DNA, 2023 bp, Glycine max
  misc_feature (227)..(227): n is a, c, g, or t
  misc_feature (346)..(346): n is a, c, g, or t
  misc_feature (408)..(408): n is a, c, g, or t
  misc_feature (503)..(503): n is a, c, g, or t
  misc_feature (522)..(522): n is a, c, g, or t
  misc_feature (530)..(530): n is a, c, g, or t
  misc_feature (540)..(540): n is a, c, g, or t
  misc_feature (563)..(563): n is a, c, g, or t
  misc_feature (575)..(575): n is a, c, g, or t
  misc_feature (581)..(581): n is a, c, g, or t
  misc_feature (587)..(587): n is a, c, g, or t
  misc_feature (624)..(624): n is a, c, g, or t
  misc_feature (672)..(672): n is a, c, g, or t
  misc_feature (716)..(716): n is a, c, g, or t
  misc_feature (755)..(755): n is a, c, g, or t
  misc_feature (758)..(758): n is a, c, g, or t
  misc_feature (802)..(802): n is a, c, g, or t
  misc_feature (832)..(832): n is a, c, g, or t
  misc_feature (862)..(862): n is a, c, g, or t
  misc_feature (1065)..(1065): n is a, c, g, or t
  misc_feature (1098)..(1098): n is a, c, g, or t
  misc_feature (1126)..(1126): n is a, c, g, or t
  misc_feature (1145)..(1145): n is a, c, g, or t
  misc_feature (1147)..(1147): n is a, c, g, or t
  misc_feature (1196)..(1196): n is a, c, g, or t
  misc_feature (1200)..(1200): n is a, c, g, or t
  misc_feature (1232)..(1232): n is a, c, g, or t
  misc_feature (1238)..(1238): n is a, c, g, or t
  misc_feature (1263)..(1265): n is a, c, g, or t
  misc_feature (1284)..(1284): n is a, c, g, or t
  misc_feature (1351)..(1351): n is a, c, g, or t
  misc_feature (1400)..(1400): n is a, c, g, or t
  misc_feature (1451)..(1451): n is a, c, g, or t
  misc_feature (1501)..(1501): n is a, c, g, or t
  misc_feature (1519)..(1519): n is a, c, g, or t
  misc_feature (1523)..(1523): n is a, c, g, or t
  misc_feature (1666)..(1666): n is a, c, g, or t
  misc_feature (1679)..(1679): n is a, c, g, or t
  misc_feature (1698)..(1698): n is a, c, g, or t
  misc_feature (1700)..(1700): n is a, c, g, or t
  misc_feature (1733)..(1733): n is a, c, g, or t
  misc_feature (1736)..(1736): n is a, c, g, or t
  misc_feature (1753)..(1753): n is a, c, g, or t
  misc_feature (1793)..(1793): n is a, c, g, or t
  misc_feature (1812)..(1812): n is a, c, g, or t
  misc_feature (1814)..(1814): n is a, c, g, or t
  misc_feature (1829)..(1829): n is a, c, g, or t
  misc_feature (1853)..(1853): n is a, c, g, or t
  misc_feature (1909)..(1909): n is a, c, g, or t
  misc_feature (1929)..(1929): n is a, c, g, or t
  misc_feature (1941)..(1941): n is a, c, g, or t
  misc_feature (2023)..(2023): n is a, c, g, or t
  Peptide Sequence Number=SeqID_7571
  Probeset Number=SeqID_14332
ggttggttatggtgggtgtatacgtaacacgaacgcacgccccgctcgataagtacatatcacagtgcgcgcttgtagggagccctgaatagaggtgacagagagtgagagtagaaagcgatcccgcaatcgaagcaagtctctgtgacgcagaggattagcgcgctctgaggaatgcttcggtgctgatacgtctcgcgcggcgtcgccttctctcacaacacttnttgttaggcgcggagtaccgcccacccggtgcggcggcgcgtgaacggaggcgcgcgagataatctcgcctcttagcgcgtatgctgtaatctctcatcgcttcagagtcctaagagcnttaaaataccacattcatcctgtcaaagaatgtcgtggcgaaataacaaatcactcacatantatgtcggggcgcagtagatctaattcactctcgacttatcatgctgcagacgctcatcgaatagccaacagcagcgtgcggcgcaagggcctcncgccaccacgcggagctcntagtcccncatagacagnacaacctggagcagcatgagcanacacgcccatancggcantatatntccctctcgagagccacgacggagtatagaagagtgnatcatgtcgagcgctcacacgattctaacaccgagacagagcagtgcntcgtgcgccgctgcgtcgcgcgctgacgagtgcgcgtcgttcgncgcatccagtgcgcgattagatcctcacagtacagtgcnatnctctcctcactctatgatcatcgtaagctgcgtgatctccgctntccgcggtcacgagcgtgtgattcgcttgnttagtgccgagtcgctctccgtcgcgactntgtgtggcgtgcgcgcggtgcgcgtgtcgtgtcgtgtgtgtctctcttatctgtcactctcactctgactccatctgtgagcagaacgttgatatatattcgcgtagatagtgagtgggcggtctacacgcacggatgcccgcgtcgagtcgttcgcgccttacttcatctctgtcgttgtgtggtatataatgatatagccngatgtgcgaagtgacacatcagatgcgcgcgantaccactcgtggagacgtgcgcgcgcgnatgtcgacgtgaaggcaangntagtctgctacatcgcagccggtcgttcatcggtcataccatcgatatnatangattcacgcgcgccgtctcgcgcgggatgatngagtanagtggacgcctcccacagctgccgnnnccgctcgcgtaccacagancctctcgaactgaccgctatctcgcctcctcctcactcagtctctctcgcgtgtagtccgctctcantcattctgtagtatgtgcgcgtgttatgatgtctgcatgaggtgagtantatgatatataatactaccctcacactactacacacaacaaccggccgccnctctctcacaataaattcaatatacgacatgatgactacgcagcactgcngtgtcgagcgacgacgtntagncgtacagacaagtgaacatcaacgacagacgcgcgttggtgtgtgatgcgcgacactacggtctgtagataacgaacacatactgatcatcagtcacactccctcgctccgcgcgccgcgcacacgttgataatgtgactcgntgcgtacgtctgnagctgcgcgctatagtgtnantcatatgcccacgctgtgcttgtggtcagtatnatnagatatccgcgactgcntgtctggcgcaacgaaagctcagcacacacacacagactncgtacacacagcgacaacnanaagcaccgaatcctntagtctactgctgactcacacagnacgacatggggtagtgggctctcactacaaaacgatagtgtctgtataacgtaggngctgctaggacgagtcgacnctgtgcccatcntccgacatcatgatcgagtcgtctatcgtcgctgatgtcgccgcggccgcgacaggagcagtgaagtagtcatgatatatcn

SEQ ID NO: 4554 - DNA, 1869 bp, Glycine max
  misc_feature (13)..(15): n is a, c, g, or t
  misc_feature (42)..(42): n is a, c, g, or t
  misc_feature (61)..(61): n is a, c, g, or t
  misc_feature (67)..(67): n is a, c, g, or t
  misc_feature (70)..(70): n is a, c, g, or t
  misc_feature (166)..(166): n is a, c, g, or t
  misc_feature (410)..(410): n is a, c, g, or t
  misc_feature (569)..(569): n is a, c, g, or t
  misc_feature (811)..(811): n is a, c, g, or t
  misc_feature (1006)..(1006): n is a, c, g, or t
  misc_feature (1118)..(1118): n is a, c, g, or t
  misc_feature (1126)..(1126): n is a, c, g, or t
  misc_feature (1162)..(1162): n is a, c, g, or t
  misc_feature (1180)..(1181): n is a, c, g, or t
  misc_feature (1183)..(1189): n is a, c, g, or t
  misc_feature (1191)..(1191): n is a, c, g, or t
  misc_feature (1193)..(1193): n is a, c, g, or t
  misc_feature (1196)..(1196): n is a, c, g, or t
  misc_feature (1336)..(1336): n is a, c, g, or t
  misc_feature (1398)..(1398): n is a, c, g, or t
  misc_feature (1563)..(1563): n is a, c, g, or t
  misc_feature (1633)..(1633): n is a, c, g, or t
  misc_feature (1669)..(1669): n is a, c, g, or t
  misc_feature (1760)..(1760): n is a, c, g, or t
  Probeset Number=SeqID_14333
tgactcttcctcnnnttccaacatatcagtattatctgtctnttacatcactacgcctcancgttanganaatgccagagccacagccatcgcgagtcacatctgaggtgatcaacagaggatctctctcctcctttgcgagagagccaggctgtacggtataagnggccacacttcacacacacctctgtacgattacccctattattcgcgataagacgagagtacgttattcatcctaaattagataactcttatgatacgtttcctgtattatagattatacattgtgctagcatacaggcacatattccgccagtgcctctcgcctaactcagtccgtctaaatactatacctctctccacattactagtatctctcgtttatgatgcacctgtcacagtaaganggtgcgtatcctgtactcacactcgccttatgcgagtgcacatgtgataatgacactatacccgaaccaacccaggacaacgacatacaacacgcatacacagatctctcttcctatacacgtacacgtctacatctccgtaacggctcgcgcttatanctactgtatccctatggactcctgctacatcagtatctattcccatgatagtttgtttcgttctttactctccctctccgttctctgttacatacatcagtgaagtcactgctatatatcactcactagagttgcctcgacttatgagctactatcggatgtcgccaccagcggatgcacgctatcagtgcagtctgaaagtcactcatctcgctgctctcactctccatggcatcgttacnctacattgcttctatatacaatctctactctctatcggacctaggcgcgctactgcatctgatcgcgtatcgcaatccatatgatgagtgcttcccgtttttcgtgagcgtgatatagtttcgaacagaccgcgtaccttctcgctactcctctattatgtgttttactcgttaatcggatgctgcgcgcttgtnctaatcgtccgcactattgtgattatcgctcccttacatatatgtaaatactgcgtactccatccatctactatatactttatccgctgaagtggcggcgacgtcgagcatnttatcacnctttcatctcgcaaggcagagagggcagatacgcantcccacacaccgtgcccnncnnnnnnngngnccnctcccagctaaatacactcacactgtgagtataatatatctgtcttttatcgagcagtctccttctacctcattcgtgtcataccctcgtctctctactaggcacactagcacgtaaataatatgatagtcgctctcgtntgcgagcgcatattcatacgggtgctacatctctcacacacatgtgatagcagaatagaccnatccgcgatagaacggtacacatactcgcatatactctcgctcgatcatgctccagtctcacatatgttagaagtgagtgctaccatacactatatctatcaatgtcgatattggagtgcaatatatgaatgataaccgcagccgcgctcgtgagtattgtctanctattctctacaccgtatatagtgtacagcttcgagtctatacctctctagattattgctcgcacacgtnacatatgtcctctgctatagattagctctaccgaanaggcatactatacgatactagcgctctgtactctataactgacgcggatacactaatataatatacaacgcgacgtataatcgtcaacctnttatgagaaatggtgtgtgctcactgctctctaatatctcgagagtgttcacctgacggctcattctctatgttcgtgcgtcgagacatatatatatatatatacacgg

SEQ ID NO: 4555 - DNA, 1755 bp, Glycine max
  misc_feature (6)..(17): n is a, c, g, or t
  misc_feature (24)..(30): n is a, c, g, or t
  misc_feature (42)..(42): n is a, c, g, or t
  misc_feature (53)..(56): n is a, c, g, or t
  misc_feature (59)..(59): n is a, c, g, or t
  misc_feature (67)..(67): n is a, c, g, or t
  misc_feature (72)..(72): n is a, c, g, or t
  misc_feature (76)..(77): n is a, c, g, or t
  misc_feature (79)..(79): n is a, c, g, or t
  misc_feature (125)..(125): n is a, c, g, or t
  misc_feature (157)..(157): n is a, c, g, or t
  misc_feature (159)..(159): n is a, c, g, or t
  misc_feature (162)..(162): n is a, c, g, or t
  misc_feature (379)..(379): n is a, c, g, or t
  misc_feature (632)..(632): n is a, c, g, or t
  misc_feature (870)..(870): n is a, c, g, or t
  misc_feature (1197)..(1197): n is a, c, g, or t
  misc_feature (1322)..(1322): n is a, c, g, or t
  misc_feature (1399)..(1399): n is a, c, g, or t
  misc_feature (1424)..(1424): n is a, c, g, or t
  misc_feature (1445)..(1445): n is a, c, g, or t
  misc_feature (1473)..(1473): n is a, c, g, or t
  misc_feature (1539)..(1539): n is a, c, g, or t
  misc_feature (1547)..(1548): n is a, c, g, or t
  misc_feature (1584)..(1584): n is a, c, g, or t
  misc_feature (1599)..(1599): n is a, c, g, or t
  misc_feature (1602)..(1602): n is a, c, g, or t
  misc_feature (1604)..(1604): n is a, c, g, or t
  misc_feature (1607)..(1608): n is a, c, g, or t
  misc_feature (1628)..(1628): n is a, c, g, or t
  misc_feature (1665)..(1665): n is a, c, g, or t
  misc_feature (1695)..(1695): n is a, c, g, or t
  misc_feature (1748)..(1749): n is a, c, g, or t
  Peptide Sequence Number=SeqID_7572
  Probeset Number=SeqID_14334
cccccnnnnnnnnnnnnggggccnnnnnnncccgccgcctcntaagcgggggnnnnaanccggatanaagtnattnngntggaaggagagagggtgggggaaggcgggaagcggccggccgaagngctcctacaaaagaagaggggagaaagcaggngnagngagcgaattttttccacacaaaaaagaggagaagtaaagggagacagagaacaaaacaacctcaaagacaaaaaagagaaagcacagagaaaaagaccatgaggagaaaagacgccagccgcagcggacaggcgagcaggcgggcgacgaggagagaacaattcggggaggggaagaggcaggcggcgagagggagggcggcgacaaggaagacgangggaagagacgaggagagggcagggaagagagcacgaggaggagagggacgcggcagggcgggggaggccgaggcggagaaggcggggaagcccggcgcggaggcggcgggggccagaccgagcacgaggataagacgagagaagaaagaagccggagcacagacgaaacagagaagtagagacgccgcgcgacgaaacagcaggcccgccaccgcagcggtgccggcacgacggcgcggggaatgccgcgangaaatagacgcgcggcgcgcggtcgcccgggcagcgaagcgacagcgggaagaggaagcgcggtcgggcacaacaccacgcgaaacaggcggcgccgcggcccaggacgccagaacaccgcacggtaagcgcgcagagcgccgtagaacgcgacgcaggagcaggaacgagagcgcctacagcgagccgacagcacgaagtgcacaaacacgcgacgcggagagaagaacacggcggngaccggcgaacacgaagcagaccgcggcggagagagagaggacaggacaacaagagggagacacgagcagcagacgcgaaggaagaacgaaagaacgcgagcgaggaggcgcaggcgaaagagagaagaaaacggagcgaaagtggcggactcccgcgcgccgcaccccgcaccgaggagctcgccggcgacgcagcagagcgcgaggcgagcggcgcgagagagaagcggagacacggagaggcacgccaggagaggtataactcgacagtcgccgcgccgctcccgccagcgcgcgccgaagcacacgcgccacgcgagacaccnagcgcagcgcggacggacggagcgccgcggcaggaataggaaagacgcgacgagcgggataaggagagagccgagagagagatcataatacacaatgacgacgagccgcgagacggacgcgcgcnccagagatgataaaagataagccgcgcgcggcgcgcgcgtagaggcgcggcgaagtacacggagcacgcgcggaaanaccaacagacacgacgcgctgcacngacgcagacgcatgacacgcnagagagagccggccgcccgcccacatangacgacactcgcgcggggcgcgcgcaggcgtacagcggcggcggccgacgaaccgacgcagatcanaaataaannaagcagtgactagcaaaagacaagacgacggaagcngatgcaaagactagntgntncgnnctcgcacgtcgaccgcgccncacaaatctcgcgcgcggcccgccgtgaaaaagagcnacacacatgccagcgccgcagcgcgcgaancatgcagggaggcgggccgcgcgaggagactagtgagggcgccgacgaaactnncaggct

SEQ ID NO: 4556 - DNA, 680 bp, Glycine max
  misc_feature (527)..(527): n is a, c, g, or t
  misc_feature (680)..(680): n is a, c, g, or t
  Probeset Number=SeqID_14335
gatccatctttttcttcttactctagactcttccttttctcttctctgtctaaggggtgccctgagatcacattgaacaatggtgaaggctgtggccgttcttggcagcagtgagggtgtcactggaactattcacttcgttcaggagggaagtggtccaaccaccgtaactggatctcttgctggtcttaagcctggtctccatggtttccatgtccatgccttgggggacactaccaatggttgcctctcaactggatcacatttcaatcctaataacaaggagcatggtgcccctgaggatgagaatcgtcatgctggtgatcttgggaatgttaatgtcggtgatgatggtatgtctgattttttttttctttttctgtttcatctatttgatttgtggtgattccaatcaatctgaaaagatcaaatagcaagtatttatttgattccaaatttcaaatttctgattatttatacaatccccagtgttaaaagtaatatatatttttggggtaagttataanagtaataggggatctttttagcattacaaagaagtatttgataggtaacagataatctgggagttctacaagaaacttttccatattttgaaacaatggttgggaaattgagattacttgctttctattttgggggaaattcatctttgaaan

SEQ ID NO: 4557 - DNA, 1589 bp, Glycine max
  misc_feature (5)..(5): n is a, c, g, or t
  misc_feature (14)..(14): n is a, c, g, or t
  misc_feature (18)..(20): n is a, c, g, or t
  misc_feature (22)..(22): n is a, c, g, or t
  misc_feature (24)..(27): n is a, c, g, or t
  misc_feature (29)..(29): n is a, c, g, or t
  misc_feature (33)..(35): n is a, c, g, or t
  misc_feature (49)..(49): n is a, c, g, or t
  misc_feature (74)..(74): n is a, c, g, or t
  misc_feature (78)..(78): n is a, c, g, or t
  misc_feature (83)..(83): n is a, c, g, or t
  misc_feature (145)..(145): n is a, c, g, or t
  misc_feature (147)..(148): n is a, c, g, or t
  misc_feature (185)..(185): n is a, c, g, or t
  misc_feature (224)..(224): n is a, c, g, or t
  misc_feature (226)..(227): n is a, c, g, or t
  misc_feature (229)..(229): n is a, c, g, or t
  misc_feature (359)..(359): n is a, c, g, or t
  misc_feature (649)..(649): n is a, c, g, or t
  misc_feature (923)..(923): n is a, c, g, or t
  misc_feature (966)..(966): n is a, c, g, or t
  misc_feature (1254)..(1254): n is a, c, g, or t
  misc_feature (1301)..(1301): n is a, c, g, or t
  misc_feature (1328)..(1328): n is a, c, g, or t
  misc_feature (1446)..(1446): n is a, c, g, or t
  misc_feature (1522)..(1522): n is a, c, g, or t
  misc_feature (1531)..(1531): n is a, c, g, or t
  misc_feature (1572)..(1572): n is a, c, g, or t
  Peptide Sequence Number=SeqID_7573
  Probeset Number=SeqID_14336
ggggngggtgttgntgtnnngngnnnngngggnnnggtcgtttgtgtgnggttgggtcgttgtccgtgtggctngttnctctnccctctctcttcttcttacttctagatctcgccctcccctagttaacgcggcaacgcccccncnncgcccgtccctcgcttccgccgcgccgccgcccgccncccctcttgtctatctggttgtgtttctgtctctccggngnngngcgggaagtcacaggtaggctaatatgggagcatgcgagcggaggaatcgggctgcacacaacggcacagctcacgatcagcgatacaatacacgccaagtgagtaggtgtaggcatcacaatacataantctgtatatatatatataacatgactccataattgatattatcgatcactagatataacagcgctcctcataacgatcgctacgaagacgccctgcctctctgatcaggttgtaatgatattattaatatacgactatatgatgtgtaagaaactaatggaatgaacggatggaagggtgattgtagtagaatgaaagtgtactgaatcgcgtgcaacattaatccaacacataaaatcacaacacaaaagaacagaacacacacaccaccaaaccacaaacataacaanccactccaagacgacacaaacactcacttacaatactcacgtacagaagaaaaatggagtgttgcgggggctaagcgacgcgacatagctgtgcgagtgtgagtcgcatacgaatctatgtagagtatatattatatatatatcccaaattgcgcgtcacactactccatattgtatagatacgcacacacacctctctactagccgtctgctcacacgatacgcgctacgacgtcacgcacaatgcgtacacgtgactgatgatactatacancagcaagttaaatgatcaccgtgacaagtacaacatcaccccncacgccatcgctgaccattcagtatatttgaactctatcgtcacgatatcccatgtcggtcaatatatacacatctgagtctaccaccgttgcatctacgcataaacatgatacgtaaagcacgcagatcacaagacatagtagactaacactgacctaacactgattacaccgtaatcagctcacatctgccctcctcatgcctatgtgcgagtgaatcctagcaatctgtaatactaacaatgccgcgagcgtatctcaatcatggtctctacaatctgtatactntattgtagtaacagtctgatcaagctccagcactatacacacactcnaagcataacgaagcacaccgagcaccngagactactactgccgagcagcacacaccgacgcactatactctgtactactcatgtaacacagagctagaatgttcttatgagcctccgactgactcgcaccacgcgcgaccacacnagactgccaacacatataaagaataaatatcgataaaacgataatcaaccttaagacagaatcatgacaattacanacagcccanaatcgcatctgacccactcctactacgcatcaccggatttnattcgtactcccacgca

SEQ ID NO: 4558 - DNA, 668 bp, Glycine max
  Probeset Number=SeqID_14337
ttttttttttaagtttattaattacggttttaatgataactataaatagttggtgcctaagcagaggttacaacttcgatttcatcatcttcttcaactggcttaggggctggcttaggggctggctttggacctggctttggacctggctttggacctggctttggacctggcttgtggaattgattgaagaactttccagcttggtcttggatcttttcgttgatttctccgaagaaatcaaagatgtctcgctttacaatgctggattcagttgaatcttcatcttcatcatcatggtgcttgaagatatcgtcgaaagtcttttggagttgagcgaaaactttagcggcttcgtcttgggccttttcattgattcttccgaagaaatcgaagatgtctcgcttttcaatgattcgttcagtagtaacttcaccgtcttcaatttcaatttcgattccgtgacttcctgggtgcttcttgaataaatcatcgaaaactcgttggagatcagagaaagccttttgagcttgggcttgagccaattcattcaatcgtccaaatcgttcaaagatatctcgctttgagattgatcgttcagttgaatcttcagcatcatcattttcatgatgtggcttgaatgggacgaaaatgcttgcgaaagctcg

SEQ ID NO: 4559 - DNA, 1783 bp, Glycine max
  misc_feature (1094)..(1094): n is a, c, g, or t
  misc_feature (1783)..(1783): n is a, c, g, or t
  Peptide Sequence Number=SeqID_7574
  Probeset Number=SeqID_14338
ttccggagtccgctcttctcttctcttctgcctccattggacagatagcattttccccttcccagacagatccaagaaccacaggtactcactcttgagatcctgttttctctttttctcgttgcgtgtcttctgctgctcacacttaacgcgttttcttttttctccgaattaaacgcgaccttatcttcttcttgctctcttttatcagtgctcttttttgagccaacggtgctgattctttcccgcggaatcttgctcggcgttggggtgtaagtcatttgtcaattcccttggacaagatggctttggggaaatatgctagggtagatggtagaagatcgtcgagctggtgttcgacggtgactgttgtcgtgtttgtggctctatgcttggttggggtttggatgatgacatcatcttcagttgtccctgtgcgtaatggagatgaggcccaggagaataagaaccaagtgaaagaacaaacagagcctacagaggtgaaagaagcagtgagtgaggtcagcaatagcaatatgcggcagtttgaagataatccaggtgatttgcctgaggatgcaaccaaaggggacagcaatgtagcctctgaagacaactcaaacttgtcagataaacaagaagagaagtcggaggaaaatcctgtagagaggtcttctgacgatacaaagtcggaagacgtggaggataagaaaactgaggaggaaggttctaatacagaaaatgaatcaaactcagactctacagaaaatagcaaagacagtgatgagacttccactaaagaatctgattctgatgagaatgagaagaagtctgattcagatgaaagtgaaaagcaatctaatgacactgatgaaacaacagatactaagatagaggagaaggtggaagaaagtgataacaaggaatctgatgaaaactctagtgagaagaatataaatgatgataccaaacagaagagttcaatggaggtatacccatctggggctcagactgatccgcgggaaaaaaaagtgcccagactataggttttcgaaaggggcggcacatcgtcggtcgtcaattttcatggaacnaccggcatgccgaatggctcgagagttaatcctctttctcaatattgtcttggattcagatgatgccttgttcggtggcttcagtcggctcaatcacactgctgagtacttcacctcagaaggatggtatgatgaccgacctcgatcctttcttatctatgcaccttctagaacagcagtggtttatgcccttgcagatgatgttgaacctaccctagcagatgaagctgaacctgccctagcagatgaagctgaaccagagccagttgatccttgatgacaattttctgggatgctgaaatgttacaagtgcacaacggcatggatgcagtaaatccctaatcaaactagccaaccaacgtctggtggattaaccgacactgaaacaaccaagaagctgaattgaagtggaataaataaagcgctagttcatctttagttgagagcaggagacccagccacgcaatcttggacatgtgccctgctaggtaacaagttgtgatatcacacccctcttcctgtttttactttttaggatttaacgtcttgacatgtataagttgcgtcccgattgacaaatgtgaatcaacaaagctatggtccccgaaccttaaactcaatggacctatgcacggatcaattttcataaagggctttctctgtttaaaagttggaagggtttttccgtn

SEQ ID NO: 4560 - DNA, 408 bp, Glycine max
  misc_feature (9)..(9): n is a, c, g, or t
  misc_feature (24)..(24): n is a, c, g, or t
  misc_feature (30)..(31): n is a, c, g, or t
  misc_feature (38)..(39): n is a, c, g, or t
  misc_feature (52)..(52): n is a, c, g, or t
  misc_feature (73)..(73): n is a, c, g, or t
  misc_feature (80)..(80): n is a, c, g, or t
  misc_feature (83)..(83): n is a, c, g, or t
  misc_feature (87)..(88): n is a, c, g, or t
  misc_feature (90)..(90): n is a, c, g, or t
  Peptide Sequence Number=SeqID_7575
  Probeset Number=SeqID_14339
gggcgcggnggcggggggggccgnaacagnnggacccnngggcggcggggancggcacgaggggggcggccangggggcngcngcanncnatgaggggtggaatctcttctcggggattattgtcgttagacctaaaatgcccgtgtggtgggagaggtactattggggggggggagtggcttggaccttatatggattgattgcatctcagtttggagatataacggggcggaagccgggtgaagataacaaggaggtgaaagatttcgtagaagactactttggtttcaaacatgacttcgaaggagtgtgtgctgttgtggttgctggcatcgcagttgcctttgcattaatcttcggtgttgcaatcaagacctttaacttccaaaagagataggaggatagac

SEQ ID NO: 4561 - DNA, 1355 bp, Glycine max
  misc_feature (18)..(18): n is a, c, g, or t
  misc_feature (26)..(26): n is a, c, g, or t
  misc_feature (28)..(29): n is a, c, g, or t
  misc_feature (55)..(57): n is a, c, g, or t
  misc_feature (61)..(63): n is a, c, g, or t
  misc_feature (89)..(90): n is a, c, g, or t
  misc_feature (121)..(121): n is a, c, g, or t
  misc_feature (124)..(125): n is a, c, g, or t
  misc_feature (690)..(690): n is a, c, g, or t
  misc_feature (722)..(722): n is a, c, g, or t
  misc_feature (724)..(724): n is a, c, g, or t
  misc_feature (802)..(802): n is a, c, g, or t
  misc_feature (1099)..(1099): n is a, c, g, or t
  misc_feature (1140)..(1140): n is a, c, g, or t
  misc_feature (1152)..(1152): n is a, c, g, or t
  misc_feature (1244)..(1244): n is a, c, g, or t
  misc_feature (1316)..(1316): n is a, c, g, or t
  Peptide Sequence Number=SeqID_7240
  Probeset Number=SeqID_14340
ttgtttttttggtgggtntcgttttncnncccccccccccccccccccctccccnnncccnnnccccctcttttgcccgaccacaccannacgacactcgcggacccccgggcgcgcccgnccnncttcgaaggatcaggcctaacgctcaatgcccacgctccccccccctcacctccatactatagtatagagcgccacggatcgtgccgaatagaacacaagcaactatgcaacatgagatgacagcatagcagtgtaagttcactccccggcgcgaacacgcgacttgaataccattatacacgctgtcaaatagagacaggcaacatatctctcagagtgtatatctatggcgtcatactctagaatcgatatagagcatgtgaggcgtcacgtatcttatatagcataaccaacatgtatgtcgtccatgtgcgctcgcacagagccaaatgtatatgtgcttctctggagtatagcatatagataaaaatcttagaggccccaagatgcacaccgtcggtatcacggatgtagggcgcccagtcgtcaaagactttggatatgatgtcggaagagaggtgtatatataggcacacagaatatccttcagagcagagtatataattatatggtcgcactcgaagcacgcaggagctcagtagaaagtataaatacgtgtgcttntgctcttgccagtgtgggttgtgctgaggggnanacaccgatgaattactcgtttaaccaccgccctgtctatattgattataacaacccaaaccctcgtgtttcacaacanctctactaatgttgaataaaaagtgcgtcataatgtgttggcggagctccgctaggtttgtaataagtatacctcttatctggtaattcaccctgtggttaatgagcgtatgtagttttcttcttctgggcacatgatgtcccccgcagtctacttccacctgtagtctacttacttattgtgttgtgagacactcactccacatatgcactcgcgccctcattgccatcccactagcataagactgtgcaagtgcggtgcactcgtctgcgcgcagtgcgctgttctacctcaatntacggaatacatatttcttatgtatgtggagtatgttcgcnaccctagcaccntgcgaggttgcgtggcaatgtgcacttgcgagacatgatattcagacacacaacacatcgtatggcagtgagtatgtcactgtgcctcggantccatgtctctgtacgactgtgtggtgctgatatcgggcagtggcgagaggaagagtggtcacgcccccccntgggtgtgtaagtggcgcgtggtggtgtctgctgtgtgg

SEQ ID NO: 4562 - DNA, 1794 bp, Glycine max
  misc_feature (22)..(23): n is a, c, g, or t
  misc_feature (31)..(32): n is a, c, g, or t
  misc_feature (52)..(54): n is a, c, g, or t
  misc_feature (58)..(61): n is a, c, g, or t
  misc_feature (73)..(73): n is a, c, g, or t
  misc_feature (81)..(81): n is a, c, g, or t
  misc_feature (174)..(174): n is a, c, g, or t
  misc_feature (272)..(272): n is a, c, g, or t
  misc_feature (342)..(342): n is a, c, g, or t
  misc_feature (352)..(352): n is a, c, g, or t
  misc_feature (416)..(416): n is a, c, g, or t
  misc_feature (450)..(450): n is a, c, g, or t
  misc_feature (556)..(556): n is a, c, g, or t
  misc_feature (581)..(581): n is a, c, g, or t
  misc_feature (630)..(630): n is a, c, g, or t
  misc_feature (680)..(680): n is a, c, g, or t
  misc_feature (718)..(718): n is a, c, g, or t
  misc_feature (720)..(720): n is a, c, g, or t
  misc_feature (741)..(741): n is a, c, g, or t
  misc_feature (756)..(756): n is a, c, g, or t
  misc_feature (887)..(887): n is a, c, g, or t
  misc_feature (897)..(897): n is a, c, g, or t
  misc_feature (902)..(902): n is a, c, g, or t
  misc_feature (908)..(908): n is a, c, g, or t
  misc_feature (910)..(912): n is a, c, g, or t
  misc_feature (921)..(922): n is a, c, g, or t
  misc_feature (925)..(925): n is a, c, g, or t
  misc_feature (944)..(944): n is a, c, g, or t
  misc_feature (994)..(994): n is a, c, g, or t
  misc_feature (1004)..(1004): n is a, c, g, or t
  misc_feature (1028)..(1028): n is a, c, g, or t
  misc_feature (1070)..(1070): n is a, c, g, or t
  misc_feature (1075)..(1075): n is a, c, g, or t
  misc_feature (1077)..(1079): n is a, c, g, or t
  misc_feature (1109)..(1109): n is a, c, g, or t
  misc_feature (1137)..(1137): n is a, c, g, or t
  misc_feature (1210)..(1210): n is a, c, g, or t
  misc_feature (1214)..(1214): n is a, c, g, or t
  misc_feature (1216)..(1216): n is a, c, g, or t
  misc_feature (1244)..(1244): n is a, c, g, or t
  misc_feature (1246)..(1246): n is a, c, g, or t
  misc_feature (1408)..(1408): n is a, c, g, or t
  misc_feature (1450)..(1450): n is a, c, g, or t
  misc_feature (1452)..(1452): n is a, c, g, or t
  misc_feature (1484)..(1484): n is a, c, g, or t
  misc_feature (1486)..(1486): n is a, c, g, or t
  misc_feature (1587)..(1587): n is a, c, g, or t
  misc_feature (1592)..(1592): n is a, c, g, or t
  misc_feature (1627)..(1627): n is a, c, g, or t
  misc_feature (1636)..(1636): n is a, c, g, or t
  misc_feature (1658)..(1658): n is a, c, g, or t
  misc_feature (1705)..(1705): n is a, c, g, or t
  misc_feature (1708)..(1708): n is a, c, g, or t
  misc_feature (1721)..(1721): n is a, c, g, or t
  misc_feature (1733)..(1733): n is a, c, g, or t
  misc_feature (1750)..(1750): n is a, c, g, or t
  misc_feature (1768)..(1768): n is a, c, g, or t
  misc_feature (1776)..(1776): n is a, c, g, or t
  misc_feature (1791)..(1791): n is a, c, g, or t
  misc_feature (1794)..(1794): n is a, c, g, or t
  Probeset Number=SeqID_14341
tggtgtgtcccccgcccccccnntcgcccgnnctgggtgtgtgtatttgtgnnnaaannnncggggcggagancataaaangagtatattttgaattccgaaatgtattaaatatcggagataaagaccgcccctcacccattactagcagtggtgatatagtgatgccgtggncgaccacgcgcgcggcactataccgatagagcgtgatgtgtgtgtagactacacttctggcacatatggagatggcgttgctgtgagtatactataantatcatatcatgagagtgagggaggtgtataattgacgctagtgcgtggatacgtgatactctagcgtgntgtaaatganaacagagatggctgacgagtatcactagcacaacccacctacacacctccactctcgcctcccnaccaagtctatctgtcgtgtgaatagtctgtgtnaggagatttctttctgctggtaacattacaaagaagctgtgtggggatatatatagtatgtagacggcgatacctcacacgatagtcgagatgtgatgggtagccnaaagaaaatggtggtgttagcgcangtatggagtggatagtgatatgacatatctagttctgactagatagaancacacatacacaagaagtagtagtcgcgtggcgatcagaatgtagagtgntatgtgactaaagacatgatgtcgtgtgccaagtgtgntngagtgttgtgattttgtgttnatttctatgactcgncgtccggggcgacgtctactgacgtggtggtgagtagtggatattatagtggtgagcgccgaagagggagcttatgtacggtacgtatgtgtctatagtatatgtactggtgtggagagaattacgacaanaaatacatanaattnatatanannnaaaaggagnnaancaaaagagacatacagtanggtatattaataaaacaccaacacacgacgaaacgcgagcacagcatatnagtcgatcgngtggtgtgaataagatgagaagangcgtgtgtgagtggcagacacacaccacacaccaatacgacncaccncnnnaataatgtggtatacgtcatgcatgctgcnacatgcgtgcatgatgtgaacaggtgcntgatagtcagagtggagagtgaggtggtggtgtgatgtattatatactcaaagatatgaaccagtaaagtcanacancnacacctactagctcgggttaagtgatgntnacttgtctgaatgcacatgcgtataatatagaggatgtgtgactgactcacacgcactgtcgtaattatacgatgttgacacacggtgctggaacacaacaactggggattctctgctgcgagaaatctgtcatggcgactcgcagacttggttctcatatnactatagtggctgtggctgagcatatatctgggtagagtgangngcgcgatatatactacattgcgtcttgacgananaagatatgcgcagcgatgctgacgatcgatgtgtgcatacactatatcatactgtgggtatgagtgtatgtgtcgggcgaagaatatatataacgtgggcngtagntctgtctgagatatatcgaatgcagcgactatagntgcggaggncgtgtgtgcaactactacgcgnaaatacgtgagtgcgagagttgctgtctgcttactaatgatactctncangttgttgggttgnatagtgtaacanaatatatagtatcattncagtgtcgtcagtagcgnatcgatgncagcgttagttgcangan

SEQ ID NO: 4563 - DNA, 211 bp, Glycine max
  Peptide Sequence Number=SeqID_7241
  Probeset Number=SeqID_14342
tcgagtcagctacgtaggccccccccccaaaatttaaggagaattctgaataattccatgttaaaacgcctttcaactctctctactttctcaaacatcaagtcactttcagcaaagccaatccttccatatagtgatttttacttcgatcctcctcctagtgaagcttggaaacactttccttacattcctttctttagcgctaacacta

SEQ ID NO: 4564 - DNA, 562 bp, Glycine max
  Probeset Number=SeqID_14343
gggggtgagcgggtttatagcgcctattgtgggccccaacaggggagtccccatttttagaggggggcggggaaataagggcttcgggggggaaacggggggggggaaaagaaaaagaggggggctatgggacgcggcagggttttgggccccccccgggttttacccccccccccgggggttaaaaccccccccccggggggggtcccctttcccatgggggggcccatccttttttaaggggggcccttttgggggttttttttttttttccccctttttgaaaagggggttttttgcaaaaggggtatttttgtttaccccagttttttttcttccccccggggtttttcccccccccaggttgaggcggttttccccccgcccttgggggaaatggggttctgggggcccccccggggtttgggccttcccttggtttttttttttttttttttttttttttttttttttttttttttttttttttttttttttttttttttttttttttttttttttttttttttttttagaggtcgagaaaggtatttatacaatc

SEQ ID NO: 4565 - DNA, 1725 bp, Glycine max
  misc_feature (19)..(24): n is a, c, g, or t
  misc_feature (27)..(27): n is a, c, g, or t
  misc_feature (29)..(32): n is a, c, g, or t
  misc_feature (43)..(43): n is a, c, g, or t
  misc_feature (81)..(81): n is a, c, g, or t
  misc_feature (90)..(91): n is a, c, g, or t
  misc_feature (165)..(165): n is a, c, g, or t
  misc_feature (207)..(207): n is a, c, g, or t
  misc_feature (347)..(347): n is a, c, g, or t
  misc_feature (373)..(373): n is a, c, g, or t
  misc_feature (387)..(387): n is a, c, g, or t
  misc_feature (1433)..(1433): n is a, c, g, or t
  misc_feature (1546)..(1546): n is a, c, g, or t
  misc_feature (1549)..(1549): n is a, c, g, or t
  misc_feature (1584)..(1584): n is a, c, g, or t
  misc_feature (1603)..(1603): n is a, c, g, or t
  misc_feature (1653)..(1653): n is a, c, g, or t
  misc_feature (1665)..(1665): n is a, c, g, or t
  misc_feature (1667)..(1667): n is a, c, g, or t
  Peptide Sequence Number=SeqID_7242
  Probeset Number=SeqID_14344
aaaaggggggagaaaaaannnnnnggncnnnncgggcgacacngtgccccggcaaaaacaacggggcttcgcgtaacccgnggtgttacnnttgaactaggggcagacttatcgcatgtgactgtgcagagagcacggtggtgtgggacgggtgtgtataccccngaatctaataaaatacaacaacactccggtggcggtgatctncatctacttcttctatcacaacaaccggtacacaaggtctgcttcggagcgcgcgcggtcgcgggtctctcccctccacactcacacacgcagcaacccgcctccatctctttccaacaacacccccacccccaccccangggcgagcgggtatatacatacttantataaaatcaattncaactttatttttatacgttggggatgtgggtgtatataagaattaataaagagaatattcatgacagcgagcgggtgtacgtgggggacgccgagtgacataagcgaataaatagccgtgacacacaaaaacggcggggggagggctcgcagctcggcggggactggaaataaataaagagcgcgtcgctggcaggaagaatatcagtccgtgcgcggtcgggggctgacacatacttcatgtgtgcgtgtctgctttgcttcttctcgttctctcttatctactcatacgaacacgcgtgcagtccgttatcactgtcttttatactcgcgtacatatctatatcctgcaccaaccattaatcatcatactattccacatttcttctccaaacaaacattgcgtttacaatcaacaaacactaagatataatataaacaacttggcggagtataatgctcacagccatctctattgatgattactttgtgataaaatgcgtaacaccgcagttgtagtgtcctctaccgagacggcgcgctgattatactatatcattgcaatataacatccgtctgcacctcatatactcgcacacacttcataattatgtcctagatctactacatatacgtgcactcaatcaacgaagaactgtcggacgacaacgacaatgtttattatggtatacgcgagcggggtcttgtcatcatactctcttgcgctctctctctctgctgacgcgcaatatgctgttatacctaccgcagtcttactaccattcctctactcgtgtttgcacatctgtattatatattgtcttatacgtgttgtcgttaaccgccgcgtgcgtccgcgcgcacttcaccaataacacaaagaaacacgtaccgcacacacacaaatccccttctcggctactgtgtatatcataattaaaacagatatatagggcgcgatggctcgaggagatggagatggcaacataaaacactagataggcagagatatattgtctcgacagcgtattctgtgctgtgtcgcncctatatataatatataatatcacaagaaacaaatatattccgtccgggtctatacaggtgctattgtatatgcgtacgcacaaaacatctcatctcctatctgtataatatntgngggcgcggcgcatatacttcattggtctgcgttanctcgatcttgtgcttactntcggctcccgatcaaatacttattctatatgattcttacactcctctctnatactctattcncncgcgcgtgtaacacagcgtggctccatgatacatactattataagcgtgtatatgctc

SEQ ID NO: 4566 - DNA, 446 bp, Glycine max
  Probeset Number=SeqID_14345
gcatcaatcgatccgaccaaaatccagctcaaatccctcgcctcgcgtcgcctcgccgtgccccggctggtgcccgctggcctgcctcgttcctctcggtctcggattggagagatcgatttccatggccctgccttgtacagtagccagctgccgcttgctgttgcatctgcgcagctggtgcatgatcccccctcccaaatcgtagtcgccgccggctcacgacctgcccaccattgctcaaccaccgctcccatcccatccggttgcgagctttggccttgattttggtgtctaccccgtctagggtttcaagctcaagctcagggtcggcgtttcaggtgaaaaatctattaccatctcccagttactctgcgtgattttgtttccctcctaggtaatcgagtgtagctgctgagttaattgtatgcatgtgcagctctgtg

SEQ ID NO: 4567 - DNA, 319 bp, Glycine max
  Peptide Sequence Number=SeqID_7243
  Probeset Number=SeqID_14346
ggtcattgctgagattgctcttgtgggaggtagccactactacctaattattaatggcctgaatttcgaaaacaaacttcatccagatggtacatttgacccattggggcttgccaatgatctagacccagctgcactgctgaaggtgaaggaaattaaccatggaagacttgctatgtccgccatgcttggattctacttccacccttatcgcactggataaggtcctgctgataaccttgcaacacatctcactcacccctttagcaacaaatcgctcactgccctttctggatctcctcaaagaagtccaagtctc

SEQ ID NO: 4568 - DNA, 1510 bp, Glycine max
  misc_feature (18)..(18): n is a, c, g, or t
  misc_feature (110)..(110): n is a, c, g, or t
  misc_feature (121)..(121): n is a, c, g, or t
  misc_feature (127)..(127): n is a, c, g, or t
  misc_feature (262)..(262): n is a, c, g, or t
  misc_feature (504)..(504): n is a, c, g, or t
  misc_feature (1000)..(1000): n is a, c, g, or t
  misc_feature (1086)..(1086): n is a, c, g, or t
  misc_feature (1138)..(1138): n is a, c, g, or t
  misc_feature (1176)..(1176): n is a, c, g, or t
  misc_feature (1195)..(1195): n is a, c, g, or t
  misc_feature (1239)..(1239): n is a, c, g, or t
  misc_feature (1298)..(1298): n is a, c, g, or t
  misc_feature (1311)..(1311): n is a, c, g, or t
  misc_feature (1366)..(1366): n is a, c, g, or t
  misc_feature (1465)..(1465): n is a, c, g, or t
  misc_feature (1510)..(1510): n is a, c, g, or t
  Peptide Sequence Number=SeqID_7244
  Probeset Number=SeqID_14347
tagtgtggtttaatttantattagaggttgacattttactatttgttggtatatctcattattctatcttttccacagaccatcctctattccggcgcatactcagagangtatatatatnattttngtccctctgttgaccatatccaatcaccctagacacctcccagacggaccccacttctctaaaccatcacagggcatacaaaaacaacgtgtgtaataatagcctataccggggtatttaaactctgcttattancatcttatcctggtatatacttatatacatattgtctctgaggtttatatacaggaccacattaaataatgaggggggattacgattggatatagaggagacaacacacaccctcaccagcgcgcgcccacccaccccctcgcggctagtatacctccctcctcttctgtctctcttttattacttccgtgacttcttattttgggtgtactcgcgcctcatataaatacactgccgctcantcactctgctatataacaaattagtagtctggtgcataaataatttatatgcgctatatatatatacatagttggagagatggtggtaatatacagtgggcgccgttcataaaaccgagtggcataaccactccacatccccggcagccgcatacgatcgcgcggtcaatacgtccccaccagtgcgacaatccaacatcaaacccctcacctaatctcacccgccgccttcccacctcaatatcctggtgtgggctgacacgagatgtgggcagcaccacaatgacgtgttagtggggtgttttcttatctggcctctctcagcgtccctccttctactcgtctcgtctcatacctctacttattctacatcttctgctgtgcttatatcaccgtctttgcgcgccgctcatcttcttcgctcctatctctcttctctccactctccttgagattctttccctctacgttctcttctctcgcaggctctgacatnttgtacctcgtttatcatcttgtcgtctcatatttacatccctctgcatactatcatcgcgctgcatttactatatctacattctntttaccctcttcttctcctgtgcgtatgtatatgcgtgtggtgttcgataanaacacacactcagcgtgcagagggcgttgagcgacacntatgagctcgcgacacaanctcctacacttctctcctctaccgcgccaccgtgtggtcagacnatatactcatccatacctcgtctcgcgacttctccgcttgcgcgcgttatccgacgcgnactataatgatgncgtatgagatgcgcgtgctgcaaaaacaagagcacggtgcgcggtgtcgtcatantatgctgtgtgatctctgtctgctttactcctctcatcccacttcatgctctcacatcacttacgcgctccgcgtctccccgctgctcctctctcaccntctctcccctcctcgctctcccccttctgtgcccctctctcgccn

SEQ ID NO: 4569 - DNA, 466 bp, Glycine max
  Probeset Number=SeqID_14348
attctccgagccaacaagtagcagcgccgcaccatttgaacaagattcaagctcacgatggctaggattaaggttcacgaactgagagacaagtcgaagagcgatcttcagaaccagcttcaggatcttaaggctgagcttgctctcctccgtgtcgctaaggtcaccggaggtgctccaaacaagttctccaaaatcaaggttgtccgaaaatcaatagctcaggtgttgaccgtgacttctcagaagcagaagtctgctctcagagaagcgtacaagaacaagaagttcatccctcttgatctccgtcccaagaaaacacgtgctatccgcaggcgccttaccaaacatcagctatcgttgaaaacagagcgtgagaagaagaaggaaatgtacttcccaatcaggaagtacgccatcaaagtttaaatctttctattagaaactctgtttcagcttttgttct

SEQ ID NO: 4570 - DNA, 418 bp, Glycine max
  Peptide Sequence Number=SeqID_7245
  Probeset Number=SeqID_14349
tttaggacagattgggaactcattggggtaccccagaaagagcctcacaacttttgtgtcccttgtgagcatatggaactatttgggacgagcattttctggctttgcctctgagtacttattggcccaataccaagttcccttgtcccttggtcgtcactctaggcatgcctttcttttggggttggcacatttctaattgcttttgggatacccaaccctttttactttttctaaaagaatattgggttttggtttggggcccatttgccctttatgtttgccatatatcttgaaaatttgggcttaaaaacctctccactttttccaatttttgggcaagggaagcccccttggctctttcatctttaaggggaaaggacctggtttttttttgttaaaaaagcctttaagacac

SEQ ID NO: 4571 - DNA, 1104 bp, Glycine max
  misc_feature (571)..(571): n is a, c, g, or t
  misc_feature (647)..(649): n is a, c, g, or t
  misc_feature (854)..(854): n is a, c, g, or t
  misc_feature (914)..(914): n is a, c, g, or t
  misc_feature (939)..(939): n is a, c, g, or t
  misc_feature (941)..(941): n is a, c, g, or t
  misc_feature (1002)..(1002): n is a, c, g, or t
  misc_feature (1008)..(1008): n is a, c, g, or t
  misc_feature (1102)..(1104): n is a, c, g, or t
  Peptide Sequence Number=SeqID_7246
  Probeset Number=SeqID_14350
agctcggaattcggctcgaggcttaccagatgaggactcgaaaaacaatcaacaactttctcaccttgggtttaagaatccttgggttgatgcccagtccatggatcaaattaaaaacagtccctgcatagacacgtcagagaatgcttcaaacacacaggaacttgaagcctctcaatgaagaaagaggttgtccggaaatctgttgaagtcaagtcgatgcttattttttgccatgcttttgaaggcaaaatagattgttagtggcattctgataatgcagtgaatacctgctgtaagattaattgcctaatttgtgtaaaaatattatggtccttgcccacagcttgagtgcttgataggcaatgagctaagaaatcatgtctttaactcgagtctcagattttggaggaagttgatgaaatgatgccggtgttgaactacctacctcaggataatgactgaatgcatgacatgacttggctttatccagttcagctaaaattgatcatggttccctgggtactgaagtatctaataatttaagtgaacttagcaaattgagtgtcancaagaggtgaagaaactacacaacatgaaaagcatgctgaaattttccaaaatgctcatgaaggtaaagagcaggnnnattttgttgattatggatgggccaacataggaagttttgatgaccttgatcggatttttagcaatgatgaccctatatttggccatgcaagtcttgatagttctaatgagctttggtcgtctaaagatgtgagtaacaatgtagcacctttaccattggatacaccaagttcatctggtgctttaaggaagcagaactgagtctntggaaatcacagaagaatatgttcatgtagtgatgatcactggacctcagcatgagagantgggggtctggatcccagtataganantcatgcacacacagtatgtggaatgtgagtagagtagctactgaagacagcagtttagcanagattntgaactgaaaatcactgtaaacagagagatactgcagatccatgatatgcctcgcccgcacatcgacatgctcgacccccctcggccgcgcgcnnn

SEQ ID NO: 4572 - DNA, 515 bp, Glycine max
  misc_feature (493)..(493): n is a, c, g, or t
  misc_feature (507)..(507): n is a, c, g, or t
  Peptide Sequence Number=SeqID_7247
  Probeset Number=SeqID_14351
attactttcatttcatcagtcgctgcctcgcctctcgcatctcttttcgccccaatccatcagcggagagcagcagcagcaaccagtagccatggcggaacagacggagaaggcatttctaaagcagccaaaggttttcctaagctcgaagaaatcagggaaaggaaagaggcctggaaaaggtggaaaccgtttctggaagaacattggtttgggtttcaagactccccgcgacgccattgatggacattacattgacaagaaatgtccattcactggaactgtctctgtgagaggacgtatcttagctggtacttgccacagtgctaagatgcagagaacaatcattgttcgccggaactatctccacttcgtcaagaagtatcaaagatacgagaagaggcattccaacatccctgcccatgtctcaccctgcttccgtgttaaagaaggtgaccatgtcatcattggccaatgcaggcctttgtcaaanacggtgaggttcantgtgctga

SEQ ID NO: 4573 - DNA, 224 bp, Glycine max
  Peptide Sequence Number=SeqID_7256
  Probeset Number=SeqID_14352
ctgcagtctattctattatccgccgtcaaactttcctaaacacatcaaggtggattgaagaggtgcgcattgagagaggcagtgatgctattattgttcatgttgggaacaaaactgaccttgtcaataagaggcaagtctctacagaggaaggggaagctaagtctcgtgaactgaacgtcatgtttattgaagctagtgccaaagctgggtttaatataaag

SEQ ID NO: 4574 - DNA, 2521 bp, Glycine max
  misc_feature (122)..(122): n is a, c, g, or t
  misc_feature (163)..(163): n is a, c, g, or t
  misc_feature (394)..(394): n is a, c, g, or t
  misc_feature (402)..(402): n is a, c, g, or t
  misc_feature (414)..(414): n is a, c, g, or t
  misc_feature (469)..(469): n is a, c, g, or t
  misc_feature (497)..(497): n is a, c, g, or t
  misc_feature (557)..(557): n is a, c, g, or t
  misc_feature (569)..(569): n is a, c, g, or t
  misc_feature (762)..(762): n is a, c, g, or t
  misc_feature (768)..(768): n is a, c, g, or t
  misc_feature (792)..(792): n is a, c, g, or t
  misc_feature (880)..(880): n is a, c, g, or t
  misc_feature (892)..(892): n is a, c, g, or t
  misc_feature (911)..(911): n is a, c, g, or t
  misc_feature (919)..(919): n is a, c, g, or t
  misc_feature (939)..(939): n is a, c, g, or t
  misc_feature (980)..(980): n is a, c, g, or t
  misc_feature (989)..(989): n is a, c, g, or t
  misc_feature (1009)..(1009): n is a, c, g, or t
  misc_feature (1019)..(1019): n is a, c, g, or t
  misc_feature (1029)..(1029): n is a, c, g, or t
  misc_feature (1087)..(1087): n is a, c, g, or t
  misc_feature (1196)..(1196): n is a, c, g, or t
  misc_feature (1202)..(1202): n is a, c, g, or t
  misc_feature (1211)..(1211): n is a, c, g, or t
  misc_feature (1243)..(1243): n is a, c, g, or t
  misc_feature (1253)..(1253): n is a, c, g, or t
  misc_feature (1343)..(1343): n is a, c, g, or t
  misc_feature (1360)..(1360): n is a, c, g, or t
  misc_feature (1369)..(1369): n is a, c, g, or t
  misc_feature (1382)..(1382): n is a, c, g, or t
  misc_feature (1396)..(1396): n is a, c, g, or t
  misc_feature (1410)..(1410): n is a, c, g, or t
  misc_feature (1429)..(1429): n is a, c, g, or t
  misc_feature (1431)..(1431): n is a, c, g, or t
  misc_feature (1455)..(1455): n is a, c, g, or t
  misc_feature (1459)..(1459): n is a, c, g, or t
  misc_feature (1482)..(1482): n is a, c, g, or t
  misc_feature (1506)..(1506): n is a, c, g, or t
  misc_feature (1516)..(1516): n is a, c, g, or t
  misc_feature (1522)..(1522): n is a, c, g, or t
  misc_feature (1538)..(1538): n is a, c, g, or t
  misc_feature (1542)..(1542): n is a, c, g, or t
  misc_feature (1565)..(1565): n is a, c, g, or t
  misc_feature (1571)..(1571): n is a, c, g, or t
  misc_feature (1586)..(1586): n is a, c, g, or t
  misc_feature (1597)..(1597): n is a, c, g, or t
  misc_feature (1624)..(1624): n is a, c, g, or t
  misc_feature (1633)..(1633): n is a, c, g, or t
  misc_feature (1641)..(1641): n is a, c, g, or t
  misc_feature (1667)..(1667): n is a, c, g, or t
  misc_feature (1679)..(1679): n is a, c, g, or t
  misc_feature (1681)..(1681): n is a, c, g, or t
  misc_feature (1688)..(1688): n is a, c, g, or t
  misc_feature (1697)..(1697): n is a, c, g, or t
  misc_feature (1715)..(1715): n is a, c, g, or t
  misc_feature (1725)..(1725): n is a, c, g, or t
  misc_feature (1757)..(1757): n is a, c, g, or t
  misc_feature (1767)..(1767): n is a, c, g, or t
  misc_feature (1809)..(1809): n is a, c, g, or t
  misc_feature (1819)..(1819): n is a, c, g, or t
  misc_feature (1840)..(1840): n is a, c, g, or t
  misc_feature (1857)..(1857): n is a, c, g, or t
  misc_feature (1938)..(1938): n is a, c, g, or t
  misc_feature (1942)..(1942): n is a, c, g, or t
  misc_feature (1959)..(1959): n is a, c, g, or t
  misc_feature (1965)..(1965): n is a, c, g, or t
  misc_feature (1970)..(1970): n is a, c, g, or t
  misc_feature (1979)..(1979): n is a, c, g, or t
  misc_feature (1998)..(1998): n is a, c, g, or t
  misc_feature (2002)..(2002): n is a, c, g, or t
  misc_feature (2004)..(2004): n is a, c, g, or t
  misc_feature (2033)..(2033): n is a, c, g, or t
  misc_feature (2048)..(2048): n is a, c, g, or t
  misc_feature (2053)..(2053): n is a, c, g, or t
  misc_feature (2058)..(2058): n is a, c, g, or t
  misc_feature (2065)..(2065): n is a, c, g, or t
  misc_feature (2082)..(2082): n is a, c, g, or t
  misc_feature (2089)..(2089): n is a, c, g, or t
  misc_feature (2091)..(2091): n is a, c, g, or t
  misc_feature (2102)..(2102): n is a, c, g, or t
  misc_feature (2128)..(2128): n is a, c, g, or t
  misc_feature (2134)..(2134): n is a, c, g, or t
  misc_feature (2213)..(2213): n is a, c, g, or t
  misc_feature (2215)..(2215): n is a, c, g, or t
  misc_feature (2224)..(2224): n is a, c, g, or t
  misc_feature (2232)..(2232): n is a, c, g, or t
  misc_feature (2249)..(2249): n is a, c, g, or t
  misc_feature (2290)..(2290): n is a, c, g, or t
  misc_feature (2371)..(2371): n is a, c, g, or t
  misc_feature (2389)..(2389): n is a, c, g, or t
  misc_feature (2403)..(2403): n is a, c, g, or t
  misc_feature (2427)..(2427): n is a, c, g, or t
  misc_feature (2433)..(2433): n is a, c, g, or t
  misc_feature (2458)..(2458): n is a, c, g, or t
  misc_feature (2460)..(2460): n is a, c, g, or t
  misc_feature (2474)..(2474): n is a, c, g, or t
  misc_feature (2521)..(2521): n is a, c, g, or t
  Peptide Sequence Number=SeqID_7257
  Probeset Number=SeqID_14353
tcgatctgctctctatctagcgagcattacgcagaccagatagcgacactcagtccagtacacaatatagctatctaggcgcgatgacatagaactagacgaaatgtgaccacatagagtcnagctatatactctacgcacgcgcggtaagagagatgctgancgtagacgctgtacattcctatattgcacacaataatgatacggagtaatttctcatctcgccgccgacgcgctcgggcagagtggatatattctacccgatcatagtgatatatgatgtgtagtctgactcatctacgatatatcaatacatgtctaatataacatatcgtagcatgacaatgatcaccagtcatatactacagttgagtctctcgtatgctcgtctgtnacgctccnacacgatataanactatcactagtacgcgatagtgtgtaaactcaatagtagattgactcatatganagagagggacagcactagcgatggtggntacgatgtagagtgctgatgacgagtgagtttagctagtactcacgtatgtgacacgtancgcgtgtagtantcaacattcatgagtatacagcgctgatagtatttgtctatactatatgatatgagagagagtgagaaatatgaagtgcgacgatgtgcttagttgaatgagcaacacgcacgtgatcatatctactaatctatgtacgacgacatccacacgtaatagtatcggtctatcgatatgtcgatcaaaccttcgncgcctnagacagtcacatcgtggttcatcntgcacattatagcatatatagtacactctactcgagctgacgtgacgcgttggctgacgtcgctctcaactcaatctagatgatgctnactctgagtagnctatgatcacgagatacanacgtcatnctgtcatatatactctcaancaattcgtgactgcacagactatgacgagatctcgctctanctaactagngcaggatacagtagcgatgncatatatacntctctcttcnatatgcatatgaccacacatagacgtacatcacactacgagtgatagagtgcggctantagtgataacgattacagcacgaatacctcgtatgcagtatatgacaaccattgggagagaggatcgaacgatatcatacacttgcacagcggagatgatggactgganagcgtngttcacaantatatagtgaatatgatagtcgcactcagacnacgctagctncgctgtcgcagtcgcgcgcatcacgagcactaatcatgctcgtgactactaatactatgacgacgacatgcgtgatcatgacgctatctnactctaacttcgacatnattatggangtaggaagcatanacgcatcatgtcgnctgtagtactacgntctcaacgtcgtagatatncncgatgatgtagacggtcactgatncagnatacacacacacccgacgactgngaaactgtgcgccaggagtaattngatcgacagnagtagnagaacgactgagagcnagtngtagcaccatgcgactctatctncgcagncggcagtatacgatntatcatttgcntcgcacgagtacgatatatgcgctgtncatgagtancgacgtcntgctgctacagctatacagcacaagntacagatattantncatgctngcgactttnaataatcatactgctcanctcagcgcgnctgacgatcactggatgacgatgatgaacgantacacagtancgttctatatcagcgatgagttgagagtatatactctgctgncgactgatgnatatgaacgattcacgtctantatgactatgtagtggnagtgatgcttcatcagactatcaatcgtgtgtgacatgagtagtagtgtatagcgagagcagtgtgtggtgctcgaccatntagntaatacgcatgcgactnacgagnatcancattgatcntcatcgacaatcacatgcnatanangacgtactgaatagaacggacgcagctcnctcgaataggatatnctagntctantcgtaantgggagtagcatctttntactggntngacgtagcgcncaatcagtccaaaatcaatgctaaancgaagnaagtttgatggtaactagcaattggtgacgactaaacaatgctatgaacagcactacggaactagtaagatacgctttngnataggtggncgtgctancgactacagtcacgcgngcacgactgttgtgagagtgggattactgagactgacgggnatcgtcatcgtacgagcagcgcgccaagctacctatcatgcgtagcagtggtacctacactacatcaggatattactgtgntctcaacatgatggatgntggtgccttgactngcgacacaactcatagtcagacgngcgagncgacgtacgcaacatcagtgacgtngncgtgacgacggcgngaggatgacgagattactctaatgcatcgataagtatcgatgctagn

SEQ ID NO: 4575 - DNA, 1968 bp, Glycine max
  misc_feature (46)..(46): n is a, c, g, or t
  misc_feature (144)..(144): n is a, c, g, or t
  misc_feature (151)..(151): n is a, c, g, or t
  misc_feature (171)..(171): n is a, c, g, or t
  misc_feature (183)..(183): n is a, c, g, or t
  misc_feature (215)..(215): n is a, c, g, or t
  misc_feature (315)..(315): n is a, c, g, or t
  misc_feature (326)..(326): n is a, c, g, or t
  misc_feature (431)..(431): n is a, c, g, or t
  misc_feature (453)..(453): n is a, c, g, or t
  misc_feature (538)..(538): n is a, c, g, or t
  misc_feature (594)..(594): n is a, c, g, or t
  misc_feature (603)..(603): n is a, c, g, or t
  misc_feature (605)..(605): n is a, c, g, or t
  misc_feature (620)..(620): n is a, c, g, or t
  misc_feature (701)..(701): n is a, c, g, or t
  misc_feature (724)..(724): n is a, c, g, or t
  misc_feature (728)..(728): n is a, c, g, or t
  misc_feature (737)..(737): n is a, c, g, or t
  misc_feature (770)..(770): n is a, c, g, or t
  misc_feature (781)..(781): n is a, c, g, or t
  misc_feature (818)..(818): n is a, c, g, or t
  misc_feature (954)..(954): n is a, c, g, or t
  misc_feature (979)..(979): n is a, c, g, or t
  misc_feature (991)..(991): n is a, c, g, or t
  misc_feature (996)..(996): n is a, c, g, or t
  misc_feature (1095)..(1095): n is a, c, g, or t
  misc_feature (1126)..(1126): n is a, c, g, or t
  misc_feature (1187)..(1187): n is a, c, g, or t
  misc_feature (1190)..(1190): n is a, c, g, or t
  misc_feature (1203)..(1203): n is a, c, g, or t
  misc_feature (1205)..(1205): n is a, c, g, or t
  misc_feature (1218)..(1218): n is a, c, g, or t
  misc_feature (1245)..(1245): n is a, c, g, or t
  misc_feature (1289)..(1289): n is a, c, g, or t
  misc_feature (1291)..(1291): n is a, c, g, or t
  misc_feature (1306)..(1306): n is a, c, g, or t
  misc_feature (1309)..(1309): n is a, c, g, or t
  misc_feature (1322)..(1322): n is a, c, g, or t
  misc_feature (1352)..(1352): n is a, c, g, or t
  misc_feature (1369)..(1369): n is a, c, g, or t
  misc_feature (1400)..(1400): n is a, c, g, or t
  misc_feature (1406)..(1406): n is a, c, g, or t
  misc_feature (1408)..(1408): n is a, c, g, or t
  misc_feature (1417)..(1417): n is a, c, g, or t
  misc_feature (1450)..(1450): n is a, c, g, or t
  misc_feature (1476)..(1476): n is a, c, g, or t
  misc_feature (1532)..(1532): n is a, c, g, or t
  misc_feature (1555)..(1555): n is a, c, g, or t
  misc_feature (1591)..(1591): n is a, c, g, or t
  misc_feature (1632)..(1632): n is a, c, g, or t
  misc_feature (1643)..(1643): n is a, c, g, or t
  misc_feature (1686)..(1686): n is a, c, g, or t
  misc_feature (1707)..(1707): n is a, c, g, or t
  misc_feature (1709)..(1710): n is a, c, g, or t
  misc_feature (1714)..(1714): n is a, c, g, or t
  misc_feature (1717)..(1717): n is a, c, g, or t
  misc_feature (1728)..(1728): n is a, c, g, or t
  misc_feature (1740)..(1740): n is a, c, g, or t
  misc_feature (1758)..(1758): n is a, c, g, or t
  misc_feature (1762)..(1762): n is a, c, g, or t
  misc_feature (1772)..(1772): n is a, c, g, or t
  misc_feature (1777)..(1777): n is a, c, g, or t
  misc_feature (1802)..(1802): n is a, c, g, or t
  misc_feature (1806)..(1806): n is a, c, g, or t
  misc_feature (1811)..(1811): n is a, c, g, or t
  misc_feature (1829)..(1829): n is a, c, g, or t
  misc_feature (1852)..(1853): n is a, c, g, or t
  misc_feature (1866)..(1866): n is a, c, g, or t
  misc_feature (1875)..(1875): n is a, c, g, or t
  misc_feature (1882)..(1882): n is a, c, g, or t
  misc_feature (1884)..(1884): n is a, c, g, or t
  misc_feature (1897)..(1897): n is a, c, g, or t
  misc_feature (1901)..(1901): n is a, c, g, or t
  misc_feature (1907)..(1907): n is a, c, g, or t
  misc_feature (1911)..(1911): n is a, c, g, or t
  misc_feature (1938)..(1938): n is a, c, g, or t
  misc_feature (1954)..(1954): n is a, c, g, or t
  misc_feature (1964)..(1964): n is a, c, g, or t
  misc_feature (1968)..(1968): n is a, c, g, or t
  Probeset Number=SeqID_14354
tataatttttccacactcactcttccacaatatactctgtcctctncttctgatcgagatattatgacacagaaacaactgacaatatacactgtctactatacatatcatagtgatacaaacagctgagagcgccgcgcgctncgtcgtncgccgacgcaggagagatangtttttatatanagaagtatgccgacgtcactaggccagtgaangaagattgtacgaggtaggatctactaactgaaccacaatcggatcagcgagacgatgagcgtacacgtatcgctgtgcgtacgagtgagtgcgtgtaanaatacacagcnagcagggggcgcgggacagcaacaaatatattgatgctacatatctccactgcatctcacatgattatattccgcacactagctcaccacacacagaacaccgcngcagcgctaatttctttatcanatatatatttagtattagaccgcgcacacacgtgcacgctcagcatctgtgcctgagtcgttctacgccgctatgtattatgtgntttagatgctatatcattactctctacgaccgaagctcgcccccagactattgtangtcatagantntgagcgcgagctcangtagagtgtgaatagcagcgttgcgcgcgtggcacatcgtgaccccacattgatgcgctcaggtcgtatcgagcacactanagctagatatgagtagagccganctangcgatcaangcactgacatatgctcgactcgacatacatatngcgcagtggangctacgcggactgcagcggctcattctacttgtttantaattatacatacgatgcatgagtacgcgtcagcatcgatactatacgcatgtgtggagattactactagacgcgtcgtgcacatctctcgatgacgggctgcgcgcgacgtcgcattgtttatacgtcgtctctncttatatgtcgcgacgctacttcangtcgatgacganaatanatcatgagtgagtcgtattgcgcctgagctgtcgcgcgttgtatatcgcgcgtctcacgggtatattgtaatatctagtgtacgtgtttatagcacgcngctgaccttgcgcatacattgtcgcgcacancactaacagacatcataatcaatagagatatagatatgcgatgcacacacctcacaaagtntangcgcgtgtgctcncnatataagagtcgntctatgatcatccacactactcaagantatcacacgcgtgtgtatcgatggtgcgcacagatacatcaatntngtttgcgcgaacatngtntgtatatgttgcnacagtgatagcacgcgatattatatgcatnacggcgacagtgtatgntacgacgctgtgcgtacccgaaatatgatanaagganangacaacccngccgctgctacgcatcatcactcactcatcttncatattgacatatattgattgttgcntccgcgataactactacgaccaacgtactcgcagacacgacgtctagcgtgtattnacatcatgcacgctcctatgtgntatctacactaacacgcgtcacgacatttatatatnatctgatctgcgacgtgcagcgacggctgcgatgagcatgngcacagctccntgtatgtcacgcgcgtcacgcgctagtactgtggatagcggtngactactcaactagtcgtaangnngagnatnacgcattgcgncgacgtctgctngcgttgcgtgtgactgcngatncgctgctgantatcntcgtatatcatgttcggtactattntatncatanagcagtagacaaatgcancggacgacatcgtgctgtgcccnncgagcagcactangatgagggntcgggcngntgggatgatgttngttncgtganatangtagcgcatactcgaatttcagcatcnacgtggaaacgactgncgcgcagcangcgn

SEQ ID NO: 4576 - DNA, 991 bp, Glycine max
  misc_feature (1)..(116): n is a, c, g, or t
  misc_feature (717)..(991): n is a, c, g, or t
  Peptide Sequence Number=SeqID_7258
  Probeset Number=SeqID_14355
nnnnnnnnnnnnnnnnnnnnnnnnnnnnnnnnnnnnnnnnnnnnnnnnnnnnnnnnnnnnnnnnnnnnnnnnnnnnnnnnnnnnnnnnnnnnnnnnnnnnnnnnnnnnnnnnnnnncagctcgaggtagagctaaccttgtgagctaatttaacactgaaaagaatgtaatttactttatcattgttgtttgaagttttgaaatccacttcattttgacgcacaatctaggagcatgcatatagcaccccgaatgctatatgttagcttcggaattgaagtttcatactctgatgacgtttctttgtttcatgacttttgagtagcaaagctgatgcttagggacagagctgaataagtgaaaacattgcaatattctactaattatcttttttggagattaattaaagtagctccaaatatcattgcagttccagaagtacataattgcccacccagcttcaatcagggtcctcctttcatgaccaattagttcaaggagtacatactgcccccccaagtcttctagatgagaaaactatctgttattacactaaaactcttacttgaatgcatggtaacgcagaaaattaccccccgcattactctttaaaacctcttttatcttttccctatttggttctgcccccccttaatttaacaatcgcctgatcacggcgacagctaacctaacccttttctaaccctttttatcacnnnnnnnnnnnnnnnnnnnnnnnnnnnnnnnnnnnnnnnnnnnnnnnnnnnnnnnnnnnnnnnnnnnnnnnnnnnnnnnnnnnnnnnnnnnnnnnnnnnnnnnnnnnnnnnnnnnnnnnnnnnnnnnnnnnnnnnnnnnnnnnnnnnnnnnnnnnnnnnnnnnnnnnnnnnnnnnnnnnnnnnnnnnnnnnnnnnnnnnnnnnnnnnnnnnnnnnnnnnnnnnnnnnnnnnnnnnnnnnnnnnnnnnnnnnnnnnnnnnnnnnnnnnnnnnnnnn

SEQ ID NO: 4577 - DNA, 426 bp, Glycine max
  Probeset Number=SeqID_14356
cccattctggtttcaatcatacacgcgttcgtcattgcatttagtggtagccgtcgcggaagaggagcggcccgtcttgctcgacctggagctcatgcggcgtccaacgcggagtatcagtccctcgccgtcgcgttgcttcagccggatacctgaatcctcttttctcttgtattgttcaggaatctttgagcagcgcacgtcatggtctggcgaggcgacgaccggacggaaccgtcgtcgcggcgattttttgctgtttgcggggcggtcggccgcgacaacgctcaacttcatggagtagacgtccggcgtcccgcgttcgggctctacgccggcggccatggaatacgacacatgcacgcgccgccatccgctggatcccatccgtggtctaggcgaggtcgttctccggtatgtccggtg

SEQ ID NO: 4578 - DNA, 438 bp, Glycine max
  misc_feature (286)..(286): n is a, c, g, or t
  Peptide Sequence Number=SeqID_7259
  Probeset Number=SeqID_14357
ccattgcaatttgtctgatatatcatggcgccgttttcaacattcccttaaacatcaggttaaagatatgcgggatatcgagtatgtgcatttgtgttatgttacagacgcacttcacatatgtttcttatccaatgagacaaaaccagttgccaccataatcaaaagcatgcttcaacaagctttggagttccggtcatgttttaagagtcttaatgacctttcagaatcaacagttaatcagcttaatctgcattctcttataaacttctctcaggtggatgcnattaaaacgaggtttgagagtaacatcaaagatctgtatattttgcattcgaagtcttcaaagtatgaggagcttggtctttctcgcttctgggggtatctgaactacaatgagtatcactctttgaaaatcaccaaggatgtgggatgctt

SEQ ID NO: 4579 - DNA, 2308 bp, Glycine max
  misc_feature (14)..(15): n is a, c, g, or t
  misc_feature (17)..(17): n is a, c, g, or t
  misc_feature (28)..(29): n is a, c, g, or t
  misc_feature (34)..(35): n is a, c, g, or t
  misc_feature (37)..(40): n is a, c, g, or t
  misc_feature (44)..(46): n is a, c, g, or t
  misc_feature (48)..(48): n is a, c, g, or t
  misc_feature (50)..(52): n is a, c, g, or t
  misc_feature (54)..(58): n is a, c, g, or t
  misc_feature (65)..(68): n is a, c, g, or t
  misc_feature (70)..(70): n is a, c, g, or t
  misc_feature (87)..(88): n is a, c, g, or t
  misc_feature (91)..(91): n is a, c, g, or t
  misc_feature (96)..(96): n is a, c, g, or t
  misc_feature (101)..(101): n is a, c, g, or t
  misc_feature (107)..(108): n is a, c, g, or t
  misc_feature (111)..(111): n is a, c, g, or t
  misc_feature (113)..(113): n is a, c, g, or t
  misc_feature (119)..(119): n is a, c, g, or t
  misc_feature (122)..(122): n is a, c, g, or t
  misc_feature (138)..(138): n is a, c, g, or t
  misc_feature (155)..(155): n is a, c, g, or t
  misc_feature (160)..(161): n is a, c, g, or t
  misc_feature (163)..(163): n is a, c, g, or t
  misc_feature (165)..(165): n is a, c, g, or t
  misc_feature (167)..(169): n is a, c, g, or t
  misc_feature (177)..(177): n is a, c, g, or t
  misc_feature (191)..(191): n is a, c, g, or t
  misc_feature (214)..(215): n is a, c, g, or t
  misc_feature (217)..(218): n is a, c, g, or t
  misc_feature (221)..(221): n is a, c, g, or t
  misc_feature (224)..(225): n is a, c, g, or t
  misc_feature (238)..(238): n is a, c, g, or t
  misc_feature (246)..(246): n is a, c, g, or t
  misc_feature (262)..(263): n is a, c, g, or t
  misc_feature (266)..(267): n is a, c, g, or t
  misc_feature (270)..(270): n is a, c, g, or t
  misc_feature (279)..(279): n is a, c, g, or t
  misc_feature (287)..(291): n is a, c, g, or t
  misc_feature (294)..(294): n is a, c, g, or t
  misc_feature (302)..(302): n is a, c, g, or t
  misc_feature (308)..(308): n is a, c, g, or t
  misc_feature (311)..(311): n is a, c, g, or t
  misc_feature (316)..(316): n is a, c, g, or t
  misc_feature (325)..(325): n is a, c, g, or t
  misc_feature (346)..(346): n is a, c, g, or t
  misc_feature (355)..(355): n is a, c, g, or t
  misc_feature (366)..(367): n is a, c, g, or t
  misc_feature (374)..(374): n is a, c, g, or t
  misc_feature (381)..(381): n is a, c, g, or t
  misc_feature (406)..(408): n is a, c, g, or t
  misc_feature (414)..(414): n is a, c, g, or t
  misc_feature (418)..(418): n is a, c, g, or t
  misc_feature (422)..(422): n is a, c, g, or t
  misc_feature (425)..(425): n is a, c, g, or t
  misc_feature (474)..(474): n is a, c, g, or t
  misc_feature (499)..(499): n is a, c, g, or t
  misc_feature (501)..(501): n is a, c, g, or t
  misc_feature (550)..(550): n is a, c, g, or t
  misc_feature (557)..(557): n is a, c, g, or t
  misc_feature (570)..(570): n is a, c, g, or t
  misc_feature (573)..(573): n is a, c, g, or t
  misc_feature (576)..(576): n is a, c, g, or t
  misc_feature (578)..(578): n is a, c, g, or t
  misc_feature (584)..(584): n is a, c, g, or t
  misc_feature (603)..(603): n is a, c, g, or t
  misc_feature (615)..(615): n is a, c, g, or t
  misc_feature (620)..(620): n is a, c, g, or t
  misc_feature (639)..(639): n is a, c, g, or t
  misc_feature (670)..(670): n is a, c, g, or t
  misc_feature (672)..(672): n is a, c, g, or t
  misc_feature (682)..(683): n is a, c, g, or t
  misc_feature (685)..(685): n is a, c, g, or t
  misc_feature (705)..(705): n is a, c, g, or t
  misc_feature (748)..(748): n is a, c, g, or t
  misc_feature (765)..(765): n is a, c, g, or t
  misc_feature (776)..(776): n is a, c, g, or t
  misc_feature (802)..(802): n is a, c, g, or t
  misc_feature (810)..(810): n is a, c, g, or t
  misc_feature (829)..(829): n is a, c, g, or t
  misc_feature (879)..(879): n is a, c, g, or t
  misc_feature (979)..(979): n is a, c, g, or t
  misc_feature (990)..(990): n is a, c, g, or t
  misc_feature (998)..(998): n is a, c, g, or t
  misc_feature (1022)..(1022): n is a, c, g, or t
  misc_feature (1119)..(1119): n is a, c, g, or t
  misc_feature (1187)..(1187): n is a, c, g, or t
  misc_feature (1206)..(1206): n is a, c, g, or t
  misc_feature (1208)..(1208): n is a, c, g, or t
  misc_feature (1226)..(1226): n is a, c, g, or t
  misc_feature (1233)..(1233): n is a, c, g, or t
  misc_feature (1312)..(1312): n is a, c, g, or t
  misc_feature (1317)..(1317): n is a, c, g, or t
  misc_feature (1326)..(1326): n is a, c, g, or t
  misc_feature (1367)..(1367): n is a, c, g, or t
  misc_feature (1370)..(1370): n is a, c, g, or t
  misc_feature (1420)..(1420): n is a, c, g, or t
  misc_feature (1456)..(1456): n is a, c, g, or t
  misc_feature (1564)..(1564): n is a, c, g, or t
  misc_feature (1587)..(1587): n is a, c, g, or t
  misc_feature (1602)..(1603): n is a, c, g, or t
  misc_feature (1672)..(1672): n is a, c, g, or t
  misc_feature (1696)..(1696): n is a, c, g, or t
  misc_feature (1700)..(1700): n is a, c, g, or t
  misc_feature (1748)..(1748): n is a, c, g, or t
  misc_feature (1809)..(1809): n is a, c, g, or t
  misc_feature (1878)..(1878): n is a, c, g, or t
  misc_feature (1946)..(1946): n is a, c, g, or t
  misc_feature (1951)..(1951): n is a, c, g, or t
  misc_feature (1965)..(1965): n is a, c, g, or t
  misc_feature (1978)..(1978): n is a, c, g, or t
  misc_feature (2006)..(2006): n is a, c, g, or t
  misc_feature (2027)..(2027): n is a, c, g, or t
  misc_feature (2066)..(2066): n is a, c, g, or t
  misc_feature (2072)..(2073): n is a, c, g, or t
  misc_feature (2082)..(2082): n is a, c, g, or t
  misc_feature (2101)..(2101): n is a, c, g, or t
  misc_feature (2121)..(2121): n is a, c, g, or t
  misc_feature (2132)..(2132): n is a, c, g, or t
  misc_feature (2135)..(2135): n is a, c, g, or t
  misc_feature (2137)..(2138): n is a, c, g, or t
  misc_feature (2145)..(2145): n is a, c, g, or t
  misc_feature (2156)..(2156): n is a, c, g, or t
  misc_feature (2192)..(2192): n is a, c, g, or t
  misc_feature (2205)..(2205): n is a, c, g, or t
  misc_feature (2216)..(2216): n is a, c, g, or t
  misc_feature (2261)..(2261): n is a, c, g, or t
  misc_feature (2307)..(2308): n is a, c, g, or t
  Peptide Sequence Number=SeqID_7260
  Probeset Number=SeqID_14358
tgtggttgtttttnntntgttgtttttnnttgtnntnnnntttnnngngnnngnnnnngagacannnnanaggagaacggggggagnnagngagtngcganacatgnntgnanaccagnacncgagacgcgagatgcnccgagcgcgcgcccacncacgnncncncnnnaacactancactcaacgctggntgaccgcaagaaacgcacaactnngnnaantgnnatgatacatatanatatggtnatgagtactaagtgannatnntgntatacatanatcaaccnnnnncanaaacatangatgancanaccanatcaactancaatactcacctacctcctantgatatatnatattgattanncctgatngcgacgnggtgcgcgcgacgcgcgcgcgctgnnngacgtncggngacncgngcgtcgcggtgctgcgtgtcgctctgtgtgcgcgctgtgtagcgtgccnatcacatgtcgtgtgtgtcacgagngngcgacgagagatacagatctacagcatcagacatcggatcgctgatgtngttgttncgtgcgagatgancangcncncgccgntgctattctcgtcgtgcgntgctcgttgggntgtgnccgcctcgcgtgcgtctcntcgcgtccaccgtggcgtctcagtcgtcgcncngtacctcacnntnctgttcggcatcgtacgtcngtagcatgagcatatgggcacgtgcgttctagacacttgagantcataggagcgcgatgncatggatatancacgattagagggcatagagagacgncgcgatangatcgctatgtcgatctcncacgacgatggcgcggattgaggtgatgatgctctagcgtctcgttcganagaatcaccgagacaggcatatagacgccagcagacacgacagtgcaccacacatgacacgacagtcactctaccagaagaccacaagactagtgcaacnctgtcagtganagcacctnacgaatgtgcagttcatgagctangcacacttcagagtacaattcatatactacgctatcattatatatacatcgtgagagtgtatatgtatgagattaggtatatgtgatatggtaacangtatatgagatatgttaacgagctttgaacagatatgatccttagagacctcgtcgctcgcgtggttntgcgtacatcttacatgtncnatagtctgatgatgctcntatacantacactatatactgtactagtacgatatcattctgtctggccagacgtactgaatgcatgatcatagacgacgacagcncaggngtcgctatnatacgatgcatcgcgtgctcgcactgcgcgctgacgcgtcncgngcgcgcagacgcagattatgttctaaagaatctctaccacgctgcatctntactgtatgctatatatcttttctagtagctggtgntatatctccgtagcctgctgtagctgactgcgcgacgtatcagcgaatagatgtacgcagtgggatcgtcagtgatatacgtagctagtgacattatacactaccatncatatacattgatgcacgtaacnatagtagtctcgctnntcacactatgtatcatgtgaacgatagaatcacgtaatgctgatcatcagtatgatgacgcgacatganatacatcgcacaactgatatatanttgnatctaaatcatcatcccacagatcagcacatctacgtgagtactgtgntattagtatagagctgcagatcgaactcgacgctctcacgctatatccacacctcgtcgtngacgcgtactcgaaatcgactcatactcacgcactgattcctgtagcttcgtctagtagtcagctctgnctggctgattgactatacgatattatcgtagaagagtaggactgtcagctgacgagcgagggactcgngcgancagtagcgaagtancgtgggagatgancgatggtgctaatcgcgtcgacgagagnagtgtgatatagtacgatatngttgtagtgatgttatggtgaagtgtagtacaataaaanaatatnnttcagattnatcatatgaactacatatncgcgctatactacgcactantcccagctaanttncnnacgagangcgtgacgcgncgctctgacgtcaccgtcatcccatcgtctgcagcnactctgcacgcangtacgatcagntcatatgactaactcgcattgatacgtcgtcgtcatttgcgtcgntctacagattgctatccgttgacgaactacgacgcgttacttcacnn

SEQ ID NO: 4580 - DNA, 749 bp, Glycine max
  misc_feature (749)..(749): n is a, c, g, or t
  Probeset Number=SeqID_14359
ttccccaattgggaaatttaccctccttaaagggacaaaaagcgggggtcccccccgggggggggcccccttaaaataaggggttccccgcggggccggaaagcatccttttttttttttttccttttttcgctttttttttttttttttttttttttttttttttttttttttttttttttttttttttttttttttttttttttttacaaactaattagtactttttacattcccaaagccattgaaaataaaatttctaacttccaaagttaaatatgaaccttctccatgaatcagacataaattccaaaaacaccagtttataatgcatgggaaacaattttgagtttacaattttgaaatatcattccttacggcattaatttcagatatactcatcattgaatcaagaattactggtattttggcaccattgatgtgagtctaggagagaaccttctctttatggtcgaactctgaattgccgatgtatagcaattactaggaagatgcactttttgtcttaatacttagaccaggacaggcacaaaacttagtagtgctttcatgttgtttggtacgagcaaacttccaaacttttcaatagaactgtttgatttataccagcaggctaatgggggggggcctacgtagctgagcgctagactgagcccagaagctgggggcgcgtattgcaccgaaatgcctcgccccataagggaaaaagcccgagacggaagacgaan

SEQ ID NO: 4581 - DNA, 1272 bp, Glycine max
  misc_feature (1)..(1): n is a, c, g, or t
  Peptide Sequence Number=SeqID_7261
  Probeset Number=SeqID_14360
ntaaagtctctgacaaaacaagaagaagagcaaaaccagaagcagaggttctgaaatcatctatttatatctctatcaatctatccgcagatccgtgagcaagacgagaagccaaaatttctctggctacatccttacgtagtgtacactatccagtggagcttgaatttgccaaggcaccgaggcagtggaaggaagacaatggcggtttctctatcggcgctcacaacctccctctcttcactttccttctcttcccacatttcccagagaccaagcactctctcgttcgccagaaccgaatccctctccgcctccgtctcgcgcttctccaaaaccccctcctccctcgtcgtttcccgccaccgcactcgcggaaccggacaccgaacaccccaagacctacgtccagtcgacggcagcccaggttcattcgccgcgcacactaccatacgcaaccgatcgccgaatgcagagccatcgctcgcgtcgttctccaggcaggaaaccggctaattcatgatcaaataccgtgacgccaaggaatatcttcgagcaaatcctttgtggcttcaatacattaaggtccccataatcactttcggatatgacagtgattatgaatgtttttgtcaaagcttgagggtggctggcatgtctggtgagccccaggcaatctctcttggcatggctcttgccattgctgaaggtgagcgaagatcatagagtacctttgagacagggaaggacttcttacaagatagcccagagtggttgagcatgaaaggaaagttggtctcaagaaagctcgtaaagcccctctaatattccaagcgtggaaggttcgggatgttaagatggatggttctggactttctttctttcttgtgtcactggaaatgagctagatttggagactagtgactgttttcgtttgtagttgtaggtttttcgggttaggggaatgtaaagagaaagtgaatagttttcgtagaagtatgtattggtaagcctgctctctgttttccgatctcgtgtttccttgatctgtatggaattgggaagtttaggtatgtacatatttgtctcttctttttacccccaaacaaaatcacatgttttacgatattgaaggtttctttttaagatctaaattttgagagcgtgtaatagacaattcttagggctatttgtagtttggtttgcaatgttggtatattggtttgtgtgaagggtttcttgatttttgggctaacaaaagtgggatcggat

SEQ ID NO: 4582 - DNA, 1667 bp, Glycine max
  misc_feature (6)..(13): n is a, c, g, or t
  misc_feature (20)..(40): n is a, c, g, or t
  misc_feature (47)..(47): n is a, c, g, or t
  misc_feature (52)..(53): n is a, c, g, or t
  misc_feature (57)..(58): n is a, c, g, or t
  misc_feature (60)..(60): n is a, c, g, or t
  misc_feature (62)..(64): n is a, c, g, or t
  misc_feature (66)..(66): n is a, c, g, or t
  misc_feature (68)..(69): n is a, c, g, or t
  misc_feature (72)..(72): n is a, c, g, or t
  misc_feature (74)..(77): n is a, c, g, or t
  misc_feature (80)..(80): n is a, c, g, or t
  misc_feature (84)..(84): n is a, c, g, or t
  misc_feature (86)..(88): n is a, c, g, or t
  misc_feature (90)..(91): n is a, c, g, or t
  misc_feature (95)..(95): n is a, c, g, or t
  misc_feature (114)..(114): n is a, c, g, or t
  misc_feature (185)..(185): n is a, c, g, or t
  misc_feature (242)..(242): n is a, c, g, or t
  misc_feature (260)..(260): n is a, c, g, or t
  misc_feature (271)..(271): n is a, c, g, or t
  misc_feature (315)..(315): n is a, c, g, or t
  misc_feature (319)..(319): n is a, c, g, or t
  misc_feature (364)..(364): n is a, c, g, or t
  misc_feature (871)..(871): n is a, c, g, or t
  misc_feature (1087)..(1087): n is a, c, g, or t
  misc_feature (1185)..(1185): n is a, c, g, or t
  misc_feature (1334)..(1334): n is a, c, g, or t
  misc_feature (1366)..(1366): n is a, c, g, or t
  misc_feature (1440)..(1440): n is a, c, g, or t
  misc_feature (1579)..(1579): n is a, c, g, or t
  Peptide Sequence Number=SeqID_7262
  Probeset Number=SeqID_14361
tttttnnnnnnnnttttttnnnnnnnnnnnnnnnnnnnnnaaaaatnttttnnaatnntntnnngnanntgntnnnnccnctanannncnngcgnccggctcgacaggagtatnagagacgtgggaagaggacagagggaggagagtgaaggggctgtgacaaataggcggtatggaatggaagnatatgaacgataaagagatagcatatatatctggataataatataatgcggcgtaanataagacactgcagcatnacgacatcaancacagatgagaagcgcgcacgatacaaaattactgtcagtagtnactntgagaaacgacattattactgatagattttaatgttacgtctgcntgcgatagtatatacgaaactactcgacatcatagaactataacgcaccgcacactcaatgatgagtaggcgtaggacaacacacgccatctcaagcaaggcacacacgactcatacccacacacgcgcgcctcaccccacgggaccactcaggaataacagatacacgacaaggagaagagagcacaagagacgaccgccgtaagttagtctgaaactgcgacactactctcttgtacgttcactcgtatatcttattcagagatctctcggatcacactcccatgtgctatatcgtagcaatattaacactccatatagtgtaactaaactcgcatcatagtactcacgactaagtggtaacatgcatactgacatgcggcttcacatcactcgaccacgtctcatcactctgtctccatctccatccctaggtagtgactcacactcgtcgtagagatgggagagcggtatgatagacacgataatgacagatggcatatggcncccggcgcccgctcgtagtctcagctcagtgtggtcgtgcgtctcctactgcgcacacatgcgcgcgcattatcattgccatgctaacctattctatagaatcataacataacaatgagatagacctcttactgaagagataagaagagttcagtctctgtgaggagggcgtatgtcagaggacgcggcggataaggcgaggcgtcatgtgtcgcntgccattataaaggtagaggctgaacgaatggaatggcgcagatggagtactagaagcgacagcgagccacgacgcgcgacgcgctccgccatgtttnactcctctctcatatatgtctgtgtatcgatgcttacactgtgtactcagtatgcgactcagacagcgccacccgcacacactcactctggtgcacgcatcctcgcgccgctgctcgtcgtgccgagtcggacagcggatgtgcgctanctgtgtatacgacagatgatctacagacaccntatatacgctataattactgtcacgagaccgatgatatgggttatcttattatctacactggcgatgagcacgnaagtgcactcggtgtgtgctggtcacacctacgcattcatactctctttactcacaatatatgtatctaatgttgatatacaataacgacgcaggacattagtgatcgatccatatcgtgcgtactagacaacgtgatntactatcatgtgatcactgatgtaatataatgagaatatctctataattcatagaatacagaataggagataacatacataggaacgc

SEQ ID NO: 4583 - DNA, 1450 bp, Glycine max
  misc_feature (9)..(14): n is a, c, g, or t
  misc_feature (16)..(25): n is a, c, g, or t
  misc_feature (27)..(31): n is a, c, g, or t
  misc_feature (57)..(57): n is a, c, g, or t
  misc_feature (62)..(63): n is a, c, g, or t
  misc_feature (81)..(82): n is a, c, g, or t
  misc_feature (151)..(152): n is a, c, g, or t
  misc_feature (192)..(192): n is a, c, g, or t
  misc_feature (1213)..(1213): n is a, c, g, or t
  misc_feature (1241)..(1241): n is a, c, g, or t
  misc_feature (1347)..(1347): n is a, c, g, or t
  misc_feature (1369)..(1369): n is a, c, g, or t
  misc_feature (1406)..(1406): n is a, c, g, or t
  misc_feature (1415)..(1415): n is a, c, g, or t
  misc_feature (1418)..(1418): n is a, c, g, or t
  Probeset Number=SeqID_14362
ggtttcccnnnnnncnnnnnnnnnntnnnnnccggcccgttggtgtgggcccgcgcnggtcnnccgcccccgcgcggcgcnngccccccggccctgcgcggcggcgggtgcgcggcgccggcgcggccgtcgccagggtgcggttcggggnnagcggagagggggcgggggagtgcggaggggggtggcgcnggcgcgcgcggagcgccccctcaaacagccagccagctgccgagaccgataccaaatatcgaccaaaggagagtcaacgtaagagagcagataggtgaactaccgacgcgctccaaatcgaagcactgagtcgagttgtgggcgtgttgttttaaagtaggagataagaacagtcatataaggtgatgttgttctcgtgtctctgtggtgatccggctctccgctgatgttactctcggttgtcgcgttatagtcataatatagaatattaaataatacatgcttcaacgtgtctactgtacactcgtgtctatcaacgttattatagttctataattatctttatcacgattccgaacgatcactacgtatactctactacgattagtagtgttatattttgaattgatttacgtgtagtactatttattaggctctgtacacgaatatttagagtgtagcgtggcctaatattcgaggttatggcatgagcggatctccacaatcatctcacacgtatataacacacgatataactgaggacagttaatagacgaaagtcgagaatagacgatgcggagtatgagatatggtaaacagtgatatagacacaatatgctagagtacgcaaacagatcgagccgaccacaagtctctacgtaagagaaccgcagaaccggctaccgcgacaccaccgctgcgctcataagatgatcttatagtctgtcgcgtctacatttcattatttgctcatatcgtgtggttatgctgataaatgatcagtagtaaatatctcatatgatagataagttatactatcatgcgcttgtgccactgctctagcgcgtgtagtagtgtgagcctcatcgcccgaggtgtggtgagtaggtgattccgggagcctgttgtgtagttatgctcttgttcgtagtctatcgtcgtacatgcggtgtgtgtgtgcgagatgttcttgtaggagggaggtcccatcgcggtctcacctccttgacatgtagatacngttatatgtagaaattatgacgatacanatgtgctcaagagcacacatatataatcacactgatgctccgtagatacagtaaatatcgagcgacgtgagatgtataacgtggtgtatgatacacacgcgcctantgatccataacagcgtgatgtntctcactgataaaacgtgaagcacagccgacgcatanagtaccatntgnatcgagacgaaccgtgcgcgcacggctggcgc

SEQ ID NO: 4584 - DNA, 431 bp, Glycine max
  misc_feature (123)..(123): n is a, c, g, or t
  misc_feature (397)..(397): n is a, c, g, or t
  Peptide Sequence Number=SeqID_7263
  Probeset Number=SeqID_14363
ggaagttaatattgaaatacacacacaagtacaggctgggattatggaggccacgtgctgagttcatcactgcctgattggtttctaagtagtaagtagtcgctgtttgttagaccatattgnaaatgtttagccgcaggagaatgacaatgctctacttgacaagatcagcccgcactgcctttgaagattttttttccgtgtcgtgccaacaaggcataaggaagaaagggtgttgttacacccccccccccggaggcggtgccggcgcggcgcccgcggccccgcccccacacaacacacggaagcggcgcgggggggaacccccggacagaaacaaaccagcaagccgtccgcgcgcccccgccgagacgacagggccgcccccccccggcgngcccccccgcaacgccccccccgccccggccggg

SEQ ID NO: 4585 - DNA, 245 bp, Glycine max
  Peptide Sequence Number=SeqID_7264
  Probeset Number=SeqID_14364
ttttttttttttttttagccagaaggggtttgcattccaacctgcttgtcctacgcaagtgcacctgaattactgaactatgaactatagcaactgatatagcaagcagctactgaaagtgcaatttcacagcgtgcaatacatgcagagttcaggttcaagttcgcaccatactatgaatccagaacacagtacacaaagcagacgtacagaacgtagctaagagaccgaacataacttgtttt

SEQ ID NO: 4586 - DNA, 2065 bp, Glycine max
  misc_feature (41)..(41): n is a, c, g, or t
  misc_feature (57)..(57): n is a, c, g, or t
  misc_feature (120)..(120): n is a, c, g, or t
  misc_feature (173)..(173): n is a, c, g, or t
  misc_feature (222)..(222): n is a, c, g, or t
  misc_feature (227)..(227): n is a, c, g, or t
  misc_feature (329)..(329): n is a, c, g, or t
  misc_feature (333)..(333): n is a, c, g, or t
  misc_feature (384)..(384): n is a, c, g, or t
  misc_feature (435)..(435): n is a, c, g, or t
  misc_feature (437)..(437): n is a, c, g, or t
  misc_feature (440)..(440): n is a, c, g, or t
  misc_feature (448)..(448): n is a, c, g, or t
  misc_feature (485)..(485): n is a, c, g, or t
  misc_feature (594)..(594): n is a, c, g, or t
  misc_feature (666)..(666): n is a, c, g, or t
  misc_feature (866)..(866): n is a, c, g, or t
  misc_feature (966)..(966): n is a, c, g, or t
  misc_feature (968)..(968): n is a, c, g, or t
  misc_feature (1042)..(1042): n is a, c, g, or t
  misc_feature (1128)..(1128): n is a, c, g, or t
  misc_feature (1146)..(1146): n is a, c, g, or t
  misc_feature (1198)..(1198): n is a, c, g, or t
  misc_feature (1212)..(1212): n is a, c, g, or t
  misc_feature (1214)..(1214): n is a, c, g, or t
  misc_feature (1245)..(1245): n is a, c, g, or t
  misc_feature (1263)..(1263): n is a, c, g, or t
  misc_feature (1427)..(1427): n is a, c, g, or t
  misc_feature (1463)..(1463): n is a, c, g, or t
  misc_feature (1471)..(1471): n is a, c, g, or t
  misc_feature (1524)..(1524): n is a, c, g, or t
  misc_feature (1593)..(1593): n is a, c, g, or t
  misc_feature (1622)..(1622): n is a, c, g, or t
  misc_feature (1639)..(1639): n is a, c, g, or t
  misc_feature (1661)..(1661): n is a, c, g, or t
  misc_feature (1674)..(1674): n is a, c, g, or t
  misc_feature (1677)..(1677): n is a, c, g, or t
  misc_feature (1679)..(1679): n is a, c, g, or t
  misc_feature (1694)..(1694): n is a, c, g, or t
  misc_feature (1726)..(1726): n is a, c, g, or t
  misc_feature (1748)..(1748): n is a, c, g, or t
  misc_feature (1750)..(1750): n is a, c, g, or t
  misc_feature (1755)..(1755): n is a, c, g, or t
  misc_feature (1758)..(1758): n is a, c, g, or t
  misc_feature (1775)..(1775): n is a, c, g, or t
  misc_feature (1818)..(1818): n is a, c, g, or t
  misc_feature (1831)..(1831): n is a, c, g, or t
  misc_feature (1855)..(1855): n is a, c, g, or t
  misc_feature (1883)..(1883): n is a, c, g, or t
  misc_feature (1904)..(1904): n is a, c, g, or t
  misc_feature (1911)..(1911): n is a, c, g, or t
  misc_feature (1964)..(1964): n is a, c, g, or t
  misc_feature (1992)..(1992): n is a, c, g, or t
  misc_feature (2059)..(2059): n is a, c, g, or t
  misc_feature (2065)..(2065): n is a, c, g, or t
  Probeset Number=SeqID_14365
ctagtaatcgagatcatcacatgcgcgcgtggtcgtctganacgcggcgcgacgcgncattgatgatatcaggaggctgcgtctcgacaacgcacgtggcgagtgtgctgccgatcgagnggtgtgagtgttgaggctgcatctcgcagtcagagatgatgtatggctcgcgnagacggtatcgctcacgtgtatatctcgcgcaccactgagtagtatcgnatgantatgatcgatgctctatgatattcacatcagacgtgcgtatgtcagacccgacacgatcagagtctcgtatcgcctctcgcgcatggtactgttactgttgngatntcgcatgaccacgttctatgtctatgatagacgtgactttactaatcatcntacgtgtcgactatagacatgcacgcgaacgctgcgcaactgatctaagcnanacnctcggcgntacagcatgatgagtcatgcctacgtagactcgagtntgtggcgatcgtagtgtcaaggagaggattgtctccactattgtgcgtgtataggcgatgtcgcgcgcgcgtcagcaacgatgaggacaatcgcacagcgttgtctagncgcgaccgacaagttgagcacgtgatactctctgttatactgatacgtatgtatgatcgtgtaatcgagtgncgaatatgctacgagactactcgaccaccaacacgaccgtacgtgtatatggccgcatgtatgatagttagctaagcagcgtacggacgacggacactggtacgtcggtgtaccactatccgatgtgtcacacggcactgtcggtatcctacgttatgccttgtcgtgctctgccattagacagacacatcgtcgtcaangtcgtgtctaatgcatgtctcgtctgtatctgtgtatcgacgctacccgcagaatcatcgagacatagagtagcatgtcttagcatcgacgcatagctgncntcgcataggtatgacgtgacatgtacgtccatggcgagtacgcatcgtcagacatgagcgactgaggacaggtngtgcatgttgacgatgagtggcataacgctagtatgagtagatgatatgcagcacaatgtgagtcacgagagtacagatgacgagnaccactcgtcgatgtgangcacacgtgtacagcacatacacatggacacggcacacacgctaagtctatnaacgtgcctcacgncnactgagtcagcagttcgtcgctcatgcgcgngctctaaagtctatcgcntgcgtacatggtacgtatgtgctcgcccactgcgatccacgtcaacatacagtacacatacatcgactgtagtcgcacctgatacgtactgtcacatacgtagatacatatcgatagctgataagatacctgcgatgctgcgtcgtctggtagtgtcgcatgancgcatcgtatcgtagcggatacacgtgtcgtcgctntattagtnatttatctcggattcattgcgttgatctgatgtcatatcgataatgtgtgtcnatactactcgacaatctactacgtcgatctcttcttacggtcgtacacatacgagatatgatgacggancacatagtcgtacggtcgcacgactcgcngccgagagagcagtcangatcgactcgcgaccgcgcccntcacgcgtgcacntgnantgagagcatcactgntacagatagcgtgtgctgtcttcgaatctgcntgagcgtatcgacacgactacntncatcnctncgctcgagctacagtantatcgaccaagcaagcagcacacagatgcacaccgactcaatntcaggactgacgnacacgatatgtgatatgcagtgtngatggacgtatcactgcagtcatcgcancatacatatatactgaccganctcgatncgctagtgacattcacagatgtgatacgtactcgtcatacagcatgacgtcgngcgcgatatacgtcagcatagcagatcntctgctagcgatgatggactgtactggccgatactgagtacatgtatgtgcaatagtatcgcagctngatagn

SEQ ID NO: 4587 - DNA, 703 bp, Glycine max
  misc_feature (683)..(683): n is a, c, g, or t
  Peptide Sequence Number=SeqID_7265
  Probeset Number=SeqID_14366
accattcacgctcattactctctgctttcaaatctcagatcttccgtaagaaaagaaactcatccttgtgaaagttttccagacactgcgatgtcgaaagcaattcttctggttgctctctgctttttaccggctctagccatgtctgctcgtccgaacaagaaccctttcgtcgtcagaggccgtgtctattgcgatacttgcctcgctggttttgaaacttcagcatctactttcatccctggtgcggtggttagattggagtgcaaagacaggagaacaatggagttaacctacaggcacgaggcgagaaccgactcaacaggatcgtacaagatcttggttagcgaagaccatgaggatcagttctgtgataccatgttggttagtagctctcagttacgctgctccaatgtctcacctggtcatgaccgtgcccgtgtgaccctcactcgtttcaacggcattgcttcagacgaacgtttcgctaacaacttgggcttcctaagggatgcagcatcaccaggctgtgcagagatcatgaagcaatatcaagaaactgaagactaaaatgctcaatcagtatgtttttatcagtgttcccccgacatgtgggattaaaattataattgcagcttgtgtttcgtgcattgtatggttttattacttccgaaaaaatcaanaaatatatataatgaatccc

SEQ ID NO: 4588 - DNA, 481 bp, Glycine max
  Peptide Sequence Number=SeqID_7266
  Probeset Number=SeqID_14367
tagctacgtaggcccccccccagaatggcatcgccagctaaagaaaggtgtcatggtgtkgttcaaacttmragtggygtgtggaatagaagaatcccaattcccaaccatattatttgtcacgcttggtacaggggaaatacgacaacatcatcgcggcggtgaagagctactacatgtcgatgagcggtacactaccaatagtgtcggtgaagagctaccaatctgaatgaatggtttcaagtgtgagagtgagcaatgagcttggtgcaagacacccaaaatatgcttatttctcagtgtgggcagtgactgcaatctctatactaatatttatcattcttgccattgtgatcctctacctgtgcaactacaccagctacatgttgcatgttcacatatgcacttttgtattagtaatatctcttgtatagtgcttttctcctctttatatccatgaagtaaaactcatttctctctc

SEQ ID NO: 4589 - DNA, 1450 bp, Glycine max
  misc_feature (1)..(3): n is a, c, g, or t
  misc_feature (24)..(26): n is a, c, g, or t
  misc_feature (56)..(56): n is a, c, g, or t
  misc_feature (558)..(558): n is a, c, g, or t
  misc_feature (583)..(584): n is a, c, g, or t
  misc_feature (596)..(596): n is a, c, g, or t
  misc_feature (681)..(681): n is a, c, g, or t
  misc_feature (700)..(700): n is a, c, g, or t
  misc_feature (782)..(782): n is a, c, g, or t
  misc_feature (784)..(784): n is a, c, g, or t
  misc_feature (793)..(793): n is a, c, g, or t
  misc_feature (838)..(838): n is a, c, g, or t
  misc_feature (853)..(853): n is a, c, g, or t
  misc_feature (861)..(861): n is a, c, g, or t
  misc_feature (920)..(920): n is a, c, g, or t
  misc_feature (925)..(925): n is a, c, g, or t
  misc_feature (928)..(928): n is a, c, g, or t
  misc_feature (932)..(932): n is a, c, g, or t
  misc_feature (957)..(957): n is a, c, g, or t
  misc_feature (1028)..(1028): n is a, c, g, or t
  misc_feature (1062)..(1062): n is a, c, g, or t
  misc_feature (1125)..(1125): n is a, c, g, or t
  misc_feature (1150)..(1152): n is a, c, g, or t
  misc_feature (1155)..(1155): n is a, c, g, or t
  misc_feature (1157)..(1157): n is a, c, g, or t
  misc_feature (1159)..(1159): n is a, c, g, or t
  misc_feature (1177)..(1177): n is a, c, g, or t
  misc_feature (1212)..(1212): n is a, c, g, or t
  misc_feature (1232)..(1232): n is a, c, g, or t
  misc_feature (1246)..(1246): n is a, c, g, or t
  misc_feature (1250)..(1251): n is a, c, g, or t
  misc_feature (1289)..(1289): n is a, c, g, or t
  misc_feature (1304)..(1304): n is a, c, g, or t
  misc_feature (1339)..(1339): n is a, c, g, or t
  misc_feature (1342)..(1342): n is a, c, g, or t
  misc_feature (1344)..(1344): n is a, c, g, or t
  misc_feature (1404)..(1404): n is a, c, g, or t
  Probeset Number=SeqID_14368
nnnttccccccccccctcaccccnnnccctgccccaccctccgtctgccctccctnaaattgcggtaacggagatcgcacgaagtaaagagagaccaccacctcacagaagagtagggacgggctctcaataaaagaagaggtaagatcgccatccccgccaggcagcgcgacagtgtagactcctatcctctattctcttctttggatccgtcagaggcccacacagcacaatctatcactcgcacagagtgaacaaccctccctaccttatactcaaacgacagagattgtatactaatagagagcgagtataatccctcaaagctgtatactctaacactgacaatgtggctgagtgctatatcaggtacacaagaaatccgatctgtactctactagtagtcgccgcgccctacgagttggccgaattagctaggtgtttataatcctatctctctctttcctcggtaaagccttctccttgtgttgcaactgggggcttctaagcccgctgcggcgtgttgggatttgttggcgtctgtagtctgggagtcgnctcgtgctggcctgtctccgagggnntttgtaggtgcnacgggacagcccacgctgcctacaagatagatcctgctctacttgtccatttattctatagtagtatagagatgtgagagtgtanatattatatattaataganatcgtctaattttatattcaagctgatgagcctcatgcacacctcgcatagtgtcttagtttggtggtactcattctcttcntnctggctcgntacatcgtcagcttactgctatatattagtgtaattatagcgctnctctgtgcgtaaatntctgtggngctgcgctctatagctctccacactcatgtatcaccatctgccgacaacgacagaaggnagttnttngtgngtgtcgtgtgcacgaactagcccgnatgctgcgtacatcacaccacaacgacctgcaagtagatacacctaaacacattatatgatatcatctgtnagtctagtcgctgatctcgatctatacgatcgtntgaggtgtgatacgacgagatggtgaacaaatacgagacacgattgcacgctactacctagcntgcgctcatacgagacactacttgnnngtntncncgctccctcacctccgtnactacgacggcgtgacagactcgacatacgatctntatctcacagaatgagactntctacgtcactatntatnnctgtcatatcatccactgcactcgacgcgtagcgttcngcggtctgcgcacanaccctagtcttcacgacgccgcgctcatactgtgnggngngcgccactgctactcgtcgagtatctaccacatgctccacctgcgtacaggctgtcgacncccgcacacagagcattactaccgacgcatcggacaggatcactcc

SEQ ID NO: 4590 - DNA, 1706 bp, Glycine max
  misc_feature (1)..(1): n is a, c, g, or t
  misc_feature (12)..(12): n is a, c, g, or t
  misc_feature (64)..(67): n is a, c, g, or t
  misc_feature (70)..(75): n is a, c, g, or t
  misc_feature (84)..(88): n is a, c, g, or t
  misc_feature (91)..(92): n is a, c, g, or t
  misc_feature (94)..(94): n is a, c, g, or t
  misc_feature (102)..(104): n is a, c, g, or t
  misc_feature (106)..(106): n is a, c, g, or t
  misc_feature (132)..(132): n is a, c, g, or t
  misc_feature (195)..(195): n is a, c, g, or t
  misc_feature (310)..(310): n is a, c, g, or t
  misc_feature (313)..(313): n is a, c, g, or t
  misc_feature (462)..(462): n is a, c, g, or t
  misc_feature (491)..(491): n is a, c, g, or t
  misc_feature (664)..(664): n is a, c, g, or t
  misc_feature (667)..(667): n is a, c, g, or t
  misc_feature (727)..(727): n is a, c, g, or t
  misc_feature (1100)..(1100): n is a, c, g, or t
  misc_feature (1326)..(1326): n is a, c, g, or t
  misc_feature (1432)..(1432): n is a, c, g, or t
  misc_feature (1492)..(1492): n is a, c, g, or t
  misc_feature (1591)..(1591): n is a, c, g, or t
  Peptide Sequence Number=SeqID_7267
  Probeset Number=SeqID_14369
nttgtgtttggntcttggtttgtttgtggcgggggggtggcgcggcggtgtctccccggctcgnnnnaannnnnnatataccannnnngcnngngacgactnnntnctactttttccccccgaggagagganggcgacgccgcccgcgtgtgccaacaccaccacacctctcgaccaccactacctacccccgcnacagagcggcggacggcaccaagggaacgcgagcgagacggcggtgggtatgggcaggtcggacgatagcaccgaaacaacagagtaggcggggagcgcggcgatgcgagctccncangatgtatcatctattatacgctacaatacttacagctcatgtgtaatgactacgtctcctcgtcatagcgccgctccacgtgacagagagaagttcttaaatgatatacgctgctcgacggcgggcagaacacaacagacgatcgcgangagaaaaagatataacgaagtacgcatanaataatacgaaaataaatatacacaacaacataaaccacatctactttacacacctactcgatcaatcttacgactaagttattattatggcaggaaggataagagcggcgtgcgagcaacgccgaacaaagtagcaacgaatggtgatagctacgatgataaatgaaacaancanctgactatatacattgtgctgctgaattctctgtatttgatatcacctcatcaacgccanaccgacgtgagggcaccgccgcctgatagttgtgagagtacgtggcgccggacgaggtgcggtgtgtaggtagagcgggcgatactatatgtacgtccgagcgacagtctttcagtaacaacccacagtcgtcaccgcgtcgcctgcccactggctatatgatataggtgtagtaggagtcgaggcgagatacggccacacgacacacgagacgcgtccgagtgcggcgcgcggactgttgtctgtatcacacatcgtaacgtggtagatgtcgacgctgtgtggtggtagagagtgatgagtcggaggacaggtgagatgaagacgcgacgacgatcttgatagataactcacacgagagcgcaatactcancatactacacagactgacgactgcagactcgacgcagaggatcgccgacctcgactacgtcgctcggctgctgacggtggcgcgcggagcgtataacgatgtatgtcgaggagaatgcacaacaactctatcgctcacgcacacgcgctatcaacgcggtagtgagcgctcctccaccgcgcaccctccaccgcgccgctgcgcgcgcgcaatcgcgtgacatagncgcgcgcgcgcccgccgcgacagcatcggacgtcacagcgaacctgtgcgacgcatcgcgcagccatggtcgaccggtggctcaactagagaacgatacacgcgtncgagatgcgagagtgtgtacgacgacccgtcacacgcacgactgacgtgtgtgatcgtcncgcgtgccggtagcgcatcgcagcagagatgtgtatgctacggcgcgatgcgcatgggtcgcctgtcctgtcgtaccgcgtagctaatcctcatcgtcncgagtgtaggctaggagcgtcggcactaagacgtgacggagcgcgcgcgacgtatctacgtctactgatctctacgtgatatatcacacgaccgtgctccgttatcactctgcat

SEQ ID NO: 4591 - DNA, 1915 bp, Glycine max
  misc_feature (516)..(516): n is a, c, g, or t
  misc_feature (668)..(668): n is a, c, g, or t
  misc_feature (763)..(763): n is a, c, g, or t
  misc_feature (782)..(782): n is a, c, g, or t
  misc_feature (871)..(871): n is a, c, g, or t
  misc_feature (990)..(990): n is a, c, g, or t
  misc_feature (1006)..(1006): n is a, c, g, or t
  misc_feature (1035)..(1035): n is a, c, g, or t
  misc_feature (1158)..(1158): n is a, c, g, or t
  misc_feature (1177)..(1177): n is a, c, g, or t
  misc_feature (1198)..(1198): n is a, c, g, or t
  misc_feature (1387)..(1387): n is a, c, g, or t
  misc_feature (1436)..(1436): n is a, c, g, or t
  misc_feature (1484)..(1484): n is a, c, g, or t
  misc_feature (1535)..(1535): n is a, c, g, or t
  misc_feature (1688)..(1688): n is a, c, g, or t
  misc_feature (1756)..(1756): n is a, c, g, or t
  misc_feature (1849)..(1849): n is a, c, g, or t
  misc_feature (1915)..(1915): n is a, c, g, or t
  Probeset Number=SeqID_14370
cagagcggtagcggggcggcggggcgtgtgatctctccctccgcacgcatatacttacgctgccggatcgtctgttcgtgtggtgtgtgtgctgttctcttttattaatcgccgctactggtctgctcgttatgttcatcttattttatattgtattgtgtgacctcatatgaacactgttgttgtggtactagaatgcggtgtaccgatgcgggtgcctaccacacccgaaacctatacactctgttgcatcgcacacaacaggtggtacaagcgaattatgtggtgcgcttcgcctgatggttatagggggcaaggtaatcaattgagagatcgatagtcagcgccggcgtagtacgtgtgtatagctatattctcttacatcaatttataatattatgccggccgttgaacgtcgcccgtattttgttgagtgataagttgcgcgaacgcgcgtacatcacgcgagcgccgctattatagtaaactgccctgcgcgttttatattggtgaacncgggcggcgtgtctgggtggcacaccgcccctcgtgccgtcccgaggaatagagacacgtatatacactatgtatgataatacagacgcggcgcgatgtgtgttgttgggacatcctcctcaccacccccccagaatcgatatggtgtggcnacgagactgagtgagcgacatcactcacaaactatatgaatcagttctggcaaatcagcaattatccggagtgtaatttgagcagacaacgagangcgatgatattactctatngtattttgtgagacgccgagcaggtgtgtatattatatccgcccgcgcccgtgtgaatatgtatatatatatccaccccacccacgcgngaggtgtaagtatatatacatcatacattgtgtgtgcgtggaggaaacgaaataatgaatacgacggccgccgatataatgtttacgagatatatacacattgtggtctatgcaaatgngaaatgagaggagcgnccgcgcacaccaatacacacacactcatnaatagtgtagttgggtgtgctgcctcaacgacgatttagcattaacccaagagataatccataaatcgcgtgcgagcaccacgccacacaccacgcacgtactctgttgtaagcactaataancgcgtgcatgtggatgatngtgtgtatacaatgctacgtntgtatgactatacgacaaacaggagtgattggcacgcactcctgcacgccctccacccacattgtgtagacttccttaaaagataagggtgcatgtcctcacaccccttgagaacttaattggatgtgagcgcccaccctacgacgccagcgctcgcactgcgaggacaataaacacatagtgtgagangttatgatggcgtgggtggtggtattgttgtgagacacacacacaaagntgacggggcgagataatataacgtggggcgtgtgtgctagcgagcaanatcatgtgtatgacatagaactgtgtcaagaggcctcagaccgcaccgcanatagtgagaaactcattaacatatgtgcgtgtgtatatactaatcggtgattcgtcgcgggtgtctataatagtgctgcgatagatatatcatgcgtctcggcgttgctggcgtgcgcggacatcgtgacaatatcaaatacatacttacacnacgattgcgctgtgctagattctacgcgcgccgctactatctagctgtgacgtccggatattgataangcgcggcgcggcgccgtgggagataatatgagatgagataaaggcggacgctgcgagtatagcgtgctctaccggcgaatgtactctctgacnagtcgtgaatcacgtgggccgcgcgatacataacacaacgaaagttcgggggcacaacaagcgaan

SEQ ID NO: 4592 - DNA, 519 bp, Glycine max
  Peptide Sequence Number=SeqID_7268
  Probeset Number=SeqID_14371
gtgggaggtcatcctatatcggtttgttatttgttgatgacatcgtcagtgtccgtcctatagtagtcgtcgtatgcataaattcttcgtcgttttttcctagcagccgtcgttgttttcattatttcgagggcgggtttttcctaacaatagtcgttgttttcattatttcaatgacggggtatttcgtaacagctgtcgttgtttggattatttcaacgttcgtggatttcgtaaaagcttatcgttgcagggattaatttcaatgtcatggtatattgaagaccgtcgttgtttttgttaatttcaacgtcggggtgtgaggatgaccatcgttgtatggggttaatttcaacgtcggggttttaaggcgcgtcatagaaatgggaataagataatgacgggtgcctatttgacagtcgttgaatgatattccctgtgaacaaaatttgggttaaactgttcaagcagaaatcataattaaattaggaaatttttaccaaaaaaaaaaaaaaaaaa

SEQ ID NO: 4593 - DNA, 1362 bp, Glycine max
  misc_feature (8)..(10): n is a, c, g, or t
  misc_feature (15)..(15): n is a, c, g, or t
  misc_feature (204)..(204): n is a, c, g, or t
  misc_feature (462)..(462): n is a, c, g, or t
  misc_feature (534)..(534): n is a, c, g, or t
  misc_feature (624)..(624): n is a, c, g, or t
  misc_feature (820)..(820): n is a, c, g, or t
  misc_feature (849)..(849): n is a, c, g, or t
  misc_feature (874)..(874): n is a, c, g, or t
  misc_feature (997)..(997): n is a, c, g, or t
  misc_feature (1141)..(1141): n is a, c, g, or t
  misc_feature (1149)..(1149): n is a, c, g, or t
  misc_feature (1168)..(1168): n is a, c, g, or t
  misc_feature (1273)..(1273): n is a, c, g, or t
  misc_feature (1362)..(1362): n is a, c, g, or t
  Probeset Number=SeqID_14372
gtggtggnnntcgcntgtgcggcgcgccctctgtaaattatgagggcttgtagatgatgttatcaaaagtatggaagtcttctctgttgtgagggagggaccggcttctattatactatgtgtgatcgtccgcgtggtgtgtgaggtaatttacttgtatttattctttcttgtcttctcgttcttgtcttcctccctcatgtntaattaaacaaaaaaacaactagaaatcgttgtgaattatttaaaacagctctttgtcaggacaacgccacctccaccaccccggcgcccgaaaagtacctgagtacgctccagcgagcatcgtactcgtctttgacttttctattattcttgcttgacaatggttcctcctatcacctaactctggtctgagtctctcaagggcggtgctcaatgttcgcaacttattgaatgacgaagcacaagaacaaagcgaanattaggagtgcgcaactcgtcgccgctctgcgctctttctcttgtcgcgcgtctaaccttctatgtgtctgngtaaatagcgtggggacatgcctaatcccgcgtgtggcgacaggacgccacggctacgtttcgtcctccttggtatagttgttgtcgttngcctctctcattgtatgatattttgtacttcttgtgctcgcggtttagacgtctcccagatgaatataatatacaggagcgatgtagcaatgctggctacggcttatgtagttcctgtgtagtgtgtgcacgccgctcgagactgtcgattgacgaggtattaggcctcgatcatctatcctattgtctgtctatnggcttagtgtactttcgtttatcattgtnatttcaaatctatgatgtcgtaccnatgcgagtgggcggcgcttctctgagcgtcgatgcccacatgctgctctttcaatctcttattattttgcactcaacaatgcctgtctctcctcgcctctgcgatccgccacacaccgtcccntacacactcctgagtatggatcttcaccggcgcacacacatcggcgcaacgccgacgcttctgccgcggcccgacgcctagatcgctatatcgtcaggtgcgaggtgagatctcgccgcgctctgtgtttagtgtggggagatnaccacccngtgcgccacgcgcgccagnatgcactcatcacgcagtctttatgtgtattctatatatcatatatcatattattacttctatctatatacattattcgcgacttcaaacagtcagagacacagnacacctcatcttactaactgtgtgtctactctcttgtcattactctctctccgctctgttctacacgtctcgttaatatctctcgtctn

SEQ ID NO: 4594 - DNA, 866 bp, Glycine max
  misc_feature (866)..(866): n is a, c, g, or t
  Peptide Sequence Number=SeqID_7269
  Probeset Number=SeqID_14373
ttttttttttttttttttctttttttttttttttttttttttttttttttttttttcctttttttttttttttttttttttttttaacactagggaatcgggcataactcataagcatcaatctttattacccgtgggtgccctaaatcctatatatttgttacaaaaaatccaaactgtatacatattatttacccggggcaacatgttaaatttactttttacctactagttttaggagcaccgagggttaaatgcacccaactccctatcctgcataaaaaaccaatgttcaatttgaatagggggggaaaccccccccctaattaaactttcaaaggggggaattgtttttttctttcctccccccgggtttgaactgaactctttaacacttttttcaaaaacccccaggggaaaaaaagggtttaacaattttttccaggaatattcccccacttggtttgtaaggaaattccctggccccaattctgaacccccaccccccaaagggtgttttatttaaaggggcaccccccccttatggttgggcaaaaaataaatttttctggagaaaggggggggtttgaacccctaaaacccccctttgaaaagggcctcctggataaactccccttccctcttctggggaaccaaaaaagggcccctaaaaatacctttcctcacgtggcttttcccccccaaaagttccccggaatttttccgggggggagaacttcccctgggcctttgaaggcccgcggcaaataatgggaaatgttctcagaaaacccggtgtttaataccccctattattgtgtgttcccattataacgaaaaacttctgtgtattttaaccggagaan

SEQ ID NO: 4595 - DNA, 1550 bp, Glycine max
  misc_feature (1)..(21): n is a, c, g, or t
  Probeset Number=SeqID_14374
nnnnnnnnnnnnnnnnnnnnnacattctgaaatgccacaggatgacatgatattgataaattagtttttaacaaccagaagtacgtaatcttcggctgcgcatatgatcctatacacatttatttatgtacaaaaaatatattaacaacttgatcgtattgaagaacaatagaacacatctgatcaacaaataatttaaggaacagaggataaaacaaacagcccaagaatctctcgtacttcgaaacaaacttatatatacttggaatcagtcttctttttgacgaaataaatgcaggagaatgttcccttgcgcggaatattagcagagagatgccatcatttgttaacattgttctccaaatctgtctctgtaagtgggctacggtccttggaatcagactcttgttcaagctccctttcagttatgatcatttgttgatgagacaaagttgtgctcaaatcagaagcatcggacccagaaacttcaggccttgtggtttcatgttcactcattccagcagaagtatctttgatccaaccgggaaagttatccgaaagaatgctgatatactgctccattgcaacctctgcatacattttccctagccattgcaaagcattcctaccacaatgtatgtagtacaatcgttcactcaaattgagcatctttcaaccctgttatttacactatcaaccaagctatgctgtgtaaattgaacaaaacggccgcatccgttgtttccctcgttttttcaagtttgagggtttgtttcacacttttttcctttatctattggataataatccccgcttcttttaggcttttcataaagtaacggaagaatttgaaatacaggtaaccggaatataaacagaaaatgtttcattatttgaattgttaaaatttagatgaagtttatattgaaaactattcattcttttctattttatttaagtatttctcttctttttcgcttagaaccaagaagcgtcgaacaagatggaatgaagttttccatattaacaatatctatatatattgaattcaagttattattcattatgtaccattctagtctactccatttcaatctattcaatctcctctcttcccatcaagtcaagtattagcagcactatgacagtcgtatcatcgatctttctgattggtttcatatcagtccaatttttatgaatatatatatgtctttgcggaatacccagcccaatacgtcagaattggtaggtaacaacgttcgctgacaacagagccgcctaagggtatgttcattcacaagttgaaaacaatttctactttttccgaagaaaaaatcacataaataacaaaattgtggcttttaagttttatgactttgggattatgctaagtccattaaaaagggttaaactaacatgcacgaaatgtaatggtggaaatatgaagacagaaccgggttttgtttcttatctaatttagggggagtgattgaagcctatcctcttcccatcttaaatagcatatcgggggggggggctaacgtagctga

SEQ ID NO: 4596 - DNA, 480 bp, Glycine max
  misc_feature (15)..(17): n is a, c, g, or t
  misc_feature (30)..(30): n is a, c, g, or t
  misc_feature (38)..(38): n is a, c, g, or t
  misc_feature (42)..(42): n is a, c, g, or t
  misc_feature (49)..(49): n is a, c, g, or t
  misc_feature (75)..(75): n is a, c, g, or t
  misc_feature (77)..(77): n is a, c, g, or t
  misc_feature (82)..(82): n is a, c, g, or t
  misc_feature (165)..(165): n is a, c, g, or t
  misc_feature (169)..(169): n is a, c, g, or t
  misc_feature (173)..(173): n is a, c, g, or t
  misc_feature (186)..(186): n is a, c, g, or t
  misc_feature (189)..(189): n is a, c, g, or t
  misc_feature (193)..(193): n is a, c, g, or t
  misc_feature (199)..(199): n is a, c, g, or t
  misc_feature (203)..(203): n is a, c, g, or t
  misc_feature (229)..(229): n is a, c, g, or t
  misc_feature (262)..(263): n is a, c, g, or t
  misc_feature (270)..(271): n is a, c, g, or t
  misc_feature (276)..(276): n is a, c, g, or t
  misc_feature (278)..(278): n is a, c, g, or t
  misc_feature (280)..(280): n is a, c, g, or t
  misc_feature (285)..(285): n is a, c, g, or t
  misc_feature (290)..(290): n is a, c, g, or t
  misc_feature (301)..(301): n is a, c, g, or t
  misc_feature (305)..(305): n is a, c, g, or t
  misc_feature (317)..(317): n is a, c, g, or t
  misc_feature (359)..(359): n is a, c, g, or t
  misc_feature (363)..(363): n is a, c, g, or t
  misc_feature (382)..(382): n is a, c, g, or t
  misc_feature (398)..(398): n is a, c, g, or t
  misc_feature (403)..(403): n is a, c, g, or t
  misc_feature (410)..(410): n is a, c, g, or t
  misc_feature (426)..(426): n is a, c, g, or t
  misc_feature (429)..(429): n is a, c, g, or t
  misc_feature (431)..(431): n is a, c, g, or t
  misc_feature (441)..(441): n is a, c, g, or t
  misc_feature (443)..(443): n is a, c, g, or t
  misc_feature (452)..(452): n is a, c, g, or t
  misc_feature (454)..(454): n is a, c, g, or t
  misc_feature (459)..(459): n is a, c, g, or t
  misc_feature (465)..(466): n is a, c, g, or t
  misc_feature (471)..(472): n is a, c, g, or t
  misc_feature (474)..(474): n is a, c, g, or t
  misc_feature (480)..(480): n is a, c, g, or t
  Peptide Sequence Number=SeqID_7270
  Probeset Number=SeqID_14375
atatctaccatttcnnnacccaaactcagnctctcatnttcngcattcntcttctatctctgcaattcaaacacnanaaccntggcttccactaatgatcttcctcccaccggataacggacctcatcgtgagcttcggcgagatgctcatcgacttcgttcccnccgnctcnggcgggtccctcntgnaggntccggnattnctcaaggcccccggcggggcccccgncaacgttgccatcgccgtcgcgagactcggcgnnaaagcgnngttcntngntaagntcggngacgacgaggncggnacacatgctggncggaatcctgaaggagaacgtatggcgaatacgacgtggatnaacntatattaagggaccgcgcnacggaatgatatatcntttanactaganatgcgatcaaccaaangangncgtttgtggnanaaagagaancntttgngcaaannttccnngntcaacn

SEQ ID NO: 4597 - DNA, 1507 bp, Glycine max
  misc_feature (26)..(26): n is a, c, g, or t
  misc_feature (32)..(33): n is a, c, g, or t
  misc_feature (65)..(66): n is a, c, g, or t
  misc_feature (68)..(68): n is a, c, g, or t
  misc_feature (70)..(70): n is a, c, g, or t
  misc_feature (72)..(72): n is a, c, g, or t
  misc_feature (74)..(76): n is a, c, g, or t
  misc_feature (78)..(78): n is a, c, g, or t
  misc_feature (85)..(85): n is a, c, g, or t
  misc_feature (90)..(90): n is a, c, g, or t
  misc_feature (124)..(124): n is a, c, g, or t
  misc_feature (130)..(130): n is a, c, g, or t
  misc_feature (166)..(166): n is a, c, g, or t
  misc_feature (214)..(214): n is a, c, g, or t
  misc_feature (335)..(335): n is a, c, g, or t
  misc_feature (491)..(491): n is a, c, g, or t
  misc_feature (680)..(680): n is a, c, g, or t
  misc_feature (743)..(743): n is a, c, g, or t
  misc_feature (874)..(874): n is a, c, g, or t
  misc_feature (880)..(880): n is a, c, g, or t
  misc_feature (882)..(882): n is a, c, g, or t
  misc_feature (905)..(906): n is a, c, g, or t
  misc_feature (969)..(971): n is a, c, g, or t
  misc_feature (1020)..(1020): n is a, c, g, or t
  misc_feature (1101)..(1101): n is a, c, g, or t
  misc_feature (1103)..(1103): n is a, c, g, or t
  misc_feature (1180)..(1180): n is a, c, g, or t
  misc_feature (1197)..(1197): n is a, c, g, or t
  misc_feature (1231)..(1231): n is a, c, g, or t
  misc_feature (1333)..(1333): n is a, c, g, or t
  misc_feature (1372)..(1372): n is a, c, g, or t
  misc_feature (1399)..(1399): n is a, c, g, or t
  misc_feature (1406)..(1406): n is a, c, g, or t
  misc_feature (1450)..(1450): n is a, c, g, or t
  misc_feature (1465)..(1465): n is a, c, g, or t
  misc_feature (1501)..(1501): n is a, c, g, or t
  misc_feature (1507)..(1507): n is a, c, g, or t
  Peptide Sequence Number=SeqID_7271
  Probeset Number=SeqID_14376
ttaagttgtgtccttcccttctcttnctcccnnccccgcccgcgccgcgcttccctttccttctnnangngngnnngngaaaacnggtgngttatttggggaacaaaaccaataaatgtgagcnagactnctatctattgtgagtccttccccccacaccaacacngagaaacaataaggagactcgctctgttgttcgtctcccttttctacnccccaccagcccctccccttccgcccctctctcatctttaaccatgtatttcttctgctgctcccatcaaacaatgtcgtgtatctcgcagcatgtgtgatcgcttctgcgccgtgagagnggctgggtgtgctcgcgctgttgtgcggtggctggatacaagcgtccccatccgtgtttggatacgtgatctattgtatgttttatattcttcttgttaaatatatatccgtatttctcacagtatacactatactgtaaatgatcatccaaaatntaaacagtgggtgaggaatatgttgtataccttggtatgtttcagtcagtgcgttaccttatgatcatgattgctcagcgcgtatatttttaatatgattaaattttacaagattaggtgcgaagactgcgatgagatagtgggttgagttaaatataaagaggacgtgtgatatacaatatccacacnctatacaaaatggtgaagaataactaacattacttatattaaccgatgcgggatctcgattcncgtgtaaattcgtgcatatcaatccactctatgtatatgtaaacttcctcaggtctcccacacactcttcgcgcgtttaatatatgtggtggatcatgagatatgatatgagatggggtggtggtgcatgnaagagngnggcacatctccctgtattattannacaccccacccccctatgtgttggtgtggtgtctctctctcccccccacccctactacccccnnnacaaccgaggaggatattattacaacattattaattatactcttttcantcgattctgcggatgtcgccgccacgtggcagttatgtactcaatataataaaagatgggtgcgcgcgtgctgaaaatcancncgcgggagctcgctcaccgagaagcgcgcgctctcgacgacgacgcttggcggtcgtgggcgcatcttgaccagatnaaactcactcacactcncgttcgcatcctctcatgcatacttcgcacgcgncgcctcgagtgtgatatatatcatcgcagcgctgctgcgacgcctgtcaccatccctaacaccttactcgcttcttatctgtttgtgattcacacacacccnactgcacgactcatatctatctatctactccgccgctcntgttgtgacgcctcgtttcacgctgtntattacnacttagcacccgtgcgctgcgtgctcgcgatgaactacatccanacgcagcactcgcgngctctctcactctcacgttgtgtctcgtactctgancgccgn

SEQ ID NO: 4598 - DNA, 1703 bp, Glycine max
  misc_feature (227)..(227): n is a, c, g, or t
  misc_feature (229)..(229): n is a, c, g, or t
  misc_feature (568)..(568): n is a, c, g, or t
  misc_feature (592)..(592): n is a, c, g, or t
  misc_feature (642)..(642): n is a, c, g, or t
  misc_feature (700)..(700): n is a, c, g, or t
  misc_feature (824)..(824): n is a, c, g, or t
  misc_feature (838)..(838): n is a, c, g, or t
  misc_feature (909)..(909): n is a, c, g, or t
  misc_feature (947)..(947): n is a, c, g, or t
  misc_feature (1064)..(1064): n is a, c, g, or t
  misc_feature (1073)..(1073): n is a, c, g, or t
  misc_feature (1147)..(1147): n is a, c, g, or t
  misc_feature (1261)..(1261): n is a, c, g, or t
  misc_feature (1263)..(1263): n is a, c, g, or t
  misc_feature (1498)..(1498): n is a, c, g, or t
  misc_feature (1534)..(1534): n is a, c, g, or t
  misc_feature (1536)..(1536): n is a, c, g, or t
  misc_feature (1554)..(1554): n is a, c, g, or t
  misc_feature (1556)..(1556): n is a, c, g, or t
  misc_feature (1559)..(1564): n is a, c, g, or t
  misc_feature (1577)..(1578): n is a, c, g, or t
  misc_feature (1581)..(1581): n is a, c, g, or t
  misc_feature (1599)..(1599): n is a, c, g, or t
  misc_feature (1602)..(1603): n is a, c, g, or t
  misc_feature (1641)..(1641): n is a, c, g, or t
  misc_feature (1643)..(1643): n is a, c, g, or t
  misc_feature (1651)..(1651): n is a, c, g, or t
  misc_feature (1660)..(1660): n is a, c, g, or t
  misc_feature (1662)..(1664): n is a, c, g, or t
  misc_feature (1666)..(1666): n is a, c, g, or t
  misc_feature (1675)..(1676): n is a, c, g, or t
  misc_feature (1679)..(1680): n is a, c, g, or t
  Probeset Number=SeqID_14377
cgcggtcgcatatgtgatcggatgatcacgattcgcgtggtgatgagaagcgtgcggtggcggtcgtcctcggtatattcggtgcgaactctgccaatatcgttgatgtctaggctgcaccaatagcagaaggtggtggtggagtgtcgcattacgaaagtatatgacacgaatgtgtgatgagatgtaacggtgtctccttacttgatgtagttatatgaatattntntgttgtatgttgtgacggatcgtgtgttgatgccgtgatcaccgtttcatttcggacgtcgtgagagttgtatcacatagcagatatatgaattgaatgtctctgtcgtggtgatagatcactccatgcgagtattggtgagagtaggcgacaggtgctgagcgcatattatatatccgaatgagacacacacgctcagccgcgtcgcgatcgaagacgtgaggtagtgggcgcgtgagggtgttgtggtgatggttgctaggcgtcgagagtaggatgagtgatcggcgatagtaatgatcgtgattgtgactcgttattactctagcctcagcacancatcgtatatatcatatgcatgtncacgccacgcacggtctgagtgtgcggagcgagtaaagtgtgtcgtcggncatacacagcggtggtatgcggtgtcgtattcttactacagttactgtctagttatanaatacagtcttactgtatttgctaattactatctctgatgtaagtattgatacactatgatggttagtgatagtatatctagagtctagagtacacatagtgctactattgccatgatgcgcgngcagtcgcgcgtgnattattgatgtagcgatatcgtttcgtattctctgtattatatatagtattctatactctattacgtgatntctatacataacgtattacgcgcgtattatacatacgngaacgtgagtggagtatctacgtagacactgggagagaatacagatatatatcgagtagaagagaagatcgcggcgcagacgtatgagtaatcgatctgccgatatagccataattnaataatcanaacaatgtatagcatatagcgatctcgtgagtagatatgaagagtagcaaaatacgagtgaagagatgtatgangacatgcagtagtagacatagggtggatataagtctggcgatgttatagtcagtttgtcagacatatgacatgtctttgagagtgtagtgtgtgtgtgctcatatattacattntnaggtagggttgatactatacgctccagtccctgcaacgagccgcggtgctgagagaggcgtgtgtgactagctacgtatgtgcaggtatataatgattacatggtgttcgatattgttaatcatgattacattatcatatcctctgatccacattattctatatcacaacacacatagtatgagagatgatatcaatttaagtagatattgatatgagcaggagtagataatagnagtaacagtagtggagagttgggtagtatatatgangngctgcgagtgggcgtggnanttnnnnnnatcaggaggggtnntanaatattactctacattancanntatctcccacaaatacgtcttgtcgtggtagggtgtgntntaatgtangtcattatnannngncgccgcaannaanncgcaacccccccccacccccccc

SEQ ID NO: 4599 - DNA, 1657 bp, Glycine max
  misc_feature (1)..(1): n is a, c, g, or t
  misc_feature (4)..(4): n is a, c, g, or t
  misc_feature (13)..(13): n is a, c, g, or t
  misc_feature (15)..(15): n is a, c, g, or t
  misc_feature (26)..(26): n is a, c, g, or t
  misc_feature (31)..(32): n is a, c, g, or t
  misc_feature (38)..(38): n is a, c, g, or t
  misc_feature (41)..(41): n is a, c, g, or t
  misc_feature (52)..(52): n is a, c, g, or t
  misc_feature (58)..(59): n is a, c, g, or t
  misc_feature (66)..(67): n is a, c, g, or t
  misc_feature (74)..(74): n is a, c, g, or t
  misc_feature (85)..(85): n is a, c, g, or t
  misc_feature (92)..(92): n is a, c, g, or t
  misc_feature (102)..(102): n is a, c, g, or t
  misc_feature (112)..(113): n is a, c, g, or t
  misc_feature (123)..(123): n is a, c, g, or t
  misc_feature (128)..(128): n is a, c, g, or t
  misc_feature (145)..(145): n is a, c, g, or t
  misc_feature (201)..(201): n is a, c, g, or t
  misc_feature (209)..(209): n is a, c, g, or t
  misc_feature (229)..(229): n is a, c, g, or t
  misc_feature (249)..(249): n is a, c, g, or t
  misc_feature (267)..(267): n is a, c, g, or t
  misc_feature (274)..(274): n is a, c, g, or t
  misc_feature (277)..(277): n is a, c, g, or t
  misc_feature (279)..(279): n is a, c, g, or t
  misc_feature (329)..(329): n is a, c, g, or t
  misc_feature (339)..(339): n is a, c, g, or t
  misc_feature (372)..(372): n is a, c, g, or t
  misc_feature (383)..(383): n is a, c, g, or t
  misc_feature (409)..(409): n is a, c, g, or t
  misc_feature (468)..(468): n is a, c, g, or t
  misc_feature (474)..(475): n is a, c, g, or t
  misc_feature (483)..(483): n is a, c, g, or t
  misc_feature (488)..(488): n is a, c, g, or t
  misc_feature (501)..(501): n is a, c, g, or t
  misc_feature (575)..(575): n is a, c, g, or t
  misc_feature (634)..(634): n is a, c, g, or t
  misc_feature (641)..(641): n is a, c, g, or t
  misc_feature (649)..(649): n is a, c, g, or t
  misc_feature (666)..(666): n is a, c, g, or t
  misc_feature (688)..(688): n is a, c, g, or t
  misc_feature (709)..(709): n is a, c, g, or t
  misc_feature (879)..(879): n is a, c, g, or t
  misc_feature (971)..(971): n is a, c, g, or t
  misc_feature (974)..(974): n is a, c, g, or t
  misc_feature (1228)..(1228): n is a, c, g, or t
  misc_feature (1272)..(1272): n is a, c, g, or t
  misc_feature (1295)..(1295): n is a, c, g, or t
  misc_feature (1468)..(1468): n is a, c, g, or t
  misc_feature (1500)..(1500): n is a, c, g, or t
  misc_feature (1577)..(1577): n is a, c, g, or t
  misc_feature (1606)..(1606): n is a, c, g, or t
  misc_feature (1635)..(1635): n is a, c, g, or t
  misc_feature (1644)..(1644): n is a, c, g, or t
  Peptide Sequence Number=SeqID_7272
  Probeset Number=SeqID_14378
ncgncgtcgacgnanctcgtatgagncgtannaccggncgncgggacgacgncgcgannccggagnngcgctgngtgcgtcacgncgacgangtggcagcancgcagcgcgnngtcgtctgtntgcgncgacgcgtcgcgcgagncgtgacgcgcgacgacgtacgcgcgctgcgcgagagagcagcgcgcacgcgctcancgcgctgncgaggatatgcacgttctanggtcgtcgcggatcgcgcgnaggcagcacatcacgcgntcgcatncgncngtcgatgtgcgatgccgtagcagctgtcgggtgcgcgcatctcgagtcanggggtcgtgngtcgtcccgtgcgcgcatcgcacctcacctcgncagcagtctgncgaggacgcgcgcgaacgagagactntcgctgacatgtctgcgacgctacgcgcacgcgagcgactcaatgacgcgcgtcgtcgncggcgnngtgcgcgncgtgngtgcggcgcgcanccgatgcgcgtggacgcgcgagtgcagatcgcacgtgcgcgatgcgacgtgtattctcatgagcgcgggactgncgtcgcgcagcgacggtcgtgtcatcgtgcgacggagcggatcgcgagcgactcgaganctgcganccgtagcnctcgtgcctgctctcgncggttaccgcggtcggactctngcgcactcgcgccgatcgctnccggggtgacgacgtagatagcacgcgatcactctcgtagcgatgcatctcgagtggagaggtggagaaggcggcgcgactacggcatgcagtgtgtgtagagttcagagcatcgagcagcgacggtctccgagtcgtagagtcgaggcgtagcatggtgtcatcgtcgnatcgccagcacgcgaacatcgtcgcggcagagcggagccgtggcgcgactgccgtgtgcgcgcgaggtatagtaggcggcctacgcggcctncgncgcggggccggtgtgtggcgtcgagacatgctgcagcgctcacgctgccgaggcgcgtcgcgccgtcgggatgcggcgcgttcgcggcgactgggcgggtgtgcagagagggcgggacgcggacgcttcagtctgatcacgcacgagcgcagactgacacgtacagaactgagtagagacgtgctcacttctgtgataggtgtcagcggcccgctagtgtagttgtgagcaagtatatgtagcgcctttcggtncgcttctcactgataactagctctgatagtagagcataatttgntcgtataataggagattatacanatatactgctagctatctagacgagacagcgatagatcgtcgtcgcgccactcggatggcgcgagaacaatagtcggacggtggaggtgtgggcgtgcgacgtagctcacagaggaggcatactataagcaggtctgtggatgaagttttcatgtcgggcggagagagcacgngtatctgcgtgactaggagtgtgtgtgtgttngatgttaggagaaggtcgtgctgtcatgtgcgcggcggatcctccggcagttcttgctctactatttgcgagatagnggcgaggtcgcgcgcgtcaactactcttntgtagtgagtagtggaacggggagggagnggggaggtnggtcgtggcgcgc

SEQ ID NO: 4600 - DNA, 351 bp, Glycine max
  Probeset Number=SeqID_14379
tgtttgtgcattcgggatgtggccgtcttgtcctcctgtcgcttctcagggatgcactttgcgctgttactagtgctgactggtccgggctttctggctcatccttctgtttccggggttgtcgcctgtattctccaccgacctgtggtctcatgtatggcccttctggcgccgttttttcgcattttctccccgtcttcattgggttgcccggggggcccttttggcgaccctggtcggctccttctcccagtctgaccagggatgctataagttcccacctcattggctcatttccatcatgttctatcatctagtcagtttttgttttgaacaaatattagaacttag

SEQ ID NO: 4601 - DNA, 1613 bp, Glycine max
  misc_feature (1)..(1): n is a, c, g, or t
  misc_feature (101)..(101): n is a, c, g, or t
  misc_feature (107)..(107): n is a, c, g, or t
  misc_feature (210)..(210): n is a, c, g, or t
  misc_feature (270)..(270): n is a, c, g, or t
  misc_feature (283)..(283): n is a, c, g, or t
  misc_feature (433)..(433): n is a, c, g, or t
  misc_feature (676)..(676): n is a, c, g, or t
  misc_feature (820)..(820): n is a, c, g, or t
  misc_feature (863)..(863): n is a, c, g, or t
  misc_feature (868)..(868): n is a, c, g, or t
  misc_feature (870)..(870): n is a, c, g, or t
  misc_feature (875)..(875): n is a, c, g, or t
  misc_feature (896)..(896): n is a, c, g, or t
  misc_feature (913)..(913): n is a, c, g, or t
  misc_feature (917)..(918): n is a, c, g, or t
  misc_feature (946)..(946): n is a, c, g, or t
  misc_feature (993)..(993): n is a, c, g, or t
  misc_feature (1019)..(1019): n is a, c, g, or t
  misc_feature (1035)..(1035): n is a, c, g, or t
  misc_feature (1151)..(1151): n is a, c, g, or t
  misc_feature (1234)..(1234): n is a, c, g, or t
  misc_feature (1281)..(1281): n is a, c, g, or t
  misc_feature (1331)..(1331): n is a, c, g, or t
  misc_feature (1333)..(1333): n is a, c, g, or t
  misc_feature (1364)..(1365): n is a, c, g, or t
  misc_feature (1372)..(1372): n is a, c, g, or t
  misc_feature (1378)..(1378): n is a, c, g, or t
  misc_feature (1386)..(1386): n is a, c, g, or t
  misc_feature (1409)..(1409): n is a, c, g, or t
  misc_feature (1502)..(1502): n is a, c, g, or t
  misc_feature (1516)..(1518): n is a, c, g, or t
  misc_feature (1527)..(1527): n is a, c, g, or t
  misc_feature (1545)..(1545): n is a, c, g, or t
  misc_feature (1572)..(1572): n is a, c, g, or t
  misc_feature (1575)..(1576): n is a, c, g, or t
  misc_feature (1578)..(1579): n is a, c, g, or t
  misc_feature (1582)..(1582): n is a, c, g, or t
  misc_feature (1588)..(1590): n is a, c, g, or t
  misc_feature (1595)..(1597): n is a, c, g, or t
  Peptide Sequence Number=SeqID_7273
  Probeset Number=SeqID_14380
nctagcagacgacaccagagctaagctgaaactacagcacagatagtcggctacgatacagtacgcagaagagagaggagggtagacaatatagatcagantggatngacatcaagagtatagtagtatatcatatatttagcatatatactgtattatgatgcatataataatcataggtagtgaaggtgagatatgagtctcacgtgngcatcacataacagccactctctgttgtggttaagggcgatgatcttgagtgtagatcgnatcttataaacgnggcatgtgtgagcatctagtaatgtatcatcatgcactatatttatacacagctagccatgataattgacgtagactcttatatagaatgagtatgagatgcggttaaacacgtacaccgaggagcacgatgagtggaagtgcgcaggangatatgaacactaacgagaggtgtgtatgtacacgtagacgttatgtcagtgcgcgcaaataagagtggagaagagcgacgtctgctcgatactatatgtgtttatgtgtgttcctatcgtcggcggtgtatgatagatcttacatcgtatatagaagtggagaacatggcagtagcattatatgagagacgacgccggggatgtgcggtgagtgaggatgtctgtctgttgtcggtgtcgtncttttttacttttatacattctactggtataacactgagatgattctacgcataataatcactgcatcataagtaatcaatagtgatttgatgtaagtaatactcttgggtggtggactgacttcacatgcgcgagagtgatanattgtgtatgtttgtagtgttatgtttgagtcatcacacctanattancnaagancatcacaacatcatcaccgcngcacaacaaccacaccncccnnatcatcgaggagtggaggccgagacgancttgccgagcaccagatatgtattcactcattacatttttaccagcnagtcaacattatggtgtggttcacanttcttcaatattacantctctcgtatagtcgttctttttggattccgactgttgtagtgttgttatgtctcgttcgtgtattagaatgtttgttaaacgatgccgcgcgcatccacgcacagcggcgaacantacatcgctgatactgagagtagcgcgagcgtcgcagatcggcggcgcgcgtgcgaagcctgagagtgtgtatgttactgctntcgtaagtgttactagtgatttgtttctattcccgcaactggtaggnatgatacaaatcgagtgatgttgtgggcgttctgcggtatatctggtatntnttcctgctgcccggacctatgtgtattatannatgtgtncttgtnctatcttnttggaggcgatatacaacccatncctctctcgtgcctcctgctaagtatacgtacaatattgacaatacaatacctatccctgtgtgaaagaggtgtgagcagtgcgcagtcaagncacacaattcggcnnnctcattctnggcttcggtgtgtgtgtngtggttgtgaggtagatattataattntannannaanaaaaannnaaaannngggagcacacacaacc

SEQ ID NO: 4602 - DNA, 429 bp, Glycine max
  Probeset Number=SeqID_14381
gcccagattcacatccttcgagaagattcacatcattttcccagttatggattggcaaggacagaaactagcggagcagctgatgcagatactgctcttgatcgccgccgtcgtggcgttcgtcgttggttacacgacggcgtcgtttaggacgatgatgttgatttacgcgggaggcgttggtgtcgcgacgttgatcacggtgccaaactggccattcttcaaccgtcatccactcaagtggttggatccaagtgaagcggagaagcatcctaaaccggaagtcgatgttagctcgaagaagaagtcatctaaaaagtagcacaatcttcttttgtaatctctcttatttttctagacctttgatataaaaaaagacatgttctggattttgcttatgaataagatagtctaaatgacataataatt

SEQ ID NO: 4603 - DNA, 367 bp, Glycine max
  misc_feature (280)..(280): n is a, c, g, or t
  misc_feature (290)..(290): n is a, c, g, or t
  Peptide Sequence Number=SeqID_7274
  Probeset Number=SeqID_14382
caattatgaatgtaaccctgacgatacatgtggcacatattatatattgaccgacataacagcatttggtcgaataatagcatgcccaacaggaaatgaaagataccctctcactgcggtgcaatctcgcaatgagctcgacacagggattggaacaatcatctcgtgcccatttcgaatccgttttatcgccgaaggcaatcctttgagacttaagatcgattcattagcagttataatgctgtgtgttggaattactaccgagtggtctgttgtggangatctaccanaaagaccctgctgtcaaaattgtgagaaacaagatgcagcggatgggttggttttaattgatagacttcctcctgat

SEQ ID NO: 4604 - DNA, 1819 bp, Glycine max
  misc_feature (18)..(19): n is a, c, g, or t
  misc_feature (25)..(25): n is a, c, g, or t
  misc_feature (27)..(28): n is a, c, g, or t
  misc_feature (34)..(37): n is a, c, g, or t
  misc_feature (64)..(65): n is a, c, g, or t
  misc_feature (145)..(145): n is a, c, g, or t
  misc_feature (228)..(228): n is a, c, g, or t
  misc_feature (291)..(291): n is a, c, g, or t
  misc_feature (326)..(326): n is a, c, g, or t
  misc_feature (359)..(359): n is a, c, g, or t
  misc_feature (448)..(448): n is a, c, g, or t
  misc_feature (467)..(467): n is a, c, g, or t
  misc_feature (469)..(469): n is a, c, g, or t
  misc_feature (523)..(523): n is a, c, g, or t
  misc_feature (531)..(531): n is a, c, g, or t
  misc_feature (533)..(533): n is a, c, g, or t
  misc_feature (606)..(606): n is a, c, g, or t
  misc_feature (651)..(651): n is a, c, g, or t
  misc_feature (676)..(676): n is a, c, g, or t
  misc_feature (869)..(869): n is a, c, g, or t
  misc_feature (945)..(945): n is a, c, g, or t
  misc_feature (1012)..(1012): n is a, c, g, or t
  misc_feature (1119)..(1119): n is a, c, g, or t
  misc_feature (1183)..(1184): n is a, c, g, or t
  misc_feature (1186)..(1186): n is a, c, g, or t
  misc_feature (1227)..(1227): n is a, c, g, or t
  misc_feature (1279)..(1279): n is a, c, g, or t
  misc_feature (1282)..(1283): n is a, c, g, or t
  misc_feature (1285)..(1285): n is a, c, g, or t
  misc_feature (1295)..(1295): n is a, c, g, or t
  misc_feature (1360)..(1360): n is a, c, g, or t
  misc_feature (1362)..(1365): n is a, c, g, or t
  misc_feature (1367)..(1367): n is a, c, g, or t
  misc_feature (1375)..(1375): n is a, c, g, or t
  misc_feature (1457)..(1457): n is a, c, g, or t
  misc_feature (1464)..(1464): n is a, c, g, or t
  misc_feature (1468)..(1468): n is a, c, g, or t
  misc_feature (1475)..(1475): n is a, c, g, or t
  misc_feature (1522)..(1525): n is a, c, g, or t
  misc_feature (1591)..(1591): n is a, c, g, or t
  misc_feature (1624)..(1624): n is a, c, g, or t
  misc_feature (1630)..(1630): n is a, c, g, or t
  misc_feature (1677)..(1677): n is a, c, g, or t
  Peptide Sequence Number=SeqID_7275
  Probeset Number=SeqID_14383
taaaggaactcacacgcnncacccncnnagaacnnnntaccgctagaagaagcactacagtggnnaggagaggaggctacaaagtcctcgagaagctcctcgcacatctcgcgatcgccgcaggcccgcgcagacacgatacaantcatttgagttattagcctgcgcagtaggactcaggcacgaggtgagtggccagatgaatctaccctctgtctcgcttctaangcaccaaacagctgcataccactctctctcacagcccactcgccctgtctacgtgctcacatngtccagccgcgtactctccaagtctgtcgtacgtntatcgtagtagccgactcttatactaccagcgnccgcagccactctctcagacatcataagatcaatgctgcaagcgtacgctcagcagcaacacacacattagtgagacttaatagatcanatctgctgcgctgctaccngnggtcgcgtctagagtcggagtaacggcgatattgtgatgtcgacgttgagccgnacttatcntntttcacagattgtgtgactaattatcgatgtaaacacatactccctctatcactcctcatcctacatgccctntcatcctctctgtaactcatcacgtatagctgcacaatgtatcgnctgctcgactcttagatacgtctanatagtcgatacgagaatacgtgcaggactgactactctcacacaacatagtatcaaatatgatagcattaacaagatcgcccatctctcgctacttcgtctctgccgacgagagcggactagtatcatacccagtacatacgatcgacacaacatggacaaacatgagagatacgtctagctcttgcctctangatatatcttatatagagatatgcatggactgagctgacgcgagtagcgctatgcatcgagctgagtaagagtctncggcgccgtgtatatgttgttgcgctcatacacaccaccagcgcagacgatacgctaaggatgcctnaatagtagcgacgagcgcttcgatcgctacaagaagtgcgcgttgtgctagctcatcgtctgcatgacatcaccactactctacagacatatagtagatgtgtgtcnatacagacgagtatcagatgagctaacatacgatcacgagatcactgttcgtgctcgcgcactnntnttcgtagtgatgtatgtcatggagtcgtacgtgaagtatangtacggattactaatctacaacacgctatctcgcagcactcgacgatctgtngtnntntcgcgccccnactgacggtgacgacgcattgactggagtcggaggatcgtgacgacgcacaggcatgtctccacnannnncntgcatagngacgcttgagatgcgacatgagcagctatcacttctatataactcaatacgtcgattcaaggcgcgtgagcgagatgagtgngatcgancgangtgtgancgttacactagtgggtaatgacactcgtatacacgtgttgctcgctnnnncgtgtgtctcgagaccgatatcgactatgtagatgtatcgctaacgctatcttatatgatcagaancacgactgaggccacgtctcagcataatactangtaganatgatggtgtgtacgtctagttagagaaactactcaatacgacgcantatgtgatatgcgccattgatgatgagttagcgtacatccagatactatactactcacagtgatagacgtgtacatctctgagtagacgtatacatcgctcaatcgtcagacacgatgatagtcgactaacgagtcgtgtcg

SEQ ID NO: 4605 - DNA, 1659 bp, Glycine max
  misc_feature (1)..(1): n is a, c, g, or t
  misc_feature (23)..(23): n is a, c, g, or t
  misc_feature (60)..(60): n is a, c, g, or t
  misc_feature (282)..(282): n is a, c, g, or t
  misc_feature (593)..(593): n is a, c, g, or t
  misc_feature (798)..(798): n is a, c, g, or t
  misc_feature (810)..(810): n is a, c, g, or t
  misc_feature (821)..(821): n is a, c, g, or t
  misc_feature (883)..(883): n is a, c, g, or t
  misc_feature (949)..(949): n is a, c, g, or t
  misc_feature (1032)..(1032): n is a, c, g, or t
  misc_feature (1066)..(1066): n is a, c, g, or t
  misc_feature (1085)..(1085): n is a, c, g, or t
  misc_feature (1094)..(1094): n is a, c, g, or t
  misc_feature (1113)..(1113): n is a, c, g, or t
  misc_feature (1148)..(1148): n is a, c, g, or t
  misc_feature (1238)..(1238): n is a, c, g, or t
  misc_feature (1250)..(1250): n is a, c, g, or t
  misc_feature (1306)..(1306): n is a, c, g, or t
  misc_feature (1340)..(1340): n is a, c, g, or t
  misc_feature (1407)..(1407): n is a, c, g, or t
  misc_feature (1411)..(1411): n is a, c, g, or t
  misc_feature (1433)..(1434): n is a, c, g, or t
  misc_feature (1614)..(1614): n is a, c, g, or t
  misc_feature (1627)..(1627): n is a, c, g, or t
  misc_feature (1634)..(1634): n is a, c, g, or t
  misc_feature (1636)..(1636): n is a, c, g, or t
  Probeset Number=SeqID_14384
nccagtatgcaaagtagatgagnagctagacgactgggtcatacgcagcgtgagacatgngctccccgtggtcgtcgatctgtacattatgaaggttcccggtgatacacatactgacgacgatgatatatcgctcatttcgctacgagacggtcccttctcaagacggccatcgattcgacacccgacggtatacagcacaccggcagcacgcacgcatgtctatgtatgttctttgtgtgtagcgatgtctcttatacagtatctcttgttctatgatantagcatagtcgatatgtcgtgctgacactgcacaagaccttaactttacacaagacatgattataatccatcataatatataatctatattcttcttactattacgaacaacacacacactatcattctatatatgatatcatggagcgctaccatctattctacataatacaatacattccagtacacgtcgctataatatacagccactatacacaaataatcatcgcataaattactcccgcaccgcatacaacacacatatataattcttcaacttaggattatatcatatcgagtatctcgtgaantctgttgttacttcatattttcactacttatcattgtgtgtggattaagttgttcatgtctgtagcattcatgttatatatagagcttctctaacatatcggtatgcgcgcaggatgcagagtgtcaacaatatagaatacgattgcattatttcataataaagttctttatattcttgtgtatattcatttcacgttatcgtcntgtatttctctnacaatacatancacctgagaacatgtattatgtaaatggcactcatgaatattatacacagcctgacttatanatatgtcgttactatatgtatatacatgatcacgctcggcaccgaccgccggcgcaccggcggctncgtgtgtgtgagtttgtcctgtggaccgagatggcgctagtgatatagaggagggagggtaatagatacttattatgattggngggttgcgattttttctttgttgtatcttctcgngttgtttggtgctttgttnctttgcttncgataatataacacaaganggtcatataatagaaacaatagcatagtcatatancatcctatctatatatttgtcctacgctcactcgtctctctctctcatattctccttcccctttctccgttccctcactctgcctcttcntcctcgctcacnacaactcacattcttcgcctcatcgacatacgtgccatgcctgtctccttctacgnagcgctggcagaccgtctatacgccactacaccntgttccgagcgcgtctcacaaataatagactcaatattggcaatacaaacacacacatatattaagntatnctctctatcactatcacctatnnatatatatataactaaaactacaccacttctagtgtacggagattagagaaacaggactatattaaaactacaaaacacaacacatacctacccttcaagtatacgaacgaacacattatatcgatagaagaaactcaccacggaacacatgaaagaaccagaccaagcaccacgccggnaacacaccccacnccagccngnacaccaacacaccccacgatcca

SEQ ID NO: 4606 - DNA, 465 bp, Glycine max
  misc_feature (422)..(422): n is a, c, g, or t
  Peptide Sequence Number=SeqID_7276
  Probeset Number=SeqID_14385
actcgattaattcctcacagtcacaggattctcatctgagaagctatgggttggaaagctgctgagaaactcatcagacattggaagatacttcgtggagataatgtaatgataatccgcgggaaagataagggtgagactggaaccattaagcgtgtcatcagatcccagaaccgcgtcattgttgaaggaaagaatctgatcaagaagcatataaagggaggccctgatcatgaaggagggattttcacggtagaggctcctcttcacgcctcaaatgtccaagttgttgatcccgtcactgggaggccttgtaaggttggtgtaaagtacctagaggatggaacaaaagtaagagttgccagaggcacaggcacctctggttccataatccctcgtccagagattctgaagataaggantacaccaagacccactactgctggacctaaggacacgccaatg

SEQ ID NO: 4607 - DNA, 1710 bp, Glycine max
  misc_feature (1)..(15): n is a, c, g, or t
  misc_feature (20)..(30): n is a, c, g, or t
  misc_feature (39)..(40): n is a, c, g, or t
  misc_feature (48)..(48): n is a, c, g, or t
  misc_feature (50)..(53): n is a, c, g, or t
  misc_feature (55)..(58): n is a, c, g, or t
  misc_feature (60)..(60): n is a, c, g, or t
  misc_feature (63)..(70): n is a, c, g, or t
  misc_feature (72)..(74): n is a, c, g, or t
  misc_feature (86)..(87): n is a, c, g, or t
  misc_feature (89)..(89): n is a, c, g, or t
  misc_feature (96)..(98): n is a, c, g, or t
  misc_feature (101)..(103): n is a, c, g, or t
  misc_feature (109)..(110): n is a, c, g, or t
  misc_feature (114)..(114): n is a, c, g, or t
  misc_feature (116)..(118): n is a, c, g, or t
  misc_feature (122)..(123): n is a, c, g, or t
  misc_feature (127)..(127): n is a, c, g, or t
  misc_feature (130)..(132): n is a, c, g, or t
  misc_feature (141)..(144): n is a, c, g, or t
  misc_feature (146)..(147): n is a, c, g, or t
  misc_feature (156)..(156): n is a, c, g, or t
  misc_feature (159)..(159): n is a, c, g, or t
  misc_feature (163)..(167): n is a, c, g, or t
  misc_feature (172)..(172): n is a, c, g, or t
  misc_feature (174)..(179): n is a, c, g, or t
  misc_feature (181)..(181): n is a, c, g, or t
  misc_feature (186)..(187): n is a, c, g, or t
  misc_feature (193)..(194): n is a, c, g, or t
  misc_feature (200)..(200): n is a, c, g, or t
  misc_feature (202)..(202): n is a, c, g, or t
  misc_feature (205)..(207): n is a, c, g, or t
  misc_feature (668)..(668): n is a, c, g, or t
  misc_feature (848)..(848): n is a, c, g, or t
  misc_feature (1062)..(1062): n is a, c, g, or t
  misc_feature (1290)..(1290): n is a, c, g, or t
  misc_feature (1353)..(1353): n is a, c, g, or t
  misc_feature (1374)..(1374): n is a, c, g, or t
  misc_feature (1400)..(1400): n is a, c, g, or t
  misc_feature (1404)..(1404): n is a, c, g, or t
  misc_feature (1443)..(1443): n is a, c, g, or t
  misc_feature (1449)..(1449): n is a, c, g, or t
  misc_feature (1452)..(1452): n is a, c, g, or t
  misc_feature (1464)..(1464): n is a, c, g, or t
  misc_feature (1466)..(1466): n is a, c, g, or t
  misc_feature (1468)..(1470): n is a, c, g, or t
  misc_feature (1478)..(1478): n is a, c, g, or t
  misc_feature (1514)..(1514): n is a, c, g, or t
  misc_feature (1521)..(1521): n is a, c, g, or t
  misc_feature (1526)..(1526): n is a, c, g, or t
  misc_feature (1530)..(1531): n is a, c, g, or t
  misc_feature (1537)..(1540): n is a, c, g, or t
  misc_feature (1589)..(1589): n is a, c, g, or t
  misc_feature (1612)..(1612): n is a, c, g, or t
  misc_feature (1635)..(1635): n is a, c, g, or t
  misc_feature (1642)..(1642): n is a, c, g, or t
  misc_feature (1710)..(1710): n is a, c, g, or t
  Peptide Sequence Number=SeqID_7277
  Probeset Number=SeqID_14386
nnnnnnnnnnnnnnnggggnnnnnnnnnnnttttttttnngggaattngnnnnannnntnatnnnnnnnntnnnttattatatatnntnattaacnnncannnattacnntacnannnaaanntttnatnnnaatattaannnnanntatattttngtnttcnnnnntactntnnnnnntncaatnnacattnncctccnangcnnnatcgacctgacctaccaaccctcacctcatcgacctcacctcgatctcgcgactgccaccccacgctccgcctcgagtccctctacccgctcatccctctacccccacatctcaacctgcccccgccaccctccacactccaaccacccaccactcacgcctacaccgccaacccaccccaagacccacctcacctatcccaccacacacaccaccacccaccccaacagtccaactcctagacagcccaccacccctacccctacctgccaccccccacacttaccccatgtctactccaccctccacccaccacccctagtcgccaaccacgacccctcacatcccttgtacccacaccatacatactccccactccacacacgaacctactacacccgtcacccgcccgactcaaccctctataacgctccaccaccctaccctcacacccggacccncactcgcttgacctcaacccatctatgaacaccacctccaccacgaccccccacccacccgcaccactgtcaccaccaacactagaacatagaccacatataccgacgctacaaacgataactgacatgcagaccgacagcaagacaatcaaaatcatagatagaagtgctcgcgtcgtntctttttgttgcagtctgtatcagtatgcaacttccttgtcgttcacccaccatcacctcatcacagaccactcacgccgccacgccaacaatatcttcctctctgcccatacttcttgacccatcaccgccctcacactcgcgcgccgcagcatgcctccccttctgatatcgtgattgttctatacgtatcaatgatactagaaggcagcgncccctgcggtgcgctcgaggtcacactcactcgtcatcacactcgtcccttctcgtccgatttcactagtgcgcgccgtcggctgtaacagtgacctccgcctagcgatgcgccgcgcacaacacgactgacataccaccactcgcatcgtcatatgactacacacgattcactgctgcagcgcaagtgagtacactactatagacgcaagctctctgtatatatatnagatatatatcatcaatccctacgtcatctagacgtcgtagaatagaaagtacaatactaatncacacgatatctatacataantctaataactcatatgccaaacacanaacntatacatcactcgcgcgccctcgtaccacaccacctcancgacangcnttcactccgggngngnnngggggggntggggggggatgaggcaccgcccgggggggcggggnggggccncactnttcnnctcggnnnncgtctatatgtgatgctctgttcgtgcgcctccgctgaccctatcattnacgtcatgatatctaacttctcnacatgattctgagtaataaaacngactatngtcgtctcactcgaatttcatacagctgcctgatctgtataatgagataactagtttgtatattcacn

SEQ ID NO: 4608 - DNA, 1702 bp, Glycine max
  misc_feature (34)..(34): n is a, c, g, or t
  misc_feature (82)..(82): n is a, c, g, or t
  misc_feature (101)..(101): n is a, c, g, or t
  misc_feature (109)..(109): n is a, c, g, or t
  misc_feature (158)..(158): n is a, c, g, or t
  misc_feature (172)..(172): n is a, c, g, or t
  misc_feature (183)..(183): n is a, c, g, or t
  misc_feature (216)..(216): n is a, c, g, or t
  misc_feature (257)..(257): n is a, c, g, or t
  misc_feature (267)..(267): n is a, c, g, or t
  misc_feature (270)..(270): n is a, c, g, or t
  misc_feature (333)..(333): n is a, c, g, or t
  misc_feature (365)..(365): n is a, c, g, or t
  misc_feature (416)..(416): n is a, c, g, or t
  misc_feature (631)..(631): n is a, c, g, or t
  misc_feature (661)..(661): n is a, c, g, or t
  misc_feature (706)..(706): n is a, c, g, or t
  misc_feature (720)..(720): n is a, c, g, or t
  misc_feature (729)..(729): n is a, c, g, or t
  misc_feature (784)..(784): n is a, c, g, or t
  misc_feature (911)..(911): n is a, c, g, or t
  misc_feature (1072)..(1072): n is a, c, g, or t
  misc_feature (1083)..(1083): n is a, c, g, or t
  misc_feature (1086)..(1086): n is a, c, g, or t
  misc_feature (1104)..(1104): n is a, c, g, or t
  misc_feature (1311)..(1311): n is a, c, g, or t
  misc_feature (1382)..(1382): n is a, c, g, or t
  misc_feature (1599)..(1599): n is a, c, g, or t
  misc_feature (1683)..(1683): n is a, c, g, or t
  Probeset Number=SeqID_14387
ctcatgctacgagattactacgtagctgaacagntactaatctgcgagtgcgtcatgacctgaatagatcgacgtcgtattntctcgttcatcactcgtcntgattatnctcgtcatatccatgatgtacagctatcagcatcacgccactgcattcnggagtgagtctcanctactttatcnctctctgagtcgacccactacttctatcaccantcagcatatgatctgctagtatgtcctcattgaggacgagnggtgctagcntgnatgtctcacagaatgtgtaatatagctgatgtcatacgaggacacatatagatggcacgcagngtattgaccataatagatgtgtagtaagtatngatgtagtgacttcgccatcttgcatagtcctgttatctctgtttgatgtnatgtattcatccagcagtacatatatacgatagaacattagatatcacgtatacgcagatgggatgtagtagattcgtatctgtatatgctgacacatgtgacctgcattatgccgcgtctactcataccatcgtattatatcatctcacttgcagcgatcatcgtcactctaaccactcacctcgatatcgctatcgctagaatgtcagacatntatcattatactgacatcgagtatgcactngtgccgtactgcgcctacgtctgtgatgattaccatctacacatnaggtacgccacgtntctacgcgncgtactctgtagcgcacatgttatacacaaaagtatgtatatccactgccttcancacatgtcttgggtgagtggtgacccgtcgacagatacttcgtcaacatattaggtagtcgccggtgcgtatacggagcataagagcatacaagcgcgccagcgtgttgctgtgttgcacatatatncaaaactatcctctacgctctcttcatatacatacatatatgtgagtcatgttttaatccatcacgatgtacgcgatgtggcacgttgaaatatattcagcatcaatgtagaatattattaggcgtatcatgcaagtacagtactatcagtcgtcagtctnctatgcgacgnccnaccacacctcgtcccgcncgggtcgccgcgctccacttacgtcatcagaggtcatagatcttgttgtgcggagttactggtaattgtgaggtctagtgctgtagctgctcgttcagatccatgttcgtcgtatcaactagcagctgcgctagcgcctcttccatccattctctttcgtagatacgtttctactatctatatgagtctcatgttcatcgttcgagnatatgcgctgtccgcacggtgtaagctagttgcgtagccgaaggatagtagctatagtatgatctgtgatnagagttaagactcatatatcatatactactaatgtatcgcgggcacactgcgctcatcagcgcggcgcgcggtgtgccgtatcttcgtctcggtggtgctatgcagtgcgtttttgtgtcttgtttggtcatgtggtatccattctcgactctataaagataagagaagagatgataggctttatggcgctgtatctattgcgggctcgcgcagcgnggggcggcgcgcggtacccttcactttcgatttcatgcatggcatctgtgtatattggttgtgtgatcttcctgagtggagtantggagtgagagcgcggaga

SEQ ID NO: 4609 - DNA, 2135 bp, Glycine max
  misc_feature (1)..(1): n is a, c, g, or t
  misc_feature (64)..(64): n is a, c, g, or t
  misc_feature (163)..(163): n is a, c, g, or t
  misc_feature (249)..(249): n is a, c, g, or t
  misc_feature (303)..(303): n is a, c, g, or t
  misc_feature (339)..(339): n is a, c, g, or t
  misc_feature (481)..(481): n is a, c, g, or t
  misc_feature (550)..(550): n is a, c, g, or t
  misc_feature (565)..(565): n is a, c, g, or t
  misc_feature (616)..(616): n is a, c, g, or t
  misc_feature (677)..(677): n is a, c, g, or t
  misc_feature (788)..(788): n is a, c, g, or t
  misc_feature (810)..(810): n is a, c, g, or t
  misc_feature (913)..(916): n is a, c, g, or t
  misc_feature (1025)..(1025): n is a, c, g, or t
  misc_feature (1078)..(1078): n is a, c, g, or t
  misc_feature (1123)..(1123): n is a, c, g, or t
  misc_feature (1170)..(1170): n is a, c, g, or t
  misc_feature (1179)..(1179): n is a, c, g, or t
  misc_feature (1191)..(1191): n is a, c, g, or t
  misc_feature (1194)..(1194): n is a, c, g, or t
  misc_feature (1271)..(1271): n is a, c, g, or t
  misc_feature (1325)..(1325): n is a, c, g, or t
  misc_feature (1329)..(1329): n is a, c, g, or t
  misc_feature (1378)..(1378): n is a, c, g, or t
  misc_feature (1380)..(1380): n is a, c, g, or t
  misc_feature (1404)..(1404): n is a, c, g, or t
  misc_feature (1590)..(1590): n is a, c, g, or t
  misc_feature (1622)..(1622): n is a, c, g, or t
  misc_feature (1655)..(1655): n is a, c, g, or t
  misc_feature (1663)..(1663): n is a, c, g, or t
  misc_feature (1703)..(1703): n is a, c, g, or t
  misc_feature (1730)..(1730): n is a, c, g, or t
  misc_feature (1756)..(1756): n is a, c, g, or t
  misc_feature (1797)..(1797): n is a, c, g, or t
  misc_feature (1802)..(1802): n is a, c, g, or t
  misc_feature (1818)..(1818): n is a, c, g, or t
  misc_feature (1830)..(1830): n is a, c, g, or t
  misc_feature (1852)..(1852): n is a, c, g, or t
  misc_feature (1854)..(1854): n is a, c, g, or t
  misc_feature (1861)..(1861): n is a, c, g, or t
  misc_feature (1866)..(1867): n is a, c, g, or t
  misc_feature (1871)..(1871): n is a, c, g, or t
  misc_feature (1873)..(1873): n is a, c, g, or t
  misc_feature (1909)..(1909): n is a, c, g, or t
  misc_feature (1988)..(1988): n is a, c, g, or t
  misc_feature (1995)..(1995): n is a, c, g, or t
  misc_feature (2006)..(2007): n is a, c, g, or t
  misc_feature (2009)..(2012): n is a, c, g, or t
  misc_feature (2014)..(2014): n is a, c, g, or t
  misc_feature (2030)..(2031): n is a, c, g, or t
  misc_feature (2039)..(2039): n is a, c, g, or t
  misc_feature (2079)..(2079): n is a, c, g, or t
  misc_feature (2100)..(2101): n is a, c, g, or t
  Peptide Sequence Number=SeqID_7285
  Probeset Number=SeqID_14388
nctctagcgtgagtgtgtctcgctgtctgtcgtcgtttcatgtagtcccgccgctcgcactcanctcctttgcccgttacatttctttctggtgtctgacgcgtctggccaacccgccgaaccacttgacaccgtcaccgctcactgcgtcatcgactgagangcacgtcccggccgcatgcgctctcagtcagtagtcgtgcgtctcatcgcacgcgctgcgtgtgttagcgtcgtcgatgtcactgngcggcgagcgtcgctcaggtcgtacggtgtatttcgtagcgctagtgatgtgantagatatgactaaccatataattacatcacgcgcgntctacagtcgctttatgtgtgcagttttgatgtcgtacatgttatctctattctcttctattatgttctacttatattgtgatcatgtctagatggagatttgcatcaggtagacgcacgagagcgttgatatagtagatgnttggtcatctcttcatataccgtgacctcgttgatctccgatcagtctcagaggcggatgtatgctacnaatcgcactccggantgtcttacagtgtgatctatattattctgcgacaccactcatcgcaatcgnatatatacgtatgtagcatcagtgcctcgcacgtccccgacgtctcgccgtatctacgctngatagcgagcgcgagatcagcgatatgtcggtcgatccaacgactcatattgttacagaatattacgtgtgtaggttgtatctcttcgtaatttcaaattttactcgcatntattctagtgatctacgttgcnctagatctgacgctctatacgtgtcgtcgtcgttgctactcatgtagatatacgtcgcgtcatgtcgtgtctgctcacatgcatcacaccctctgacgagtgnnnncggctagatgtgactacgtgcacttctgctcgatcatatcttcatgctcagtgtctatacgttcagcatcaacactacgcgttactctgagtgccacatcacattcccnatatcgctctgtcatcaccatactgctctatatatgtttataggactcgttanaatagcgtgtgtgcggcgcgcttacacatctaaagcgacgatcgngcgcggctcctacagtcgctgcaatcttcctcacgcacctctgttcntgagtgtcntcatatctcctnccntcatcactcgtcactgttctcttatgtgattgtggttgatattgtgagattatgtacctaactctcatcctacactnggacggcgcgggtggagatagaaggaggcagaggtgagagcgtgagagtgggtngttnagcgtaatatttgtgtgtagagaatattatggcgttgtgcgtcgctcgngntggtctgtggtgtgggtgtgtgtnggtgtgtcgacgagtaagttattcgatatgtagttagtgtgaggagagtgcgtgtgtcgtcgtcgtgctcgtcgcgttgtgtcgctccatatctgtgtgcagctctatcttgcttagcgtgtgactatgttctcttctctctatttctctccttatagtgcttctcttctgtcgctctcctctcgncctactgctctcatgctccattctctacctcntactgtgcggctctcggcgatcgacgtgcggangagtgcancacgcggcgagagcgctgccggcctagtctcggatcgagngcctacaccctcctgtacaatctcatnggtatacgtcgtattcatatgtatgncttgatatcgatacgtcgtatgtctcgatacatttattatntattncatcagaatgtaatantatctactagtntccttaccgctcgctcatatcnancgcacgntgctnngcgngngtgatatggcagtacacgaggggagagacacattgnggaggcgaagctcgcgcgtcgcgcacgcagtgagagaagccgaacctcgtccactctcactcttatataacgcaacttncgccttngtccgcttttnntnnnntngttgtattaatataanntacattanctctccataagtgtcatccagatggggagcgcgccacgancagacaggacgggaggggggnngggtttgtttgttgtgtgtgtgtgttatttccat

SEQ ID NO: 4610 - DNA, 496 bp, Glycine max
  Probeset Number=SeqID_14389
cttataccaagctggcctgtcttgaaggtttatagggaccaaattgatcttgtcttttgtttcttgagtgtactgttgttggtggtgttgtttttttaatcagaattgtagttttacttcaataatctgcataataaaggtatacaagggattacgaagataaaactccaattctgattagagagcaacaccaataacacttaaagaattatctcacctcttggttttagttttgtttttgggaaaatggagtattcacaaatcactgcccttcaaactatctcaccttttgtttttttttcctttagccagattaggggttgttattgggacatcaatgcacattctctattttatccctactcaccctaacaattagtatgccctgctggttcacttctgatatattccttatcaatgtgattttagattttccttcatttttaattagtacatgtttgataatcccaggaagttaaaaaatgtagattattcc

SEQ ID NO: 4611 - DNA, 932 bp, Glycine max
  misc_feature (932)..(932): n is a, c, g, or t
  Peptide Sequence Number=SeqID_7286
  Probeset Number=SeqID_14390
gttctctctccccttccccccttcccttttttttttttttttttgaacaacatcgggtgaccataatcaaatcatcaacggagcccacaagaacttacgagtaacaacaacagatttcatcgcgtcacgacatgcacgccgcacgcgcagagtctaggagagagctacgggggctcggcgtcgaccgcctgccgctctcgctcacaaaaggtacgcgacggcaagggcgacagaggccaccgaggccgcgaagctcacggccgctgcggcgccgccgttctttttagattcgaccttgtccgcggcgtcctccgttggcgcgtcggcgggggccatgtcgggcgagtccgccgggggcgcgggcggggagtgcgaaggggacctggccttcttcttcttcctcttgccggcggccttgggggcgggcgccggtgcggagccttcgggagccggggccgacgcgggcacggcggcggccggtccggtcgccggtcccggggacggcgcgccgccaaagcgactgtgagccctcgcctcccctctgtccgccaggatgaccgtctttcagtcccctgccccactgccctcccctagtcttatgtaccccccgccgccccgccgccccgctagcccccatggctgcgaccgagctcccccgatctgattatcgtccactaaccctcagactttttctcctcctctccacccgcgtcctcgcccaacctcttccagtcccaatctcgcccctcactccatatttccactatccctctccatgccaatgcctccgtgacacactgagttgctcattacttgcctccttccatatgctatcttcgtctccctacgcagcctcttcccgctttcgacacctcgaccccagacgatcatcgatgtccacatattcctcacgttatactccctcccccatn

SEQ ID NO: 4612 - DNA, 181 bp, Glycine max
  Probeset Number=SeqID_14391
accacttactctatcgccgtgtttgctcactgttccgattctgcgttagcctttcacataaccaatttcaaaggcctcggtgtcaatcttgttttcagagatctatacgatcaccaaagtttggttagtgcgataaagcaggtcgatgtggtaatttctactgtaggacacctgcaggcac

SEQ ID NO: 4613 - DNA, 374 bp, Glycine max
  Peptide Sequence Number=SeqID_7287
  Probeset Number=SeqID_14392
ccatagacgcttctacatagctttcgtactatggtctgattccatgatacaatgacaataatcaggtgggattggctgacaaaaggattagaagggcaactggcaccgatttagacatattctaggctgctgatgattttactcgagccatatacaaatatgaaggtaaactaaggtctaatattttggttaccaaactcaccgtatatgacagtcaagctccacatgattgtgcaatacaatcaaattgccaatctagtaggagattctattctaagcaggtgtcaccaagagttccagcatgtatctatgttagtagcactgtttactacgagctgaatgtgctttgcactagatggccaagaaaaatgcat

SEQ ID NO: 4614 - DNA, 1807 bp, Glycine max
  misc_feature (22)..(22): n is a, c, g, or t
  misc_feature (28)..(28): n is a, c, g, or t
  misc_feature (36)..(37): n is a, c, g, or t
  misc_feature (39)..(41): n is a, c, g, or t
  misc_feature (43)..(44): n is a, c, g, or t
  misc_feature (65)..(65): n is a, c, g, or t
  misc_feature (105)..(105): n is a, c, g, or t
  misc_feature (107)..(107): n is a, c, g, or t
  misc_feature (109)..(110): n is a, c, g, or t
  misc_feature (151)..(151): n is a, c, g, or t
  misc_feature (153)..(153): n is a, c, g, or t
  misc_feature (208)..(209): n is a, c, g, or t
  misc_feature (250)..(250): n is a, c, g, or t
  misc_feature (254)..(254): n is a, c, g, or t
  misc_feature (258)..(258): n is a, c, g, or t
  misc_feature (262)..(262): n is a, c, g, or t
  misc_feature (280)..(280): n is a, c, g, or t
  misc_feature (301)..(301): n is a, c, g, or t
  misc_feature (318)..(318): n is a, c, g, or t
  misc_feature (343)..(343): n is a, c, g, or t
  misc_feature (350)..(351): n is a, c, g, or t
  misc_feature (358)..(358): n is a, c, g, or t
  misc_feature (502)..(502): n is a, c, g, or t
  misc_feature (637)..(637): n is a, c, g, or t
  misc_feature (752)..(752): n is a, c, g, or t
  misc_feature (781)..(781): n is a, c, g, or t
  misc_feature (856)..(856): n is a, c, g, or t
  misc_feature (970)..(970): n is a, c, g, or t
  misc_feature (972)..(972): n is a, c, g, or t
  misc_feature (1006)..(1006): n is a, c, g, or t
  misc_feature (1033)..(1033): n is a, c, g, or t
  misc_feature (1049)..(1049): n is a, c, g, or t
  misc_feature (1086)..(1086): n is a, c, g, or t
  misc_feature (1122)..(1122): n is a, c, g, or t
  misc_feature (1129)..(1129): n is a, c, g, or t
  misc_feature (1239)..(1239): n is a, c, g, or t
  misc_feature (1275)..(1275): n is a, c, g, or t
  misc_feature (1295)..(1295): n is a, c, g, or t
  misc_feature (1361)..(1361): n is a, c, g, or t
  misc_feature (1368)..(1368): n is a, c, g, or t
  misc_feature (1387)..(1387): n is a, c, g, or t
  misc_feature (1424)..(1424): n is a, c, g, or t
  misc_feature (1445)..(1445): n is a, c, g, or t
  misc_feature (1514)..(1514): n is a, c, g, or t
  misc_feature (1642)..(1642): n is a, c, g, or t
  misc_feature (1727)..(1727): n is a, c, g, or t
  misc_feature (1768)..(1768): n is a, c, g, or t
  misc_feature (1773)..(1773): n is a, c, g, or t
  misc_feature (1782)..(1782): n is a, c, g, or t
  misc_feature (1807)..(1807): n is a, c, g, or t
  Peptide Sequence Number=SeqID_7288
  Probeset Number=SeqID_14393
gattgtgtgtggttgtgttggncccttncccttggnngnnntnngtgctgcgctgtcgcgagtgntctactcctcactcctcgcgcatctccctcacatttattnananntatataaaagagagaggcagtagaaatactacgagtattantnatataacatctgtgtattgcggctatgtcacgtgtttgagtgagtaagtagaggnngtgagatgtgtagtagataaggattcatgtattcgataaangaantgtntgantggctacctcctactctncaactcactaattctcgcacnacgggcaggccacgccnacggccgcgctgcggacaatccacnaacaggnngggcagntacgcgcaccgagtggccgtggttgtagtcgcttctcagctgtgttgtagctcacaggttgacatctatagctcactattgctgtggcttatagctgtttggtatgtttatccgcgatgtgagagagagatgagatgcaacagnactcagcatagttacttgtggctagagttctggtgttgtgtgtgtggatcaagtgtgtaaattgtgtatgatactcatgtgttatacgcatgctagatacgacgcacgatctatgcttgtcttgtgtagagattncagatttctcggtgctccttggtgtcgtactctgcctcctctgctcttctacgcgctcgccacgtcaactgctgctcgatgccctgcccgtcgctggtaatcatgtatgtctcgnctgatactgttagattgacacataacacncatatacaaatgaaatcaaattaatatcctcacaatgtacctactctactgaatatagcaagacacagagataanagcgggctagagtgatacactcaactatgacagcagcacacggcaacacaggatgagaaggcgacgtcgatgactattatctgtatagatgtggtggattgatggattgacatngntacatgatcagtaaacatattctcgtcacagtgntatatggcgtgataggtgacatgtttngagtgtcgactctacncacacgcctgcacgatgtctcgtacacatgtgcacgnggatgtgatgtatgggtgtgtgattgatcatgatancacagcncgactcagcatgatatgtcactgtgacttgatatgatctatcatactagtgtatgtatgcgagacgtacacgtgcagtactctctatctcacgcttcagctagcgatctngagcaggacatactactcagcactgtactacgacangatatagtgctagtgagctnctacgccatgctcactatgctcatcatactcgccagatgtctgatgatcatacgatacatgactcnctctcgncatcgactctatacgtacnacgcgatcacgtacgtcatagactcatcatgcacgcncgtgctggtctatcggcgagnactatgatcaacacgagccatgaagtactgagtagcacacagatatgtgcacatcgatatcactgctgncgcgcttcaaagaccgactactatactgctattataatgaatcaacatatacacgcagaactagagatagagatatacatgacatacactacataaactagtacatgactactactatatctcatctnacccatcacacactatgcgattgactcacgtctgcgctctctgacgctgttgctacttggtactgagatatgtgtgagtgtgatngaagcattcgcagttctctcaactctgacaccgatcgtacngtttncgctgctcnctccgtcgtctgctccgcctgcatn

SEQ ID NO: 4615 - DNA, 1634 bp, Glycine max
  misc_feature (21)..(21): n is a, c, g, or t
  misc_feature (23)..(23): n is a, c, g, or t
  misc_feature (30)..(30): n is a, c, g, or t
  misc_feature (33)..(33): n is a, c, g, or t
  misc_feature (35)..(36): n is a, c, g, or t
  misc_feature (41)..(43): n is a, c, g, or t
  misc_feature (78)..(78): n is a, c, g, or t
  misc_feature (86)..(86): n is a, c, g, or t
  misc_feature (97)..(97): n is a, c, g, or t
  misc_feature (192)..(192): n is a, c, g, or t
  misc_feature (199)..(199): n is a, c, g, or t
  misc_feature (201)..(201): n is a, c, g, or t
  misc_feature (223)..(223): n is a, c, g, or t
  misc_feature (275)..(275): n is a, c, g, or t
  misc_feature (312)..(312): n is a, c, g, or t
  misc_feature (555)..(555): n is a, c, g, or t
  misc_feature (571)..(571): n is a, c, g, or t
  misc_feature (608)..(609): n is a, c, g, or t
  misc_feature (628)..(628): n is a, c, g, or t
  misc_feature (902)..(902): n is a, c, g, or t
  misc_feature (975)..(975): n is a, c, g, or t
  misc_feature (1090)..(1090): n is a, c, g, or t
  misc_feature (1097)..(1097): n is a, c, g, or t
  misc_feature (1146)..(1146): n is a, c, g, or t
  misc_feature (1154)..(1154): n is a, c, g, or t
  misc_feature (1369)..(1369): n is a, c, g, or t
  misc_feature (1401)..(1401): n is a, c, g, or t
  misc_feature (1495)..(1495): n is a, c, g, or t
  misc_feature (1530)..(1530): n is a, c, g, or t
  misc_feature (1634)..(1634): n is a, c, g, or t
  Probeset Number=SeqID_14394
ggggggggggggtggtgtggncnccctccnccncnnccacnnncttggcgctcataccctcgtggcactcgttctgtntgagtgantacatcgatantcctcgactgctggggcactggcgggttcgtaagccgagccggtgcatgtagccacattgagacctgcgtgtccgctgtcggaactaggtggganattggangngactacgactgaatagcggggntgtggacgcgacggtaggggaggccgcgctcggctcacgactcgtcgtgtgngtgagacgtcccccttaatatcatgtcgactgcgcancagagatctctatgcggagatgcgtgtgagtgctgagttccctgggtgcaggagtatgtgtgatagttgggctcagcgtccctaccgactactgttcttatagtgagacacgcgagatatggcgaacagcgcatcggcgtgagcgacatagggggaccgcgccgcacggtactgccatcgacgacgtgtctcgcgtgaacacccaccgaccaaccgctcgccttgcgtcctctctccttcccntcctctgtcaccaccnactcacgccccacctctataccacccctcccactccnncccacctcctcacgaacantactacaagatgagataagaataagaaaattaaatagagaccaatacataaataaccctcactaacatatattttataatataatgaaagagagaaagaactgatcggtcgagcacaatatgctcgtgctgtgctctacatatatcgttacatcctacattactgtcttctgaccgcgggccaacaatcacatttctacctcgtattgaacaaagactatataatataatgtgagtaatagtgcgaagaaacaacatacctcatctctcaccanacccgtgcgacgacacgccctactagtcacaccgcggaaccccagcgcacaaggcgcacactccgtctatcantcacctcatattctagtgtccaccgcactgtcactccgcactgacacctacacgaagatgtgtgattgtcaggatggctgcgcgtgctggtgtctgctatctatctgtcgtggcnttagagntgtttctggtctgcgtcgtgtccactagccacctacaccctacgcaaanaatcaganacgcaacgacgctacaacacgcccgcggctgagatcgcgctgcgcacagaccacctctactactctcaccaactcacccactcgctcaaatcgcgagagcacgaacatactcttaaattcatcttgaagagcaccaatgcgacgagcctctaagagcggacctagctaccgaacagtaagagcgacgcgcgtcagcacttatatgatataattanctatcgcacagaatattcttccttctacgctncaccagagcagtacaactaaatgcaagagtacggagcacgaatatctcatcactactacgcaccacgccgcgccgtgtagtattacgacgcctntcgaactgtagatgtaatatactgaccactgcccnctctcctaccacacagcgatgcgcgtgtgcctcgcgacactccacgagcacgcacaagtcgagcggggccgcgcacgtatacctgccatcacctctcaacaccn

SEQ ID NO: 4616 - DNA, 406 bp, Glycine max
  misc_feature (69)..(69): n is a, c, g, or t
  Peptide Sequence Number=SeqID_7289
  Probeset Number=SeqID_14395
ccctgatgacaccgtagcattcgtggcagcatggtaagtagctagtgcagtggtacacagggtgtcgantcttgtgtccagcaaaattactagcttcgaaaattacttccaactgatcttctacgggctccatgcgagccaggaactagtcagtttcgaagtggatggtactctacaggcgccagatggacctagatgttggcctactgaagatagccacagtcattggctagtgctgtatcgactggatcaaatgactgttactgggaagggaaccatagaaggctatggagaacagaggagggatcttccttgcgaacctcacagggagattaatcatctcaccaagcatatgtaataataacattttcaccattccgttattgaaagtgctgattaaattttg

SEQ ID NO: 4617 - DNA, 1336 bp, Glycine max
  misc_feature (14)..(35): n is a, c, g, or t
  misc_feature (39)..(39): n is a, c, g, or t
  misc_feature (41)..(41): n is a, c, g, or t
  misc_feature (43)..(44): n is a, c, g, or t
  misc_feature (60)..(61): n is a, c, g, or t
  misc_feature (65)..(66): n is a, c, g, or t
  misc_feature (1129)..(1129): n is a, c, g, or t
  Peptide Sequence Number=SeqID_7290
  Probeset Number=SeqID_14396
gtgtgggggtgccnnnnnnnnnnnnnnnnnnnnnnaagnantnnagagttaggttgaaannaaannaacaaaattggggtccgggggcccccgccttgcagctcccacggctatacgatgaagcctccttcctcttctttttcttttaaccacctcaagcacattccacaaacacccacaccattccatttacctcttgtaccagcgaaggacaatacccacacactacaaatatgttgtgagaaatggatttcagtaagatggtcaccaactaaccaccaacatcccaacaaccacaagtgtctaatatgattattgatgtgtaagatcgcacccacgcactcccctccccgtctttgggagagttaaggatgggattcaacaacattgtagtgtgatacaattaaaacaaaaataatcattacgcacaccaatctcttttactttctggtagtaacactcgccccactgtagctgtggtggtatggtcttcccattcgttttaacctctgctaataatcggacaaaagcagtcaatcaaacatttttccctccaccagcaccacctcccgtacttcatagtggaatacaaactggcgatatggttataaaaatatataacaagaaaataggcagtattaaaactatacaggtaagacgcacaagcattaccttccgtccccccaactaaccatccttttggacgaatttctcccgcctctccccgcccacacaccctctccttaccggcgattagacaatgaggtccgtgctttcccacccttctgggtgttgccgcaccacaccgcccacccgtagtactctctcatttgatagcgtcgctcctattctttccatctccgctgtgctgtgcattctatttcctttctgtaatataactcactactccctacctcacctgtctattcacgccacgtgccgagacactgcgtaacattgacggtgaatacgtggacccgccctggcacgctctccccacctcatatttatttctactcttctatttctcatagaccttcctcttttttgtcctggcctcagtttttctgagggtgagcggggccgcggctttgcactgtctctccgtctaatgtacgtattgagaaanggagcgcatactggtaccattctgctgtaatgataaatccgattccgctttccgctcctagtagtctcccgtcctctggcacacgcccgcgcacatttctgtccctccccgctcgtctcatcacttgcctctgcgattaacatgcctcagtcacacatccgtgtgccctagcacgtgcgtaggccggtcgcgcagtcacatgacccg

SEQ ID NO: 4618 - DNA, 773 bp, Glycine max
  misc_feature (387)..(387): n is a, c, g, or t
  misc_feature (401)..(401): n is a, c, g, or t
  misc_feature (407)..(408): n is a, c, g, or t
  misc_feature (601)..(601): n is a, c, g, or t
  Probeset Number=SeqID_14397
cacaccgtttgttctattcttaactcaacttctgctacccactctcttcttccaagtccaaccacgcttttctctacagtcatgggcaaggtcaagatcggaatcaacggatttggaagaattggccgtttggttgccagagtcgctctgcaaagagacgatgtggagctcgttgccgttaacgaccctttcattaccaccgattacatgacatacatgtttaaatacgacagtgttcacggacactggaagcatcacgatgtcaccgttaaggacgagaagacccttctcttcggtgacaagccagtcactgtttttggacacaggaaccctgaagagatcccatgggggtcaactggagctgatatcatttgtgagtccaccggnagttttcaccgatnaggacnnagccgcgcacatttgaagggtggtgcgaagaaagttatttattctgcccccagtaggatgcccccatgtttggtggtggtgttaacgagcacgagtacaagccagagcttgatattatttcccatgctagctggacaaccactggcttgctccacttgctaaagtataaatgacagtttggcatttgtgaggnttgatgacaattgtcattcatcctgccaccaaaaaactggtgatggccatcaccaagactggaaggggaaaaactcttcattaaactcattcaaaacactggacttgccaggttgttgaaaaaccttcctgttaaaacggaattgagggatggatcccggtccccaccgggt

SEQ ID NO: 4619 - DNA, 701 bp, Glycine max
  misc_feature (1)..(27): n is a, c, g, or t
  misc_feature (648)..(701): n is a, c, g, or t
  Peptide Sequence Number=SeqID_7291
  Probeset Number=SeqID_14398
nnnnnnnnnnnnnnnnnnnnnnnnnnngagacgccctccgagactctgtccgcacgccgggcccaggcggagctgttcttccgccggctcggggtgaccttcgccgtctatggcgaggctgaggctgatgagcgaatcatcccattcgacatcattcctcgggtcatcgcccagaacgaatggcggcagatcgaggccggcgcccgccagcgcgtggcggcgctgaacgcttttctggccgacatctatggccctcaggagtgcctgaaggcgggcgtgatccccgaagaactcatctacaccaacccgcaatatcgcgtggaagccgctggactgaagccgcccaagggggtgtgggtgcatgtggccggcatcgacatcgtgcgcaccggtcccagcgagttctttgtccttgaagacaatgcccgcacgccatccggagtctcctatatgttggagaaccgcgaggccatgatgcggctgaccccggaactgttcagccgtcaccgggtggcgcccgtggaaacctacaccgactcgctgctggccaccctgcgctcagtggccccggcgggcgcaggcgcggacccgacggtggtgatcctgacgccaggtcgattcaactccgccttctatgagcattcgttnnnnnnnnnnnnnnnnnnnnnnnnnnnnnnnnnnnnnnnnnnnnnnnnnnnnnn

SEQ ID NO: 4620 - DNA, 1423 bp, Glycine max
  misc_feature (6)..(8): n is a, c, g, or t
  misc_feature (19)..(19): n is a, c, g, or t
  misc_feature (21)..(21): n is a, c, g, or t
  misc_feature (93)..(93): n is a, c, g, or t
  misc_feature (100)..(100): n is a, c, g, or t
  misc_feature (102)..(104): n is a, c, g, or t
  misc_feature (106)..(106): n is a, c, g, or t
  misc_feature (247)..(247): n is a, c, g, or t
  misc_feature (312)..(312): n is a, c, g, or t
  misc_feature (343)..(343): n is a, c, g, or t
  misc_feature (361)..(361): n is a, c, g, or t
  misc_feature (417)..(417): n is a, c, g, or t
  misc_feature (521)..(521): n is a, c, g, or t
  misc_feature (712)..(712): n is a, c, g, or t
  misc_feature (715)..(715): n is a, c, g, or t
  misc_feature (740)..(740): n is a, c, g, or t
  misc_feature (770)..(770): n is a, c, g, or t
  misc_feature (903)..(903): n is a, c, g, or t
  misc_feature (1083)..(1083): n is a, c, g, or t
  misc_feature (1231)..(1231): n is a, c, g, or t
  misc_feature (1313)..(1313): n is a, c, g, or t
  misc_feature (1315)..(1315): n is a, c, g, or t
  misc_feature (1347)..(1347): n is a, c, g, or t
  misc_feature (1361)..(1361): n is a, c, g, or t
  misc_feature (1411)..(1411): n is a, c, g, or t
  misc_feature (1423)..(1423): n is a, c, g, or t
  Peptide Sequence Number=SeqID_7292
  Probeset Number=SeqID_14399
gttttnnnaggggtgtttntntgttattgtggggggcgatgaggggcggtgggcattgtttgcgctcaaaccttctcgcacacggctcgtccnagagganannnanagccgggtgggagaatacaaaggggctgcgccagcctcgcaccgggcgggggtgcacgccgcccgggctacaatgataaacgtatgttgtgtgatccgctcccggtggagcgtgcgcagggggaatccgcgaaccttcccnctcctttctctcctactgcgtttgtgtctaggaggagaagtgtgttgtgagataatcctcatccnatccgtgttctgcggcgcgccgcgctagtgnttttgggtgttgttggtntgtctgcctcgcgcgcttgtaataatatattatatatataccacatatatgacctnttatattgttggatacttgcttctgttctctatttgtctagttgtgtgtggtgatacggtgtgtgcttatgctttatctgcagcgaaatatgacacgatatgcncatcacatataacaaacatttcatatacaccacaaccaccgccaactgaacgtcagctcgtgactactacacactagagtgaacatgttacaacacgaagtggttaataactgacaacgacttgatgatatagagaacgctcccacaccctacgtcaatactctgccgctgctcccattcatgtgtgtganatntctatacctacacgactagcacgcngaacagtcgtagagaatgaggagaccatangtgtgttaaattgtgtgtgtgtgtacatatcatgctggtccgcgctcgacgtcgcagcgcgcgcttgtgtgtcgactacaacacactaccacacctcgccgtacgtacgcactctgtctcgctgatcatcatngaactgagtcggtcgaccaactacacacaatatctgcatactactactacatcagactatatactgtatctcatatactacctattcagtctctgcgctctctcatattatccacatctcaactcgccctctccctccccgctctcgtcgtgcatacatgatatatagtacactatcttntcactcctcgctcgactctccacaccctacgtgcagcgtgccatgcgctatgcaaccactcagactctgtataacagcgcctcgactccacacaccgtctgcatccctgcaactctcaccacctcagccctcacatacattcgtcgtntagtgcgaacgatcacatacatgtgcgtagagtgatatacgaaaacatcgacatgatgttgttggtgcgctacatggcctananaccagccacgtgctgccgtctcgcactctccnactctcacacacantcacacatacaacactgccgcgagacgtcgacgcacgaactcagtctctnatcgctacacgn

SEQ ID NO: 4621 - DNA, 429 bp, Glycine max
  Peptide Sequence Number=SeqID_7293
  Probeset Number=SeqID_14400
agacatatatcatcatatagaattttgtaccaggctcacaggtgattatttggagattagagatgatccaaatgaaggcaatatcaattgtcttcttttgtacgctcttttatggcaatccaccacataacgactacacagtctgctcttctagatggttacgctctcacttgcattttgctaccgctgttgcacaactagccatggttgtcaaagcataggacaatgccgtgacgccaagcagctcaaggaagaagtgtgccctgggagcaactggggagggggcgtcgccgtgccctcgacagtgttctgttgcattgcaccagacattgtaaatggcttaataacagaccttgtttcattgctaattgccacggtcttgtattaaattccttttagatatagataattttgggatagatatagatt

SEQ ID NO: 4622 - DNA, 670 bp, Glycine max
  Probeset Number=SeqID_14401
ctggaaaatttcgattttcttggaatcagcttgcctcgtctcaatcgttgactgtacgtcgtgcagataaggatgtcgaaagagggagaaacggtgatcggagttccgtattacgcgggacacaacccgtatcaagccggaatcgtgccgccgaacgcaatctacggagatccgatgggtgctccgatccagcaaacgatttatcgggacactcccgctcctttcaattgcctctattgcggcaacactggcctcaccagtatcagatctaaaccaggtgtagctgctgtggttgcttgcatgatgccatttatgcttgggttctgctttctctgcccttcaatggattgcctgtggaataagtaccaccattgccctcagtgtgggaataaggttgctgactttgagaaatcagatccatgcctggtgatggatccgccacagtggaagcaacccagcttcgcactccctgcatgattgttttcttattaaaattgaatgtgaagtcgagtcgatctgttgcttgtgcctaaaagaaattgaaaggataacccactagaatgtgtgaggaaatgaatgtatacaattgtctgtatcgtctagtgtcttgactcttgtccccttcttggctatgaaacaaggctctccacgtagagattcttcatcaaag

SEQ ID NO: 4623 - DNA, 341 bp, Glycine max
  Peptide Sequence Number=SeqID_7294
  Probeset Number=SeqID_14402
ggtaactcggctggagccgtcccccggcgagaaaatgagagaaatcctccacattcagggcggtcagtgcggggaccagatcggcgcctagttctgggaggtgatctgagatgagcacggcatctaccacaccggatgagtcagcggacactccgaacttcaaaaggaacgcatcaatgtctactacaacgaggccagcggtggacggttcgttgcactcaccggtcttatggatctggagcccagcacagctggactgggtcagatcctggccgttcggacagattttccgcaccgataactttgtgatcaggcagaccggcgacagcaacaactgggcc

SEQ ID NO: 4624 - DNA, 557 bp, Glycine max
  misc_feature (544)..(544): n is a, c, g, or t
  misc_feature (548)..(548): n is a, c, g, or t
  Peptide Sequence Number=SeqID_7295
  Probeset Number=SeqID_14403
tcagctacgtaggccccccccccattcaaaaaacactttaccagccatccatcatcattcccttttccatgaaaaccctttcctttgtgctcatctccacattgtttgcctatctattggcccaagactgtaacaacccactcttgaacgcctttaaccttactggccttgatactcctcaatcaggagcaggtctcgctttctgcggtaaccttcaaaatggtcagacctgttgctcagctgaaaccgtccaatccttccaatcaagacttgataacctcacaacctctcttcaagacttggcaggccaaagagatgtctacatgaccgagctctatgccaactacagcagcgaattccaacgtgctgctgacgacctcactgactatagcgatgagatttctcgactccaaagagataattctactgtcggtaacgagactagatatcaatataatggtctcaatcgtattgctcgcgctcttgataacattgataacaatttccgctctgctattcaagattaccaacaaagaagagctgnttgnttcaacact

SEQ ID NO: 4625 - DNA, 1913 bp, Glycine max
  misc_feature (16)..(17): n is a, c, g, or t
  misc_feature (22)..(22): n is a, c, g, or t
  misc_feature (24)..(24): n is a, c, g, or t
  misc_feature (29)..(29): n is a, c, g, or t
  misc_feature (35)..(35): n is a, c, g, or t
  misc_feature (61)..(61): n is a, c, g, or t
  misc_feature (76)..(76): n is a, c, g, or t
  misc_feature (84)..(84): n is a, c, g, or t
  misc_feature (96)..(96): n is a, c, g, or t
  misc_feature (118)..(120): n is a, c, g, or t
  misc_feature (124)..(125): n is a, c, g, or t
  misc_feature (132)..(132): n is a, c, g, or t
  misc_feature (136)..(136): n is a, c, g, or t
  misc_feature (139)..(139): n is a, c, g, or t
  misc_feature (141)..(141): n is a, c, g, or t
  misc_feature (189)..(189): n is a, c, g, or t
  misc_feature (193)..(193): n is a, c, g, or t
  misc_feature (196)..(197): n is a, c, g, or t
  misc_feature (216)..(216): n is a, c, g, or t
  misc_feature (219)..(219): n is a, c, g, or t
  misc_feature (224)..(224): n is a, c, g, or t
  misc_feature (227)..(227): n is a, c, g, or t
  misc_feature (229)..(229): n is a, c, g, or t
  misc_feature (261)..(261): n is a, c, g, or t
  misc_feature (308)..(309): n is a, c, g, or t
  misc_feature (311)..(311): n is a, c, g, or t
  misc_feature (317)..(317): n is a, c, g, or t
  misc_feature (319)..(319): n is a, c, g, or t
  misc_feature (331)..(331): n is a, c, g, or t
  misc_feature (359)..(359): n is a, c, g, or t
  misc_feature (388)..(388): n is a, c, g, or t
  misc_feature (408)..(408): n is a, c, g, or t
  misc_feature (443)..(443): n is a, c, g, or t
  misc_feature (463)..(463): n is a, c, g, or t
  misc_feature (491)..(491): n is a, c, g, or t
  misc_feature (497)..(497): n is a, c, g, or t
  misc_feature (500)..(500): n is a, c, g, or t
  misc_feature (516)..(516): n is a, c, g, or t
  misc_feature (518)..(518): n is a, c, g, or t
  misc_feature (528)..(528): n is a, c, g, or t
  misc_feature (539)..(539): n is a, c, g, or t
  misc_feature (545)..(546): n is a, c, g, or t
  misc_feature (551)..(551): n is a, c, g, or t
  misc_feature (562)..(562): n is a, c, g, or t
  misc_feature (571)..(571): n is a, c, g, or t
  misc_feature (598)..(598): n is a, c, g, or t
  misc_feature (612)..(612): n is a, c, g, or t
  misc_feature (627)..(627): n is a, c, g, or t
  misc_feature (638)..(638): n is a, c, g, or t
  misc_feature (662)..(662): n is a, c, g, or t
  misc_feature (668)..(668): n is a, c, g, or t
  misc_feature (674)..(674): n is a, c, g, or t
  misc_feature (678)..(678): n is a, c, g, or t
  misc_feature (699)..(699): n is a, c, g, or t
  misc_feature (740)..(740): n is a, c, g, or t
  misc_feature (750)..(750): n is a, c, g, or t
  misc_feature (752)..(752): n is a, c, g, or t
  misc_feature (754)..(755): n is a, c, g, or t
  misc_feature (759)..(759): n is a, c, g, or t
  misc_feature (784)..(784): n is a, c, g, or t
  misc_feature (788)..(788): n is a, c, g, or t
  misc_feature (874)..(874): n is a, c, g, or t
  misc_feature (953)..(953): n is a, c, g, or t
  misc_feature (1013)..(1013): n is a, c, g, or t
  misc_feature (1015)..(1015): n is a, c, g, or t
  misc_feature (1036)..(1036): n is a, c, g, or t
  misc_feature (1107)..(1107): n is a, c, g, or t
  misc_feature (1110)..(1110): n is a, c, g, or t
  misc_feature (1123)..(1123): n is a, c, g, or t
  misc_feature (1186)..(1186): n is a, c, g, or t
  misc_feature (1194)..(1194): n is a, c, g, or t
  misc_feature (1197)..(1197): n is a, c, g, or t
  misc_feature (1210)..(1210): n is a, c, g, or t
  misc_feature (1212)..(1212): n is a, c, g, or t
  misc_feature (1218)..(1218): n is a, c, g, or t
  misc_feature (1266)..(1266): n is a, c, g, or t
  misc_feature (1296)..(1296): n is a, c, g, or t
  misc_feature (1303)..(1303): n is a, c, g, or t
  misc_feature (1313)..(1313): n is a, c, g, or t
  misc_feature (1328)..(1328): n is a, c, g, or t
  misc_feature (1369)..(1369): n is a, c, g, or t
  misc_feature (1372)..(1372): n is a, c, g, or t
  misc_feature (1424)..(1424): n is a, c, g, or t
  misc_feature (1471)..(1471): n is a, c, g, or t
  misc_feature (1500)..(1500): n is a, c, g, or t
  misc_feature (1565)..(1565): n is a, c, g, or t
  misc_feature (1573)..(1573): n is a, c, g, or t
  misc_feature (1579)..(1579): n is a, c, g, or t
  misc_feature (1711)..(1711): n is a, c, g, or t
  misc_feature (1726)..(1726): n is a, c, g, or t
  misc_feature (1754)..(1754): n is a, c, g, or t
  misc_feature (1775)..(1775): n is a, c, g, or t
  misc_feature (1808)..(1808): n is a, c, g, or t
  misc_feature (1820)..(1820): n is a, c, g, or t
  misc_feature (1913)..(1913): n is a, c, g, or t
  Probeset Number=SeqID_14404
tgggattgccagcctnntcgantngagcntcgagnacgctagttgtgtatgtagatagatncatagcatactatcngctctgcnggtttctctacntgtgttgtgtattgatgtgtannnttgnngtgttcntaancgngnctgtatgatatatagtgagcagtttatatatacttccatcagacactntcgnctnnctctcgtcgtcgctcgccngcntcgtnccngngttcttattgacaattctagtatgtatcgttncatcagcgcagtctggtagtcgtgtgagcatatcgtatagacattannangatatnantatactaggatnaccgtgacgcatgtcgatcagggttcgnatttgatcgtttgtatgtaaattactatnctcgataaatgcaatcattnatagtatactgtatgtataatgcgatagctcgatntcatgtgtatgtatgctcanctgatgcagtataagtcataaacgacgntgtcanatnatgatgacgactgaangngctagtagangaatcgcaaancacgannatgancactgcgtcantattcgatnctatgatcgtatcatacacgaatgtantgatcgcaggacgnatcgtctcgatcgancgtcgatacgncgcactgacatatgactgtcacgntacacncgatgncacntactgatacgatctcagcgtnctcgtggctgatagatgctgtgaacgcataaacgataaatncgtcgcgtgnangnntgancgttcgatagtgtatattacgatgnatgnatgatgtatacgatacgactcaatatgactacacgtatgatgcaagtacgtgatatattatgcagcgtgcactatatactatcganttactctactatatactcaaactctcttgatccgtgtacgtctcgtctatatactatatcaaagtgtatgattactacncacgttcgtgctttaatgaacatacgtaaacatgtatattatattatagtacactacacntncactggatatatatacgcgtncgatttcgataacacacagaacaataaaccatacgactgactccgcgtcagctcctcacattcgcatcganacncagtccacgccancatacgctgatatcgacgacagtaacgaaacacaacatcatcgactcagcactacacgcatgntcatcggncancaccataccgtgntnctactncagtatatgacgcgactgcataacgacgatcacacatacaacgacgantacgatgatttatcgaactgcgtgcgatgnacgacgntgacgagcgnctatataattgacancacagagccgactgaacgcgacgtcgcggtgacgatcgaancgncgactcgaatatctatgacgtatattcagatatctcatttatattcaatgtntcgttctagcttcgttatacagattactattatatattgatgatatnattctgatgttcgatcgacatcgacgtantagtgcgccgctgtggcgagtacgacaaactactataatacatacgcacataacatcatctattnatatcganattatnatatatacgcgcgtgatatcacacgagagatgtagagggtgagtggcgcgtctgcgcgtcgaagaatacgtgcgatggagctgcgtgaacggtagcgtgataatattcacaagagacagaagtgcctcgtcnacccacacatataancgattcgaattgagatgggagtgatggntgtgtgttggtgtttgtcgtnataatataactgtcgcgatctatacgatatatnatcatacagaanacatcagcgactacgacgatatagattcacgacgagatatgtagaacgtgcgcaacgcgacgatcatgaaacacacgacaaatgatgcgcggn

SEQ ID NO: 4626 - DNA, 594 bp, Glycine max
  misc_feature (576)..(576): n is a, c, g, or t
  Peptide Sequence Number=SeqID_7296
  Probeset Number=SeqID_14405
ctctctccccaagaccctcgcccctcccctctcctcccccgccgccgccgccgccgccgacaccgccccggtcccaaccgccatcaccggcgaagaggaaaaccatcctggcgtcatacacaatggagatcctggtaggaggtagaccgtgaaggagaccgtcaacatgatctcgtcgatctctccctgtcgcaggctgacccgtaacttcaagtacctcaacctcaacttacatgtgcaggagggagtcagtgatgtcaaggcgtacgcctggatcttcaccctcaagaccagtgacgctagccgcaccgccatctgccacgtccagaacctcatcaccggattcaccagcgtctaccactacaagatgcggttcgtgtatgctcacttccccatcaacgcctgcatcgccgccgtcaagccgagcatccagatcaggaacttcctcggccacaggaatgtgaggcatgtgcacatgttcgagagggacaccatcttgcgctgcggtaactcacagatgatatcgtcatcgaagcaacgacatcgaggtcatatccgcttcggcgctctcatcancagaaatgcacgtcaaga

SEQ ID NO: 4627 - DNA, 623 bp, Glycine max
  misc_feature (623)..(623): n is a, c, g, or t
  Peptide Sequence Number=SeqID_7297
  Probeset Number=SeqID_14406
aacatggtttggccttccacgactccagagtatttcctcaccactccactctctttctttcctcgctgccactccactctttttctttctttctttttctctctctcagcgcataaaccatggctttgttggtggagaaaaccacacaagtggtaccgcaagatgaagaacgtcttgttggggtttcagtgttaaaattgtaactgtaaatcatgtttgttgatgttgcagtgatgtggattccacgatattggcttgtattgcgttctcgtgccctaatttggcattcttggagatctcggtctctgatcctgcagttaatcggatcagcagagtactaggaaggagtcatgagcatttcacaaagcaccaagttcactgagggtacgcgtgtgaggaaataaagctaaaaccatctctggcaaggggagcctttggagtgccacaaaaagacgcaatttacacctcctgctcctttcctcgtgctttgtttcagagactcatttcacaaagcaaatgactaatatactttcccatgttcaaaaagttacatttaaattgtttttatttatctttgaattatacaaaatatcattatcaattatttattagtttttttagcn

SEQ ID NO: 4628 - DNA, 677 bp, Glycine max
  misc_feature (185)..(185): n is a, c, g, or t
  misc_feature (317)..(317): n is a, c, g, or t
  misc_feature (382)..(382): n is a, c, g, or t
  misc_feature (470)..(470): n is a, c, g, or t
  misc_feature (538)..(538): n is a, c, g, or t
  misc_feature (601)..(677): n is a, c, g, or t
  Probeset Number=SeqID_14407
ggtgatttcagttcatggagaaatcttcccaacacggactttgagcttgagagaccacctcccccaatcaagagtggtcctaatgcacacccgaagaagctgcttaatggatccggacttaatggatctggacttcatctatctaaccacagtaatggtgatgggttggacctctctcctgtcancagcaaaaaaaggaaggactttttccctcatggaaatgaagaagaatgttacttggctgttaatcctccatctgatcgtataccagatatataaatgcacccaaccgagccacactggttgaatgacttcancggggtgataaaaagtgtttatggacctgttacagctgcaaaaactatttataaagatgaacaangttacttaattattatcagtctaccctttataaatcttccaactataaaaatttcatagaataacactctgactcacaatatcataanaatttgctatatcaacacatcttatgagccttttatgaaaaaacatgataggacattccaacctacanatccatcgtgcaaacactatccggctagaaatttctgctaagaaaccctctttcactccaatnnnnnnnnnnnnnnnnnnnnnnnnnnnnnnnnnnnnnnnnnnnnnnnnnnnnnnnnnnnnnnnnnnnnnnnnnnnnn

SEQ ID NO: 4629 - DNA, 1465 bp, Glycine max
  misc_feature (31)..(32): n is a, c, g, or t
  misc_feature (34)..(34): n is a, c, g, or t
  misc_feature (60)..(60): n is a, c, g, or t
  misc_feature (200)..(200): n is a, c, g, or t
  misc_feature (539)..(539): n is a, c, g, or t
  misc_feature (825)..(825): n is a, c, g, or t
  misc_feature (1003)..(1003): n is a, c, g, or t
  misc_feature (1042)..(1042): n is a, c, g, or t
  misc_feature (1204)..(1204): n is a, c, g, or t
  misc_feature (1259)..(1259): n is a, c, g, or t
  misc_feature (1325)..(1325): n is a, c, g, or t
  misc_feature (1330)..(1330): n is a, c, g, or t
  Peptide Sequence Number=SeqID_7298
  Probeset Number=SeqID_14408
tccctcccaccccttaagaaggagagactanntnacaccttagagaagcagtgtagaaanctaaaattgagggggaaagaggggcccacccggatggcaaggaatgttccccgaaaagacaacaggcccgggccgggcgctgcccagtgttttcccgaaaaaaaagacgagactaggacgcgtggaaacaaccaggaggnaggagaaaatgaaacacgcaggctgatgttttattccccccctaaagcacaaatagcaactcgaggggggatggggatgacagctagaggtgagcccagcaaagcagccccctatcctgattgtggcagcgcccacgagtcacgcctccgctctttgtgtatgttagggcggtccaggccacaggacctggtgcgtggaccgtaaccaacggtggctactaaagagtggaaggccgcatgacactgtggggcggtggggccattagggcgtccgcagagaccaggagtgcagaggacagctgggcgggtcggcttctagtgtagaagtgagccgcaagnaccagattctgggaaggaggaagcgggggaaaacatggcgagagtcacgcttcttacagccaccgctggcgacaaaccgccccggatcttccgcaacggaggcgtgaccggtccaagaggagccgtaaggcagaggaggagaaagaggcaactaagtaaaagaaacagaatcccaccagacgaaataagcacaaagtaacgtatgtggtgtgatattaaaatagccacaagcgcgcgctggcagagaggggatagaagcacaaaacttaggaggtatgaaagactnagagagggacaaaagatcgcagcctgctatcgtctcgaccacattccagaaggagaaaggcatacagacgaccacagcgtagcagagggacagtgtagactgctgtagtaggaacgtaaaaattaaaataggccagtatggcggcgagaggagcgtgagcagaataaccatccagagntgaacgacatctcatgacagtaggcagagcgctcagagnctcatccgtagcagtaaggagaaagggaggagcgagagacaagagagcaggcaacgcaggataaaggacgcggcggaacctttcatacaacatgcgagatcacgaagccagagagagagaaaagaagggtaatacagcgtgaaagagataggcgaagtcganagagacgcatcacaagccaaatgaaacagctacggagcaggagagacgagtagangaagagagcaaactcaacgaagtggagatgtggtacgccggaagagatcgtacggggacaccaagngggtntgtaggatggagagattgagagccactcatgcacgaaaggctacagtgttacagatcgagtactctcgactgatagaggcgttggctgaaggggtgttgaagaagagacagtgactacgtgcgaggagatgtcgg

SEQ ID NO: 4630 - DNA, 1400 bp, Glycine max
  misc_feature (107)..(107): n is a, c, g, or t
  misc_feature (150)..(150): n is a, c, g, or t
  misc_feature (152)..(152): n is a, c, g, or t
  misc_feature (266)..(266): n is a, c, g, or t
  misc_feature (424)..(424): n is a, c, g, or t
  misc_feature (945)..(945): n is a, c, g, or t
  misc_feature (1168)..(1169): n is a, c, g, or t
  misc_feature (1184)..(1184): n is a, c, g, or t
  misc_feature (1254)..(1254): n is a, c, g, or t
  misc_feature (1284)..(1284): n is a, c, g, or t
  misc_feature (1286)..(1286): n is a, c, g, or t
  misc_feature (1292)..(1292): n is a, c, g, or t
  Probeset Number=SeqID_14409
ttcttattctctacccgcgtgtgactctcgccccgtgtctactgatctttcttctcgtagttgaaccacacacgatctccaaatatagtctggcgaggatgcgctcncattccatgctgccgccggggcggagcgtgcgtgggccggctntncgtgagcatacccacgccggtggacgacggcagaggagtagtccggccaattgcaatctctccttgttcttgttatagagtgtcccttacctgtctcgggtcggatagtactcncttccacttgtctggctgtagctctcgctcgctgcgcgtggcagagtatcacatatgcgcgatgatggcgaggtctgccgcgtctcgctgcaccggcccgcgcgtggaatacacagcacaaatatagatagacgtccaatatgactaatgtacaagancatcatgtatatggctcgcttcactactaacgtagtcctagtccatgcactacctagtctctcctccattatgttgaggcttccgtaacctgccctctcactcagcgacgattctgcgtagcgttccagaatgtgtgacactctgctttgagctctgcgccggtgcttgtcttatgtgatatattggccactcagggtcagcgcagaggatcgtgctgttctcacctgtacgttgtagcgacgtcaatataacgcagaacaacgtcgccgtctcgcccgactgacatggacagcgttattctagtatgatgatcacacatccactgctctgtagtcgatgcaacgtgggtcatgctcgtcgtgcacaagatgaggagaggaagtaagtcgcctctcgcatgggaggcggtccatgtaggaagcgcttgatcttcctattgtactcgccgcatctacccgtaatccctcctctgatcctcgctaatatatagtcctctgtcttacagagagcactcaggganacgctcgaatattaccatacgttccagttcttaattagcgactatagacaccaggcgaaggttgtgctatctatacagctccgatcacttaccatataactctcaacctccaccgttctctctcataagtcatcgctatccctatatcatatcataacggagttcccactaaacttactttgcatgtctatgttcacacccatcccttctcaccacctctgtnnctcgtgacgcagtcncggcagtcagtatcgagcaatgtgataactctccactggcggatagaaggtagaggctacagaagagtcngaacacgagaccgtctacaaccatgaactngngtgtgnaggattataatgtacactcacggtcagtcgccgcgactcagtcagcctatgctacatcgctacgttactgcggacagccttatatgcgcacatactcacacacgctgt

SEQ ID NO: 4631 - DNA, 469 bp, Glycine max
  misc_feature (464)..(464): n is a, c, g, or t
  Peptide Sequence Number=SeqID_7299
  Probeset Number=SeqID_14410
tcacaatctctaaaccttaaatactaaaataaattaaaaggaatctacgttgaaggagagaacagagaagaatgggtcgccaaaacgttttcgtagtgtttagcctcgtgttcttggccgttcttggcctcgccgcagctgcctcctctccatctccttcatcgtcaccctccaaagctccttctactcccacaaccgatgtcgaagcaccagtgtccgaggacaccattggaaccaccgacgacgatgcagctgcttctcctggtgatggtgacgtggctgtggctggtcctcttggaagtgactcctcatacggtagtattgcaccttcaggcccagctgctgacagcggtgcggcggctcttggtgtctctgcggtcgtcgttggtgttacatccatcgccggttctttcttgtttctctgagttgtgtagtatcatgagaaagataagattatattgaanggaga

SEQ ID NO: 4632 - DNA, 415 bp, Glycine max
  Probeset Number=SeqID_14411
cgtacgcaagcacggagatcttggagggtgattacaaatactgcacccgcagtttgaataccctgttgatttgataagggaaaccaacctgggtggtcacgtgccacaccctacaatgatgggcaagggtgctggtcaactccatgttcgatctggtctttcaataggtattagaagctatgatggagcctaacgccacccatctatgtaccaaagaccctcttttgggaattactcgaatgctgcattgcgactacctgtgatgcccacatgcaaagctaccatggatttgcctgctactgcaacatgtgactcacccgtctttgttgctgatccagcacagaaaggccattttcttttagactttatcatgggaggtgtttcaacagctgtctacaaaactgctgctgctccc

SEQ ID NO: 4633 - DNA, 376 bp, Glycine max
  misc_feature (308)..(308): n is a, c, g, or t
  Peptide Sequence Number=SeqID_7300
  Probeset Number=SeqID_14412
aagtcaacaggtatgcgcagcaaaccgatgcagggcagcaaaccaagtgtcttctgctctcaccaaaggctgtggtgaatgtgaagccaaaccttcagatcatcgccgacgatgtcaaatgcacgcacggagctgccatcagcggggacctcgacccgaacgagctcttctacttccaggcgagaggcgtggacgccaaaacggcgaccgacgccctgcttttctcgttcggagcccaggtgataaaccgcatcccgtttaaggccgtcgagaagaaggctctagcacagctcaaggagctgctcgcngtgtcaagacaagacaattgatgaggcctgaggagctctttgaagtggttcagcgctttttttggtcg

SEQ ID NO: 4634 - DNA, 1851 bp, Glycine max
  misc_feature (10)..(10): n is a, c, g, or t
  misc_feature (37)..(37): n is a, c, g, or t
  misc_feature (39)..(39): n is a, c, g, or t
  misc_feature (45)..(45): n is a, c, g, or t
  misc_feature (123)..(123): n is a, c, g, or t
  misc_feature (137)..(137): n is a, c, g, or t
  misc_feature (145)..(145): n is a, c, g, or t
  misc_feature (149)..(149): n is a, c, g, or t
  misc_feature (156)..(156): n is a, c, g, or t
  misc_feature (185)..(185): n is a, c, g, or t
  misc_feature (227)..(227): n is a, c, g, or t
  misc_feature (234)..(234): n is a, c, g, or t
  misc_feature (260)..(260): n is a, c, g, or t
  misc_feature (273)..(273): n is a, c, g, or t
  misc_feature (303)..(303): n is a, c, g, or t
  misc_feature (311)..(311): n is a, c, g, or t
  misc_feature (377)..(377): n is a, c, g, or t
  misc_feature (460)..(460): n is a, c, g, or t
  misc_feature (479)..(479): n is a, c, g, or t
  misc_feature (489)..(489): n is a, c, g, or t
  misc_feature (509)..(509): n is a, c, g, or t
  misc_feature (588)..(588): n is a, c, g, or t
  misc_feature (658)..(658): n is a, c, g, or t
  misc_feature (720)..(720): n is a, c, g, or t
  misc_feature (819)..(819): n is a, c, g, or t
  misc_feature (856)..(856): n is a, c, g, or t
  misc_feature (883)..(883): n is a, c, g, or t
  misc_feature (905)..(905): n is a, c, g, or t
  misc_feature (1004)..(1004): n is a, c, g, or t
  misc_feature (1061)..(1061): n is a, c, g, or t
  misc_feature (1145)..(1145): n is a, c, g, or t
  misc_feature (1214)..(1214): n is a, c, g, or t
  misc_feature (1276)..(1276): n is a, c, g, or t
  misc_feature (1283)..(1283): n is a, c, g, or t
  misc_feature (1341)..(1341): n is a, c, g, or t
  misc_feature (1391)..(1391): n is a, c, g, or t
  misc_feature (1492)..(1492): n is a, c, g, or t
  misc_feature (1505)..(1505): n is a, c, g, or t
  misc_feature (1575)..(1575): n is a, c, g, or t
  misc_feature (1581)..(1581): n is a, c, g, or t
  misc_feature (1583)..(1584): n is a, c, g, or t
  misc_feature (1597)..(1597): n is a, c, g, or t
  misc_feature (1626)..(1626): n is a, c, g, or t
  misc_feature (1680)..(1680): n is a, c, g, or t
  misc_feature (1705)..(1707): n is a, c, g, or t
  misc_feature (1712)..(1718): n is a, c, g, or t
  misc_feature (1721)..(1721): n is a, c, g, or t
  misc_feature (1724)..(1724): n is a, c, g, or t
  misc_feature (1726)..(1726): n is a, c, g, or t
  misc_feature (1751)..(1751): n is a, c, g, or t
  misc_feature (1766)..(1766): n is a, c, g, or t
  misc_feature (1779)..(1779): n is a, c, g, or t
  misc_feature (1792)..(1792): n is a, c, g, or t
  misc_feature (1800)..(1800): n is a, c, g, or t
  misc_feature (1808)..(1808): n is a, c, g, or t
  misc_feature (1811)..(1812): n is a, c, g, or t
  misc_feature (1824)..(1824): n is a, c, g, or t
  misc_feature (1828)..(1828): n is a, c, g, or t
  misc_feature (1839)..(1839): n is a, c, g, or t
  Peptide Sequence Number=SeqID_7301
  Probeset Number=SeqID_14413
ccgagactgnacactgatcatcgatgtggtgagtagntnttcatntcatagtcgtactcagtatgagcgtatcgttgtctattgtagatcatagtacgatgattcacacaatgcatgatagtngtcatgtacgtagntctcaacntgancatactntgtagtaattagatgagtacgtgatgcgngtgtgatgtgatgagattctaacgactatctgcatatatgtnatatatntcttctgcatcgatgtgtctgtatcngggctgaccagcnatgcatctacacggccgcattcactcatgnggcatagncagaagcagcagtgtatgcattacggctgagttatgtcaatgcactctcacttgtcattgtatcangcttgtcgttgtacatagtgtgagtgtagtcgatgtgtgtagttctacttcgatatatctatatagtctcgagtatttctgancgatcgctattgagatgtncagcatgcantcagttcgttgtagtacacnggcatgattacgcagtgtgtagtcgcgtcggtatagtgcgtacgatagtagtattgcatacagacctacgacacaacantgggtagcgtgtagtaatgatatatattagtatattcgtatctcaatctgatgttctgattacatcagtnatagtgtggtagtgtgatgagatcactcatcgtattatatgtaacagacacacacacgcacnatttttagtagagttcgtgagaagtagtgtcatatatattatacgtactacatgcaatatagttatcagtattcgtatgatgagacaataagcatctancactatccatcatattcggtaagagtcttcgacactnacacagtactacgagtagtcgtgtgtntgtttagtcgtgacagcacaantactcataatattatataatcatatgatctgtgcagcgatttagtgtgatgtatgagtgatgtgagaatgagatacatcatagtaccaatgatattctntaactactcactatgaatacacataatacagtacttctattcgcgcgtcgcacaatnatctcgtcgagtcagtcagagacgaccacacagacacgcaagcagcgagacgagtacccggataaagagaaataaagacagcangagtagagggcgcgactcgaatgagcgctggggtgtgttgctgcagtagtagtctaatatctgacgganggagtatgatgacgtattgagtatatatattaggtactacgtcaattgcgagacgtgcgatngtatatntcgtgttcacttcatcgtaagacgcgtgctacatagataatatcacactatgctctcntttgtgatgattgtgcgtcgtctagcatatgacactatatcactactctncagctatacatattatatgtatatgcatatgtatatagtagtaataaaggaatttatatgagtatatagtgatgtgtgacagctgtagtctcagttcatcnttcacatacatcntactcatgatgtgagatgtgtggtgtggtgtagtagttgcgcagttgagtgtagatatatacactcaganaccatnanntaagagtggtgtngatcaacgcacgagcgtgacgagagtatnccgtcgcgattttgagaatatatataatgaagtagtagtagtacacatagtgcngtggctgcgcgggcggcggcggcgnnnggggnnnnnnnttnttntnttgtgaataactagcgggtgctatntcattatatctagtnggtattattgtanatatattattttnttctcctngctgtgtntcnntaacactataantatnacatataaacnacacatctctct

SEQ ID NO: 4635 - DNA, 613 bp, Glycine max
  Probeset Number=SeqID_14414
ctaatatatctatcgatatccatgtgttaggactctaagaggctagatatttagtttgtttttggacggaaaggtcctttctgaaaaagacctcagaatggtctgcgaaaaggtcaaagagattctcattgaagaatcaaatgttcaacctgtttcagctccagtcacagtctgtggtgatatccacggacaattttatgatcttcttgaacttttcagagtcgctggagaaatgcccactaccaactacatcttcatcggagactttgtcgaccgtggctacaattccgtcgaaacctttgaactccttatgtgcctcaaagtcaaatatcctgctcatatcactctcctcagaggaaatcacgaatcaagacaaatcactttagtttatggcttctttgatgaaatcgtccgcaagtacggtaatgctaatccctggaaatactgcactgatgtctttgatcaccttggccttgccgctcttatcgaaggaaaaattctttgcattcacggtggtctttccccagatatcagaacacttgataacatcagaaccatcgaaagaaaagtcgaaatcccccatgaaggtcctttctgtgatctcatgtggtct

SEQ ID NO: 4636 - DNA, 1345 bp, Glycine max
  misc_feature (14)..(14): n is a, c, g, or t
  misc_feature (16)..(17): n is a, c, g, or t
  misc_feature (32)..(32): n is a, c, g, or t
  misc_feature (59)..(59): n is a, c, g, or t
  misc_feature (281)..(283): n is a, c, g, or t
  misc_feature (438)..(439): n is a, c, g, or t
  misc_feature (465)..(465): n is a, c, g, or t
  misc_feature (704)..(704): n is a, c, g, or t
  misc_feature (865)..(865): n is a, c, g, or t
  Peptide Sequence Number=SeqID_7302
  Probeset Number=SeqID_14415
tttttgtgtggccncnnccgcctccccccccntccccccccccgcccccccaccgaagnaaggcgcacccacgcccggcggccttcccgcacccgagggggaagagaacaggggagagaatataacaaaaaagagggtcccaccccccccccccacctactgaacagatgccctttgtgcgcgtgtgttcgattacctatggctataactatacctctgcgcgaagcgcccacacgtgggggagcgccgcgtctttcatattcacaagcgctctatctttnnngcgaagaacgggagccaagtaggcgcctttataaattacttgtatagacaaaaaataaaaataactaactcgaatcatcccttattttatcactatgaggtggatatataatagatagtcgtcgcggtgcgtgggtgtcttgcgctggtctagtnnattacgggctattttttgtaatcacnaaaaagtccatcaccacgaatgcggcccgagggtgagaatgtaataggacaaatactgattgtcttctgtagtgctatggtgatgtttggtgtgtcgctcaaacatagtagaaaagaaaaacaagctgccaccatgagtcagccttcgtgagtgcactgcaatgtgctacgtgacggcacagcgacgcccacgtacctccccctggtggatattagatgtatggatgtggagtctgcgnacaaacccacacctacccatgccctgcttgctggtcttgctgtgaggtggcgaggggggagtctcggcacccccctccccggcctccctcgccccgagagaccacacacatgaatcacgtaccaacctgtacgcagacaaccttcttcctgcctcaactgncaccaccccacgcaacgacaacgaccgcacacgctccacgctcgtgacgctcgccgatctgcgtagagtgctgtgacggttgttgtgttcccaccccgccccccacctctatccaccctcgtggtcagcggtgggggcgtgttcgtgcggggctgccgtgtctctggtcttatgattgtgtgttggtatgtttcttcatccaccccatctatacctaactaggtcacactacacctctcgtggagtaggtcatgttgccttgtctgtcgactatttatcagacacacagatacttgctgatgacgagtgaggtagatatcttataagaacttgtacatattattagaacctcttcacttgctgctgtcttgaacagagtaactgagcacgtgcaacaggacgaggacgaagggagcagtcagagcaatgtgccaagcagtgcggtccgcacagcaggcggagccggagacgcggagacag

SEQ ID NO: 4637 - DNA, 681 bp, Glycine max
  Probeset Number=SeqID_14416
gaatttgatgatctgactcatgtcaacttcatcgtcctcctcgtacgcatgcgctctgcaaccttaacctaagtacactgtgaggtgagctccttgggtacccccggaaatggttgctgcatctgcctgcccagaggaggagacagcgatgtttcccgacaaaagtgcccatcccaggttggatgcctacgcggggaacatgaatgaacaccccatgtactgctcaactccttgttgaaacccaccataccctgaaggttttcaatggccttaaagcatgtcgagaaagggggcggaaatccgggaggaccttgggaaaaacctcctttctacaaaaaacgggcaggattattttctctctatgaaccaactttgaaaaataaaaaataaagccttttttctttgacgcctccgggccccattattgatgaatgggggaggggacctactctgaatttataactttccccgcaaaacggaatttagtttccccccccttggattatcgccccccccaaaaaaaaaaatggccattatagggcatccagctccttttccccaaaaaggttttacccggtctcccacaaaaaaaatttcgaaaaagactaggttgggccaaaattctcctgtattctcgcgattgcggtccaccccctcacggttcccaatccccctctaaaa

SEQ ID NO: 4638 - DNA, 813 bp, Glycine max
  misc_feature (813)..(813): n is a, c, g, or t
  Peptide Sequence Number=SeqID_7303
  Probeset Number=SeqID_14417
aaaacacagcagctctgcgccattacaacagtcacagctcacatcatttgcaccggtactagcttgatcatcatagcaatggcctccaccaacagctggacccatgagattgagtcgccggtcgctgcatcacgcctctttcgtgccggcgtcatggactggcacaccctggcccccaagctcgtgccacagatcgtcgccagcgcccaccctgttgagggagaaggcggcatcggcagtgtcaggcagttcaacttcacctcagccatgcccttcaacctcatgaaggagaggctcgagttcattgacgtggacaagtgtgaatgcaagtcagccctcatcgagggtggtggcatcggcacggcaatcgagacgggcacgtcgcacatcaagggtggagccggcagccaacggtgggagcgtggtgaaggtggaatcgacatacaagctgcttccaggcgtagaggtgaacgatgagatcaccaaggccaaggactctgtcacggccatcttcaaggccgccgaggcctaccttattgccaacccggatgcctacaactaaatcagttgagaggaatcatacataattatgttgtccctggtttgattttttgtgctttcttcttgaactaataaagctgttacaacggtccagcctccaagctctgaagcgagagcagtgagcagagtatggacttgagaagtttaaaagttgtgtatttgtaactatcaaagtttgctgttgtttgatgatgttgctgctttttgtactgtaataaaaggaagtatttgaaacacataatgaacttctan

SEQ ID NO: 4639 - DNA, 778 bp, Glycine max
  misc_feature (1)..(1): n is a, c, g, or t
  misc_feature (775)..(778): n is a, c, g, or t
  Peptide Sequence Number=SeqID_7304
  Probeset Number=SeqID_14418
nactgtctcagttttttttttttttttttggcaggtctaaatactctttttataaataaaaaaacgcaaaagaatatcagaaattaaacaacaatttaaagttatgggctttagacttcagaaataataggaaaagagaaaattataatgaaaattcaagcttaatttaacaagcacaatagctttaccaaaaaccatatcctaatagctagtgttttgtagaaatccctcgtgccgaattcggcacgaggctcatttgacattcaacacggttcttcgaatggtcgtcggaaagcgacttttcggtgctagaactatggatgatgagaaggctcagagatgtgtgaaggctgtgaaggagttcatgcgtctgatgggggtgttcacggtggcagatgctattcctttcttgagatggtttgattttggtggctatgagaaggccatgaaggaaactgccaaggatttggatgagatttttggtgagtgggtagaggagcacaaacaaaatagggcttttggtgagaacaacgttggtggaattcaagacttcatggacgtcatgctttccttgtttgattgaaaaaaccttgattgggtagatgcggataccatcatcaaatgcccttttctgtcagtaatttcaggaggaacctgaacaaatattactactctttcgtgggccagatgtttgatttcgagaaatcctattgtattgtaaaagagtttggcagagcttgacttttcagtctggaaacgaagatgcttaactgannnn

SEQ ID NO: 4640 - DNA, 455 bp, Glycine max
  misc_feature (447)..(447): n is a, c, g, or t
  Peptide Sequence Number=SeqID_7305
  Probeset Number=SeqID_14419
atccaccattatgttccagcttgcattcggcacatcgtagtgttcgtgttagagagagagagagagacagagagagctcatccatggctagagagatggagaaggcaaggaaggccacctcccctaagacctcatcaactagttcaggtccaaaaagcccagcaaggagtggagggtcccctcctcataagaagaacgtcaccgaggcacgaccaaaaaatgagcagcagaacttccgtaaaggcggtcaagactcggcaactcatgatgagagcaaacgccgttcaccaactttacaaacctcacccaagagatcgacaaaacacgagcagccactgagctactgcaggcttcacaccgaggagcgggcaataaggcgagctggttacaattaccagattgcaagcaagataaatacagaggaaattattcggagatttgtggacnagttatcg

SEQ ID NO: 4641 - DNA, 572 bp, Glycine max
  Peptide Sequence Number=SeqID_7306
  Probeset Number=SeqID_14420
gcttgcaattgaagttgaagtcttgcccttctctcttcaactccaaacacaagacatcatcatccatggctgcctccgtctccactgtcggagctgtcaacagagctcttttgaacctgaatgggtctggacctggggtttcagctcccagttcatccttctttgggagcagcttgaagaaggttatcggctcaagggtccccaacacatacatctcctctggaagcttgaagattgttgctgtagaagagaacacagagattgaagagacccagcagaccgacatggacagatggaacggtcttgcctatgatatcatagacgaccaacaggacatcacaataggaaagggtttggctgactcccttttgtcaggtccactagatgctgcaactcactatgctgtgatgagctcctactaacctcttcgcactgaacataaccacaacatgctcaacaacacggatggatatgtccaacggtctgactctgttagacctatcttatagtgcatcggactcaatatcttcgtgacccttcgccagataacaggtccgctgatacttagtctc

SEQ ID NO: 4642 - DNA, 379 bp, Glycine max
  Peptide Sequence Number=SeqID_7307
  Probeset Number=SeqID_14421
tgcatgcctgcagcccgcccatttgtaacacatcacaatgatcttatcatgacgttattcatgaggattgcttcataactgtatctgcatagcgagtgcgcagtaggaggactggatcgtgtatatgatattggatacctattcaggagcgcgggccttacttccactcattatcctgacactactacctgctagcattctatggctgatcatgactacaatgactcaacggatcctgcagaccaaatggtgcatggtatgaatgatccatcgagatgctgctattaaatactgcatcatgctccttggatcgatatgcaacctattggaaatgactttactacaccacttatgtgcagggtgaacatactgtggacac

SEQ ID NO: 4643 - DNA, 535 bp, Glycine max
  Peptide Sequence Number=SeqID_7308
  Probeset Number=SeqID_14422
cgtccgatctaaccctatgcagttcatcctcggcgtgaaaaaaaaaacaacaaaaagcttccaagggacgtttcgctctcccagtgcagcaaggcgcagggatcagtgtggataggaagtgtgacggtcctgctgggcagctatggaagaacttaccgcttttgtatccaaatcgtttgaccaaaaaagcaaagaaagtaacggcggaggcggcggcggcggcggcagcagcaagaaggagacaattacctacagggaagttttggaaactggtttggctcgggtgagggagctgggaaactttgagactaacctccaggacatcaccgacaccagcaaccactgcccgctgcacctctataaagagcacggcgccgacagcgacaaggacaaactcaaagactacggttcggccagagtctcggaagggatctatgagtgcaaagagaagagggatgatgtgaagtcagaggatgaagatgggcagactaagctgaagcagaggagaagccagactaattttacactagagcag

SEQ ID NO: 4644 - DNA, 526 bp, Glycine max
  Peptide Sequence Number=SeqID_7309
  Probeset Number=SeqID_14423
gggttgaggaagtggagagggaccttgtgaaggcttttaaagtgtttgatttggatggtgatggattcatcacaagtcaagagctcgagtttgtgctgaagaggcttggcatgtgggatgatgaaaggtgtggcaaggattgcaaatccatgatttgctcctatgacactaactttgatggcaagcttgattttcaggagtttaaggacatgatgctgcttaccatgattgcatgcagcatccttaatttttccaatttattttcttacagatgcctccaggagggattctcactgctttgtatgcatttcacagtcatgacatctcaagaggaatattagccttagctttccttcttgttgtgtttaactgcttgagcagtttccagatatactcaatgcctgcttttgacagttgtgaagctggctacaccagtgggacaaaccggccctgctccatatgggtgagatcagggcttcgagtcctctattgatgtatctaccttctcatagtgctggagttgcct

SEQ ID NO: 4645 - DNA, 1790 bp, Glycine max
  misc_feature (1790)..(1790): n is a, c, g, or t
  Peptide Sequence Number=SeqID_7310
  Probeset Number=SeqID_14424
tcgagtcagctacgtaggcccccccccccaatcataaactttttttaaaagccgctccacatactctctttttttctctatgactcatcacgctgcatcaatagaagaagaacttcaaatcgatactcatgcatttgaggcacttgaaaaagatttccaagatgtacttcaagaattagctgctgatgccagtcttgaacacttccgtcgtcaatatgagaagttacatcgtgcattgatgttctctcatgaaaatgaaaagaagttactcaagaaatgtaaagacttgaaccaagatattgtcggaaacgccggaaaagtccaagttgcccttgaattaaccaaggaagaagcccaaaatgttaccattctcagacaagaaatggacaaggcttacagagttattgaaaacttccgtgataaagaagaacataacaagaagaaaatggaaggtttacatgaacaaattagacagttgagatctcttgttgaccaaggaaatagcattgctgctggtcaaaatagtacaaacagtgaattgattgctcagaaccagagattggctgatgaaaaggatagattggtgactgaactcgcttcaaccaagaatgagttgattacttctttggagaaattaaagactttggaagtggataatcagacatttgagaatgatgttaagcaattgaagatcaagattaatgacttggaagaaaagaaacaaaaggaagctgatagacaaaagaaattccaagatgaaatggaaaacctcaagaagagacttgatgtttccatgggtgaaggtgatagaaaagaaaaggaggtcatgaaggcacaagaagaaattgaacttttgaaggatgaaagaagaatcttggaaaaagaaaagaaggaaaagatggaaagaatcaagcaattacaaaatgatatggagaaacaaagtcttcatattgaatcagttcaaaagttcaacagtgatcttaacaccaagagccatgaattggaacaaacaatcaccaaacaagccggagaaattaatgagaagatctccaagttagctcaacaagaaagagaaattaacaagctcaagagagaaaaggaaggaatcagaaaccaaaagattgaagctgaaagagccaaggaacttgctcaaaacagtattgaacaacttgaaagaattatcgatgataccaagagacttgctgaagaagatagaaagcttatcgaacaattgaaggcttcaagaaacttgctcaataaggaaatcaatagagctgaatctaataataagaagcaaggaaatgatttgatcatcagtcataaagccaataaagaaaaggataatgaaattgtgaaccaagctaaggaggttgaaatcttgaaaaagagaatctctgagcttgaaaaagaaaaggaaaagtatggtatcactgctgctcaagctaatgccaaatatttccatgccttggaagaaattaagcttaaggataatttgatctcagaattccaaaagaaaaacattgaaactgaagctaaattgaaacaacaacaaaatctctacgaagctgttagaagtgacagaaacttgtatagtaagaatttgactgaaactcaagatgaaattgctgaaatcaagagaaaatataaaattgttaatcatcaaatctctcaactcaaagaagaaatcgatgctaaagaagctgctttaactcaagaacatttcgaattaaaaaagaaatccaaagaatatgaagaatcacaaaaagaaatcgaaaaaaaaaaaaaaaaan

SEQ ID NO: 4646 - DNA, 486 bp, Glycine max
  misc_feature (35)..(35): n is a, c, g, or t
  misc_feature (446)..(446): n is a, c, g, or t
  Peptide Sequence Number=SeqID_7311
  Probeset Number=SeqID_14425
ttttttttttttttttttctacttctctatactgngcttcatattttcctttgatatccttcttttctctcatgacctcctctttactcatctcacaatgactatacaacctctctagctcctgtatatcagtatttatctttctccattcattcgatatcgcttcttgagcatgctttacttctctcttcattacatccaatttaccccattcatcttcaagcaccttcttctttgattcaatcttcttatccatcaacagtaactgcagatccttttcagctaactgttttgcagtcttactctgtatattctttacgacttccttcaaagaagccttcttttttatcaaagtttctttctctattctcaatacttcctttacttcttctatcatctctctttcttctctcagttcatctctttctttctggcattcttcttgnaagttcttcagttcactctctctcatttgtaagctcacca

SEQ ID NO: 4647 - DNA, 363 bp, Glycine max
  misc_feature (19)..(19): n is a, c, g, or t
  misc_feature (52)..(53): n is a, c, g, or t
  misc_feature (62)..(62): n is a, c, g, or t
  misc_feature (64)..(64): n is a, c, g, or t
  misc_feature (78)..(78): n is a, c, g, or t
  misc_feature (81)..(81): n is a, c, g, or t
  misc_feature (87)..(87): n is a, c, g, or t
  misc_feature (100)..(100): n is a, c, g, or t
  misc_feature (102)..(102): n is a, c, g, or t
  misc_feature (116)..(116): n is a, c, g, or t
  misc_feature (125)..(125): n is a, c, g, or t
  misc_feature (136)..(136): n is a, c, g, or t
  misc_feature (263)..(263): n is a, c, g, or t
  misc_feature (292)..(292): n is a, c, g, or t
  misc_feature (340)..(340): n is a, c, g, or t
  misc_feature (354)..(354): n is a, c, g, or t
  Peptide Sequence Number=SeqID_7312
  Probeset Number=SeqID_14426
ttttttttttttttttcgntataatttatatttattttcaattgagtaattnnttttgagcnantacacacatgtatntgngtttgngatgcgagtgcancntaaaggcgccgagnggggcttcnacggagttcgngcggttcgagcggaagttcggaagcacctgaggtcggcgcccggtcgagctggcggaggaaattcgtatgtttcccccatcgtcagaactcgtccgaactgcaatcatctggtttttttttataggngggagggggtccaggcgggggtcgagtcnagcgttcagtagttgaactgcggcaggtcggaggccgccactcggaanccacccgcgtccgngatgtacct

SEQ ID NO: 4648 - DNA, 444 bp, Glycine max
  misc_feature (398)..(398): n is a, c, g, or t
  Probeset Number=SeqID_14427
aagccagtgctctcctcctcctccctcctcctccccagagagcagccacacgccgcgggccaacgccgcccgcccgtccggcaccctcgtccaccgcccgcccatctccgagcaaccgtacgccgtggccagcgcccgcaagcccgtgcgtccgccgccacgcccagcgcccttccgccacctcgtcggcgccgcgtgaagctccatccctcgcgagctcgtcctcaccggccggccatgtgcaccccagctccttcggccgtgcacccgagcccgtccataccccgagctcctccacacccgccggtcctgtgctccacctcgcgagctccgccgctagagcagccgggcgctcaaccggtcgagcaccggccatccccaacctcccccgcgtgctnccccgcggcgctggagcgagtcagctaccgagcgcggctgagcaga

SEQ ID NO: 4649 - DNA, 295 bp, Glycine max
  Peptide Sequence Number=SeqID_7313
  Probeset Number=SeqID_14428
attggttgtgccatctcatagctgtgaaagtccattcgagtactttccagttcgtttgtcaatatgcaagacctatacactgtgaaaggagtgcagaatcttggagacacagcagtgatgtgtaataggctatatgtcaggactgcagtatttgactgccatgaagtccgtgaaacatcagctttcatggttccattggtggatggtgaaggaaccaaaactcaggcacttgctatttgccactccaatacttatggaatgaatcatcaaatgcttcatcgagttatgggagttg

SEQ ID NO: 4650 - DNA, 517 bp, Glycine max
  Peptide Sequence Number=SeqID_7314
  Probeset Number=SeqID_14429
atttggccctcgaggccaagaattcaagccaatggggtacgaagtttttttttattattttttcaagaactatatttttccagttagttgaattattaaagttaaattgtatgactgcaattatttctcagttttgggtgttactacctgcctgtgactagcttttattctttgattaacatatattttgattcactttaactagttacttagtgaactaagttcttatttaaaaaggagagttttcacaattggttttcacaatttctcagaacctgaaaatctttctgcatatgatggtttggagttccgcctaaaaggtgatgggcgtacatataaaattattgttcgcacacgcagtgattgggatgctctaggttacactgcacgttctgacactgacaaacgataatggcattcaactccagcgccacctcgttcttgcagcctgttcgccagcatgaactgtgttcatgctgccccatttgacacaagcatcgttgcatcattacgcctc

SEQ ID NO: 4651 - DNA, 370 bp, Glycine max
  misc_feature (36)..(36): n is a, c, g, or t
  Peptide Sequence Number=SeqID_7315
  Probeset Number=SeqID_14430
cccctggtaacacgttataatgggtgaatgcttggnaacatccaccgggttggtcgtgtttggagtgatcctcatgatttcaagcctggaaggttcttgacaagccacaaagatgttgatggtgaaggcgtcagcaactattgagctcgctccctttttggtttctggcaaggagtagcatgtcccttggagcactcgctggactctgcagtgtgagtgcaccttgaccatgggctagcactgtctacattcctcttcaatgattgcttcctcctttcaaatcaagtctgttggacatggacagtagagcattgggactcgacaaattttaaaaggcaacccccgctttgaaatttctccttaaactcca

SEQ ID NO: 4652 - DNA, 2191 bp, Glycine max
  misc_feature (43)..(43): n is a, c, g, or t
  misc_feature (46)..(46): n is a, c, g, or t
  misc_feature (50)..(50): n is a, c, g, or t
  misc_feature (114)..(114): n is a, c, g, or t
  misc_feature (392)..(392): n is a, c, g, or t
  misc_feature (461)..(461): n is a, c, g, or t
  misc_feature (481)..(481): n is a, c, g, or t
  misc_feature (488)..(488): n is a, c, g, or t
  misc_feature (503)..(503): n is a, c, g, or t
  misc_feature (563)..(563): n is a, c, g, or t
  misc_feature (620)..(620): n is a, c, g, or t
  misc_feature (624)..(624): n is a, c, g, or t
  misc_feature (659)..(659): n is a, c, g, or t
  misc_feature (708)..(708): n is a, c, g, or t
  misc_feature (715)..(715): n is a, c, g, or t
  misc_feature (729)..(729): n is a, c, g, or t
  misc_feature (735)..(735): n is a, c, g, or t
  misc_feature (769)..(769): n is a, c, g, or t
  misc_feature (817)..(817): n is a, c, g, or t
  misc_feature (881)..(881): n is a, c, g, or t
  misc_feature (886)..(886): n is a, c, g, or t
  misc_feature (929)..(929): n is a, c, g, or t
  misc_feature (959)..(959): n is a, c, g, or t
  misc_feature (1117)..(1117): n is a, c, g, or t
  misc_feature (1157)..(1157): n is a, c, g, or t
  misc_feature (1162)..(1162): n is a, c, g, or t
  misc_feature (1167)..(1167): n is a, c, g, or t
  misc_feature (1192)..(1192): n is a, c, g, or t
  misc_feature (1197)..(1197): n is a, c, g, or t
  misc_feature (1207)..(1207): n is a, c, g, or t
  misc_feature (1249)..(1249): n is a, c, g, or t
  misc_feature (1260)..(1260): n is a, c, g, or t
  misc_feature (1279)..(1279): n is a, c, g, or t
  misc_feature (1301)..(1301): n is a, c, g, or t
  misc_feature (1368)..(1368): n is a, c, g, or t
  misc_feature (1574)..(1574): n is a, c, g, or t
  misc_feature (1577)..(1577): n is a, c, g, or t
  misc_feature (1582)..(1582): n is a, c, g, or t
  misc_feature (1736)..(1736): n is a, c, g, or t
  misc_feature (1783)..(1783): n is a, c, g, or t
  misc_feature (1911)..(1911): n is a, c, g, or t
  misc_feature (1946)..(1946): n is a, c, g, or t
  misc_feature (1957)..(1957): n is a, c, g, or t
  misc_feature (1968)..(1968): n is a, c, g, or t
  misc_feature (2006)..(2006): n is a, c, g, or t
  misc_feature (2022)..(2022): n is a, c, g, or t
  misc_feature (2053)..(2053): n is a, c, g, or t
  misc_feature (2094)..(2094): n is a, c, g, or t
  misc_feature (2116)..(2116): n is a, c, g, or t
  misc_feature (2129)..(2129): n is a, c, g, or t
  misc_feature (2143)..(2143): n is a, c, g, or t
  misc_feature (2161)..(2161): n is a, c, g, or t
  misc_feature (2180)..(2180): n is a, c, g, or t
  Peptide Sequence Number=SeqID_7316
  Probeset Number=SeqID_14431
acactcctctcgactactacctattataactatattgatatanacnagancaccggcatcaaccttatctcacacatcggactagcgcgcgccacacatattacgcaaacgganttagagagagatacttacatctcgatacggtgactgagacagtaagcacgtatataacatatatcacaccataaagatagcggcagtacacgccactcgacagtggcctgagaccaggagctatcatgctcctcctcatctaccacgtgtctcatagttctcagcggtctaaatcaagtgagagaggataaaaggatgtctgctggcgcatctgagacataccgactatcgcactgcgggtgccgcgtatctcttcttctactctctcgaacgaacgnatagataactatggtgtcgcatacgaaagtgtcatgccgacgctacagcgtatatctcgtcgacaaagngatgtgtgctatgtgtctantatgcancaattacatatatcnacagcagcagtcatccgcgatcgctcatcatctgaactgaccacgcgatcaagcacgtancagcctcacagcgcacactgcatcctgccgactcgtctaatctgcatgatgttcgcntatncgtgcagcccactcgtgctgtcgcagctatcgtcncatcgttcacatatcgctatcacgcggtcaaagcgaagagatacagctngctactncgtacacgcctcgnacacangagatcagactgcactcgcgtcgaagtcgctgcntagtagctcgttgcatattgaatgatgcatcgatggtatatatgatgncgtcagacgatcgagataatacgagtggcgtgcgtcgtagcgtctaatctctctgctaacacgncgtgntgcgcgtggatctgtatagtcagtatgtgactgagcatgctgncatagttccgctgtgactagagaatgcganagcgctccatcgttcatcacaaacgcactgatatgatcgtatgtagatgtcacgagtaatgacgagcgtgtgtatacatacgcgcgcacagcgtcgacgcctaccgctcgatatgactatcatctcatactatgatatgtgctgctaaggtacgatgnacgtatgatagtgacacgtgcatatcgtgacgctgtacgntcacntctcntatcatataatgaatcagcgatcanacacnacgagttaanatgcacgacgagagatcgccgagactgtcgtgatacgtgcgnatcgtcgcgancgttgtcgtactgtaagtngtcacagcgatgtacggcgcantataccgatcgtatgctactagcgacgtgatggagactctatatactcgccatcacacgattgaacntgcattcactactgcattcactgtacgtccgcacgacattacactgtaatatgcacatatgcgtatgtctacactatgatcgctgatatcgatagactggtgtactgcgactcacgtcgctctacgcataccttcaacgcactcgcaacatcacacgtgaggagacatgagtctgatggtgtcagctcgtgtcacggcctacgcangcnaagtntgatgacgcgcgcgtatcggctgtcgtgcggaatgctcgtcgatatactcagcacgagtgactgatcgctcgtctctctgatcgtactatatgcatgtcgtgcactgcaccagcagccagaagatgtcgcagactatgactctgtatcattaantcagctagaaataaatgcagatcgcactccatctcagatactcgagncatccgagtgatcaagatcgcgactcgatgtaattgtagtagcaacgactgcatgtaagcgagagagatctgcgtgcacgatcgatagtatagtgtacgagaaagtgatggagtcttctcgcatcgcngacgcgatacgataggagtacatcagttgactgangcagttgcgtnctctatagtcngcatctactcatgtgacatacgtgttctgtcatgatgntatacaaatctatcgngccgacgcgtcacatcatggcgagacagganatatcacaacgtcgcgtgtcggagcgaagtacgctcatgcnttgatacgtactcgtcactatnctcattcgatgantgatctcactacgntgcgtgagtgcctccacngatacctgtcaacgatgtngagcactgagg

SEQ ID NO: 4653 - DNA, 622 bp, Glycine max
  Probeset Number=SeqID_14432
acagttagttcacgcagttgaagtagcttgtgtgcattcctcagtccgtccgtctctagtgtgccatggctcggctctaccacctcaccttcctctccgtcttcttctacctcctcctcaccggcctcgtggctgccgatccgtctggagggaagaaggtcggcaagaaggtgatcatgacggtgcggtacccggctgccgactcgggggagaagatcacgatctcgacgcgcctcatcggtgagggcggggtcggcgacagccacttccatctcgacggcgacgactacgaacccatcattttcgccacgaaaaaccttgtctcggccctggagaaggtgggagatccgcaggccaatctatccgagctgtagaagcacgtacttgacgtgagtgagctttcacggggctcactgcatgctcagtggtggttgcatgcccagtcagtggagattggcgatggagctcctcttttctttcctctcagcgagaatacattaggcgctttttattttgttgtagtgcccattcggggagcgtgtccggtggcctattatttaggctgtgtatcttggattatgtaatcttttgggttcgagaaagaaaatatttcgttgttaat

SEQ ID NO: 4654 - DNA, 752 bp, Glycine max
  misc_feature (752)..(752): n is a, c, g, or t
  Peptide Sequence Number=SeqID_7317
  Probeset Number=SeqID_14433
tttcattggtgcatgccgcaagccaatggtatggtgcattgtaactgagtatgccaaaggtggttcagttcgacaatttattaatgaacgcgtcaaaacgcgctcagttgcccctcaaattggctgtcaaacaagctttggatgttgcaagggggatggcttatgttcatggccttggatttatccacacggacttgaaatctgataatgttttgattgttggtgactaatccattaaaattgctgactttggagtacgtgccgttggaggagctaactgtaagaatgacacctgatacatgaacatactcgaggatggctcgagagatgatccaacgtaggccttacacacaaatagtggatctatatagctacgtgattgatcttagtaactcataactgatatacattcatcgagaacataacaacagtacaggccgcctctgcagttgataccagatgagttactcctgtcttagataacaaatgtctagcgtatctgcgtgatataatgaatagctgctgattagtgtatgtgtagtttatagcccgagcctgacaacgtgtcgatgagacatcagctgagttcgccgaattattggcgatgcagacatagccatttagcaacctgggtggatagctaagatggcgcgacgatgaggccatcaaagagctacgacatatgaatgcacgagggtatgacgcttggacagacctatataagtcggtccacgagtgtcgagccgcgcgtn

SEQ ID NO: 4655 - DNA, 1410 bp, Glycine max
  misc_feature (1)..(1): n is a, c, g, or t
  misc_feature (8)..(8): n is a, c, g, or t
  misc_feature (112)..(112): n is a, c, g, or t
  misc_feature (115)..(115): n is a, c, g, or t
  misc_feature (133)..(133): n is a, c, g, or t
  misc_feature (179)..(179): n is a, c, g, or t
  misc_feature (495)..(495): n is a, c, g, or t
  misc_feature (857)..(857): n is a, c, g, or t
  misc_feature (1299)..(1299): n is a, c, g, or t
  misc_feature (1342)..(1344): n is a, c, g, or t
  misc_feature (1366)..(1366): n is a, c, g, or t
  misc_feature (1381)..(1386): n is a, c, g, or t
  misc_feature (1388)..(1390): n is a, c, g, or t
  misc_feature (1392)..(1393): n is a, c, g, or t
  misc_feature (1400)..(1401): n is a, c, g, or t
  Peptide Sequence Number=SeqID_7318
  Probeset Number=SeqID_14434
ntctcatnataatacgcatcttgtgatattcgtgtgtagtcgcgtgcgtgtactaagacagatatatatattagaggtcagtggacatatatgtagcttgcagacgctgagnagngtgaggcgctattgagangtaagtgagtgagtcgagacgcattgatgaatgagagtgagacagnggatgacgagcatgagtgagtatagcactaacgtcgataatgtttgagacatcgagagaccgcgacatatgtgtaagttgtatgtggatgcgcgacgtgacacaacgcgtgcgaagcacggcagtcgatagataaggagagagcgataaggaatgcaggatcttacggtagacatgaagcacgattaggagtaatcttgttgttatatgatgatatactcatgaccggtatcttctgatatgacgttcagagattagataagataagtatatatatagcacatatgtaaatattgagatagatgagagcagctcgncctatgtggcgcgtatgattgtttcacatgatacaattgttctctgcatagtatcaatacgcgcgttagaggttgttggttctcacacgaatataatagatgaatgcgaggtgtagataatactaagagtctttacctcctgtagccagattcaacaataatatactcagtgcgtcaacggagtgagaatcacgtgtgggtagtgtacatgtagatgcgaatcacgaatgtgttgcgagagagtacgtatcgcgcgttctcttcgatatctacacaatcacattagacatcacacgatacataacaaacgcaatcaaatataaatatataatatataattaatagaaacgatgtatagagangaatatagatatataatagaagtgtcatatttattatatagttatcatgtacataatttaatcagaaatataaaatgtaattatacaaattttcttggttaatccgtatctaacgttatacggttagcgtgaatgttgtatatcactctgcgagtcatataatatgatcattaaaactctcacgggacgatgtatgaatacatgtatcgacttaaaagtacaatcactcataacaattaaatagtatacaactcagtataatatttgtgtttataatttattgtcgttttcttgacgttctatattatcatatatatgtgtatgcttggagagatagaatcgtcatcatctcacgtgtcgagcggaactaacagcacaaagaaaacaacgtcacacaacacacaacaacgcgacgatcgaagcacacaaccaagagaagtgngagatgaagagaactctcacgcgaggaggaagaggaaggaaannngtacaaaaagataaacacaacnataaaagcaaaaaannnnnnannnannccccacnncccccaacc

SEQ ID NO: 4656 - DNA, 599 bp, Glycine max
  Probeset Number=SeqID_14435
gcacatgttgatcacatccctaacattgattttcagcaacctccttagaagtggtcttgggcaatgtaacttcagcagatgatgagagatcttccaaaagaattaatgcactgttgaccatggttgatgctcattattggacagctgacaaaggaaatactgtaatcaattatatgtcttcaaataattggtgcattacagttactaatactatccttggaggagatcccaatcctaataaaccaaaaattttaaacatgttgttttggtatactttcaaaactatgatgtttgcagtctccagaaatgaagatcaagagtattgtgccaggtatccttctcccgaaattccttacctttgggttcaccatgcttattttggttattctgacgttacacaatggttccgagattactttttcgccaactatcaatctggagtcatagttgttgcttctaatagtatttttggtacctcagaaacgggaactccttatttgactgtttattataatgatgcaaataataagaacaagatggtctctggcgctgttaatacagctgttactataaattaaaacatgcatttttttttttgg

SEQ ID NO: 4657 - DNA, 514 bp, Glycine max
  Peptide Sequence Number=SeqID_7319
  Probeset Number=SeqID_14436
gaaccctcgtccttttctccttcgacaagctctccaccctctcccctgacgaacccctgcaacatcaccacaaatcatagtgaaacccaccatgttgacacagacgaattaatgtcgttgcaaacaaccatggagccgccaaaagacagccatgacaccactgcgcacaaccacaaacgaggtttgatacaaccatgctccccttcatctaaaccagatttgcgaacaaatccgttgatttacccaaatcagaagtgacgagtttcttggtggcaccatggcatacgacaaccgaggttgttggcgagaagaggagcacgatagatagaggtgtttgtggtagtggggtcttcggattggagccgatggatgagtgataacgactaaatatgagttattttaataataaaaatatattgaaaatgtctttaaaaatatttatttaacagttatctttggttcaaataataagaattgatatttttgttatttatgatttgtaggtatgaaaatg

SEQ ID NO: 4658 - DNA, 495 bp, Glycine max
  Probeset Number=SeqID_14437
gagaagaaatgggctggcgtaaactttcacttttccaatgaacatctaaagcttaattttggacctatatcatgaccattcaatctccgccggacaggggtgaagaacacacaacaacacaccgatacgaatctggagttattccccacagaccccgtagaaccgggggggtgcaaccgtgagtaaagcgccctaccttgaccagtgatagagaagcacaacgactgtccaagggctcatattcctcctcggacttacaggcggaggcaatatggtcctcatggagggattgaccctggcgggaaccctcaccggactggcaggtgccacgccgctctttgtcctcttcagcccggggctggttccagccacgggcgccatcggcctggccgaggccgggttcctgacaataagggccttacggctcacggggctgactaacttttcctggatcctgaactacatacggggagacccagccaggctgggaaaacc

SEQ ID NO: 4659 - DNA, 1688 bp, Glycine max
  misc_feature (1)..(1): n is a, c, g, or t
  misc_feature (17)..(17): n is a, c, g, or t
  misc_feature (21)..(21): n is a, c, g, or t
  misc_feature (29)..(30): n is a, c, g, or t
  misc_feature (33)..(33): n is a, c, g, or t
  misc_feature (39)..(39): n is a, c, g, or t
  misc_feature (44)..(44): n is a, c, g, or t
  misc_feature (49)..(49): n is a, c, g, or t
  misc_feature (56)..(56): n is a, c, g, or t
  misc_feature (69)..(70): n is a, c, g, or t
  misc_feature (76)..(76): n is a, c, g, or t
  misc_feature (84)..(84): n is a, c, g, or t
  misc_feature (91)..(91): n is a, c, g, or t
  misc_feature (120)..(120): n is a, c, g, or t
  misc_feature (141)..(141): n is a, c, g, or t
  misc_feature (144)..(145): n is a, c, g, or t
  misc_feature (157)..(159): n is a, c, g, or t
  misc_feature (162)..(163): n is a, c, g, or t
  misc_feature (167)..(167): n is a, c, g, or t
  misc_feature (173)..(173): n is a, c, g, or t
  misc_feature (186)..(186): n is a, c, g, or t
  misc_feature (190)..(190): n is a, c, g, or t
  misc_feature (193)..(196): n is a, c, g, or t
  misc_feature (202)..(203): n is a, c, g, or t
  misc_feature (207)..(207): n is a, c, g, or t
  misc_feature (212)..(212): n is a, c, g, or t
  misc_feature (225)..(225): n is a, c, g, or t
  misc_feature (228)..(228): n is a, c, g, or t
  misc_feature (231)..(231): n is a, c, g, or t
  misc_feature (255)..(255): n is a, c, g, or t
  misc_feature (274)..(274): n is a, c, g, or t
  misc_feature (295)..(295): n is a, c, g, or t
  misc_feature (302)..(302): n is a, c, g, or t
  misc_feature (317)..(317): n is a, c, g, or t
  misc_feature (324)..(324): n is a, c, g, or t
  misc_feature (330)..(330): n is a, c, g, or t
  misc_feature (338)..(339): n is a, c, g, or t
  misc_feature (351)..(351): n is a, c, g, or t
  misc_feature (356)..(356): n is a, c, g, or t
  misc_feature (384)..(384): n is a, c, g, or t
  misc_feature (397)..(398): n is a, c, g, or t
  misc_feature (401)..(402): n is a, c, g, or t
  misc_feature (414)..(414): n is a, c, g, or t
  misc_feature (423)..(423): n is a, c, g, or t
  misc_feature (426)..(426): n is a, c, g, or t
  misc_feature (429)..(429): n is a, c, g, or t
  misc_feature (442)..(443): n is a, c, g, or t
  misc_feature (447)..(448): n is a, c, g, or t
  misc_feature (484)..(484): n is a, c, g, or t
  misc_feature (508)..(509): n is a, c, g, or t
  misc_feature (594)..(595): n is a, c, g, or t
  misc_feature (621)..(621): n is a, c, g, or t
  misc_feature (624)..(624): n is a, c, g, or t
  misc_feature (629)..(629): n is a, c, g, or t
  misc_feature (634)..(634): n is a, c, g, or t
  misc_feature (662)..(662): n is a, c, g, or t
  misc_feature (665)..(665): n is a, c, g, or t
  misc_feature (670)..(670): n is a, c, g, or t
  misc_feature (680)..(680): n is a, c, g, or t
  misc_feature (692)..(692): n is a, c, g, or t
  misc_feature (694)..(695): n is a, c, g, or t
  misc_feature (703)..(704): n is a, c, g, or t
  misc_feature (710)..(710): n is a, c, g, or t
  misc_feature (712)..(712): n is a, c, g, or t
  misc_feature (726)..(726): n is a, c, g, or t
  misc_feature (731)..(731): n is a, c, g, or t
  misc_feature (748)..(748): n is a, c, g, or t
  misc_feature (751)..(751): n is a, c, g, or t
  misc_feature (767)..(767): n is a, c, g, or t
  misc_feature (777)..(777): n is a, c, g, or t
  misc_feature (803)..(803): n is a, c, g, or t
  misc_feature (813)..(813): n is a, c, g, or t
  misc_feature (839)..(839): n is a, c, g, or t
  misc_feature (880)..(880): n is a, c, g, or t
  misc_feature (898)..(898): n is a, c, g, or t
  misc_feature (914)..(914): n is a, c, g, or t
  misc_feature (918)..(919): n is a, c, g, or t
  misc_feature (922)..(922): n is a, c, g, or t
  misc_feature (940)..(940): n is a, c, g, or t
  misc_feature (946)..(946): n is a, c, g, or t
  misc_feature (953)..(953): n is a, c, g, or t
  misc_feature (975)..(975): n is a, c, g, or t
  misc_feature (981)..(981): n is a, c, g, or t
  misc_feature (1030)..(1030): n is a, c, g, or t
  misc_feature (1058)..(1058): n is a, c, g, or t
  misc_feature (1063)..(1063): n is a, c, g, or t
  misc_feature (1164)..(1164): n is a, c, g, or t
  misc_feature (1222)..(1222): n is a, c, g, or t
  misc_feature (1247)..(1247): n is a, c, g, or t
  misc_feature (1348)..(1348): n is a, c, g, or t
  misc_feature (1358)..(1358): n is a, c, g, or t
  misc_feature (1399)..(1399): n is a, c, g, or t
  misc_feature (1541)..(1542): n is a, c, g, or t
  misc_feature (1596)..(1596): n is a, c, g, or t
  misc_feature (1598)..(1598): n is a, c, g, or t
  misc_feature (1602)..(1603): n is a, c, g, or t
  misc_feature (1611)..(1611): n is a, c, g, or t
  misc_feature (1622)..(1622): n is a, c, g, or t
  misc_feature (1652)..(1652): n is a, c, g, or t
  Peptide Sequence Number=SeqID_7320
  Probeset Number=SeqID_14438
ntgctctctcactattncatnacaccgannatntacaancatgncactnctcactncgctcgacatttnntctcancgtcgtgntcgtcangtgtcacgactcatacgactcatgcacgncccacacgatcgtcgactctnctnngctacatgacannnctnncagntcttgncgcgtctcttcancgtnctnnnncttaannctancacanctcagcatacgantanctnctaacgctcttctaacatctcgtnctcgtctctctttgctctnctcgactcacatctcacatcnctctcgncgtctcactatgcantccgctncactgnacactgtnntggcactcagtnctcgntctctccacaccatctcatcatctcatncatcatgcaacannctnntcgccgtgaagnacgactaancancanacacgcaccgatnnctgnntatcaccactacacgtcacgcatcacaatcatacanctcatgaacatcatatcacatcanncagcaccactctaagtgtcatctacactcatctctctctctcgcacacgtctatctactccgacacatgcttccgctcacactanncacaccgctaattcttgctctctctncgnctcancgctncactcatctacacagtgttaacatatgnctnacttnctctcccatnctcgatcgtcananncactccgnnctcgtntnctcatcgtactagntagtntgacgaacatcacactnctncgccggtgctgactancgtcatcatnacgacacgccactctgtcatcatcantcgctacgtnctcatcgtctccacatgcaccctatncacacagatgtcatactgatcactacagcagcacagcaganctctgccactctactcantctctccgtcgcgcanactnnctnagtctatatgcgcatgtncgacancgagcgncaacttacataccaccacctancctganagcacgactacacatcacacactatctctactctctccatagtctattntatactcctattcttcacactacccagnctgtntcattctatctcactgagtcatgacctatgagtcacttgcactaatatagatttgatatacatctattctcgcgtactcttcactcgatctctcatctctnctactctcatagtcttcgtgatgtcatgctctatcttctatactcgtgtattactcgngacacaccacgtccacacgcactcnctccgcttgtcctcacagatgtataccactacagcacacatttaggcactcgacatcaggtgcagcatattcacgacacaactgatcgtgcagattttcanactcccctancttcctcactcctactttatcttcattatatgtgctagtantcacttatgtgtgtttgcataaacaatatactatcaattcacaactagaatcatcacacataatcaatcaaagcattgacatacatatatatttatgtctcgatataaatatttgtaatgctagtttgttcatcttatcacnncctctctatctcacatgtgtctctattctccactatgttctatttttcttatcntncccnntcacactnttaaatatctntaatatatatatacactcatatatataacnaccactcatccatctacgattacacctgtacgagtg

SEQ ID NO: 4660 - DNA, 616 bp, Glycine max
  misc_feature (585)..(585): n is a, c, g, or t
  misc_feature (594)..(594): n is a, c, g, or t
  misc_feature (616)..(616): n is a, c, g, or t
  Probeset Number=SeqID_14439
tcagctacgtaggcccccccccccctcgtccagttctcttctgaggactcccaaaacactgactactccatggattcctcctttgaaatcgatgaaactaacgctcaaaacagttcctctaataagtttaatcaactacgtgagaccatgaaccagctctttatcgctaatccagagctcgctgacgagatgaaattcgagcagtactatgcagctgatgactatcaggtcgagtcacccaaaaatccagcatctcccagaagaacaacaggttctagtaatactgacataccacaggcaaaacctgaagctccaacctcaaattctacttcgacaaaattatggggtgtgatatccaaggagatgactaagacccagaagaacacaaagataccttccctaaaccaaatcaaccacatccttaacatttacaagacaaagcttgataaggccgaacctactgacactagtcctccaaagagatccagcataagaaaagcagcaaaagtcgattttagaattcaaagcgcaaaaatgggtggcgaaaagcaatttggaatcaagcccaaaagtactaagaatggnctaacaggngccttatctccccaaagtaacn

SEQ ID NO: 4661 - DNA, 439 bp, Glycine max
  Peptide Sequence Number=SeqID_7321
  Probeset Number=SeqID_14440
gtctcctgctaccctcttacaaagctctagcttacagatgacgacaaccccttcccaaaggatgtcgaagccttcacgaatgtcgaaaaccttaacgggaacggcggccctgacaaccatcaagaacatcactttcctctatgatgaagacagcaagtttgtgctgcaccacatacaatcagctgatgatgcacaatcttgggatacactctataacgtacatggtggagtcgccttgccatacacactggagaacatcaccttctactgcaaattggctgctggcgccaacggatgtcctgctgggaagctaactgtcaaataccaaaccaaacgagatgctcagcccaacccagacgacctcaaaatatggaaagccacgtctgatgctcttttccaggcctgtgacgcctaccttttgtgcaatcctcattacaac

SEQ ID NO: 4662 - DNA, 1764 bp, Glycine max
  misc_feature (1)..(1): n is a, c, g, or t
  misc_feature (67)..(67): n is a, c, g, or t
  misc_feature (132)..(132): n is a, c, g, or t
  misc_feature (148)..(148): n is a, c, g, or t
  misc_feature (203)..(203): n is a, c, g, or t
  misc_feature (245)..(245): n is a, c, g, or t
  misc_feature (264)..(264): n is a, c, g, or t
  misc_feature (271)..(271): n is a, c, g, or t
  misc_feature (346)..(346): n is a, c, g, or t
  misc_feature (390)..(390): n is a, c, g, or t
  misc_feature (403)..(403): n is a, c, g, or t
  misc_feature (422)..(422): n is a, c, g, or t
  misc_feature (526)..(526): n is a, c, g, or t
  misc_feature (594)..(594): n is a, c, g, or t
  misc_feature (636)..(636): n is a, c, g, or t
  misc_feature (646)..(646): n is a, c, g, or t
  misc_feature (688)..(688): n is a, c, g, or t
  misc_feature (705)..(705): n is a, c, g, or t
  misc_feature (730)..(730): n is a, c, g, or t
  misc_feature (745)..(745): n is a, c, g, or t
  misc_feature (756)..(756): n is a, c, g, or t
  misc_feature (837)..(837): n is a, c, g, or t
  misc_feature (863)..(863): n is a, c, g, or t
  misc_feature (1034)..(1034): n is a, c, g, or t
  misc_feature (1270)..(1270): n is a, c, g, or t
  misc_feature (1612)..(1612): n is a, c, g, or t
  Peptide Sequence Number=SeqID_7322
  Probeset Number=SeqID_14441
ncagtgcgcgctcaccgcaccatcgttgcagtatatagtctgtgtggggtagcacacagacatgatnatacagtcattcgcaatactcgcgcgagcgcgacgcgccgcgcgtgcacacagcatattaaattncgacacgacccaggancacgtcatcgatacatagatgctgatagagtagatatttgatcgcgcgcatgtgnatccgcgcgcgcgtgtgcgcagtgtcatgtgctctcgtcgantttcacaatttaccacgcnacacacnacacacgacgcgacgtcatgtattgtagtgtcgacagcagccgaccacacacgcagcgccgcgagcacgacagangatatgattcgcgaccctgacgatagtcatgattagttgctgcntatatatatgcgngcagcgcggacgcgcatgnctgtcgtcgcgtcgcatatgctcataacccagctatgtgcatcgccgacgtcgcaccgcgcgcgtcatatttatattcgcggtcgagccagcgcgatttgtatnatatatctctactactcacaatatgcctcacgcactacagtactcagagatatgctcgcggtgtgtangtattagtatcggtgcgcgcagcgttccgcggcgcaggacanctactcgtanctacgcgcgcatatattagacgttgtcagcgaggtatctacncaacatgtcacacatcnttatcgtctcatatagtcacacgangttatatacacgccnctggagtgatncatgcatcaagtagatagtcgatgtgtgtaagactaataaccagtggatattgtacgcaagcatacaccgaagcgcgcgcngtatagtgtgactatatgatatcacnccgtctcagtgcgcatctacacgcacgcacttatctgtgctagtattactcgaagttcggactacgaatccgcagctcttcatgtgtgattattatctctccgccacctccattatcacgtgtcgcaggcatgtggtagtggcgaacaagtacccgccctgtaatcatatntttcgtcgcacgacacacgtgtgtttgtgtatcgcacgcgtcctcacacaatataacatacggatcgcggcgaattaaaatatcgggcgggatgaaaacacgaaacggtagtgtagcgcgcgctagaatgtatctgtcaacaaaatttgttagtagtgaatatcactagcacgctcgcaatgtatcgaggcagatatctaaaacagtacgaggatgcgttatcacacccgtccagntcgtggcgtgtgggccgcgggcgaccaaccacacaccgacgcattcgtatatcaacgcgcgcatagataaacccagacgcgtataccgcggtccggaaaatcaaaaaacacaggcgggaggaaggcgtatatattaactatatcaagagcgttcgttcgacggcagccgtgcgtgtaaccactattaaatggtgagtgggcccgtaataaatataggctgagagacaagtccgttgtgagacaaatatctgcggttgactaaggtgtatagaatggtgtgggagcgcggcagatcgtaacatacataggttaaacaatcacccatctccgcggcgagcgagnaactatttaaaattaatatgtatatcagcggccgcacgatccggcgatcgggacacccaccacgcaaaaagcgggcgcggggggggacctggctgcgtaaaaaacgtgggaggcgcgatatacgtcggcacgccagaacggtgcggggcaca

SEQ ID NO: 4663 - DNA, 805 bp, Glycine max
  misc_feature (1)..(124): n is a, c, g, or t
  misc_feature (798)..(805): n is a, c, g, or t
  Probeset Number=SeqID_14442
nnnnnnnnnnnnnnnnnnnnnnnnnnnnnnnnnnnnnnnnnnnnnnnnnnnnnnnnnnnnnnnnnnnnnnnnnnnnnnnnnnnnnnnnnnnnnnnnnnnnnnnnnnnnnnnnnnnnnnnnnnnnagttacactaattccatcttcatgaaggatgagagctgcgtatgaacaaccagtttctccgagcgacattttcacaattcagagaaagcagatcgtagacagtcgaagaacgaagagtgcttcctcgtgccgaattcggcacgaggattccctattcacaattcccaccaaggaaataccgtaaggattgcttctatcattgcaccccagcaatgctaattcctagttgtgttgaaaatgttcattcttgtgaggattggttgccaaggagggtaatgagtgcatggcgcatagctgggatagttcactctttagaaagatggagtacaaatgagtgtaactacaaaatgcataacatagacaaagtttggcgttcaacccttcaacatgggtttcaacctctaactactccaatcaaagagatagcgcattgttaaagaatagtggggaaattaaatcatgaatttgttttactgccttattgttgctctttagatggtatttatccttccgagttatggttagaatttcctacaacaactatgttaagtactactattgtacttaaacaagcaaatgatgtatctttatatatctaacaacttctacatgtttttgttatctttctactatgatatgtaattaaacatttatcttaaaaaaaaaaaaaaaannnnnnnn

SEQ ID NO: 4664 - DNA, 1500 bp, Glycine max
  misc_feature (1)..(4): n is a, c, g, or t
  misc_feature (472)..(472): n is a, c, g, or t
  misc_feature (495)..(495): n is a, c, g, or t
  misc_feature (502)..(502): n is a, c, g, or t
  misc_feature (513)..(513): n is a, c, g, or t
  misc_feature (573)..(573): n is a, c, g, or t
  misc_feature (634)..(634): n is a, c, g, or t
  misc_feature (883)..(885): n is a, c, g, or t
  Peptide Sequence Number=SeqID_7323
  Probeset Number=SeqID_14443
nnnnaagcccatatcaatggctggcccatcggctactgatttgcaaaggactcgtgagttagagaagtttctcgctgcttcggggctttacgagagcaaggatgaagctgccaagagggaagaggttcttcaccggcttggagagatagttaaaagttgggtgaagcaactgacccgccttaggggatacactggtcaaatggtggaggatgcaaatgctatcattttgacttttggttcttatcggcttggtgttcatggtcctggggctgacttggacactttatgcattgggccgtcctatgtaacccgagaggaggattttttctacacattgcatgatatcttagctaacgtggaggaagtcacagaattgcaaccaattccggatgctcatgtcccagttatgaaattcaagtttgatggaatatcaattgacctcctctatgccagtatttctagattgggtttntacctgaagtaagaaatcatttntcttttntctacttattncctgaataaaaagaaatcttctaaatgaaaggggcaagcttccttttatataatcagtgnttttttgtttatcctttggcaatgaaaaattttaaaatgggctttttatcgttcactttgnttttttgatgaatcctagtaggttttctatattcagattgagtgtgcttgatgttattatgaggtcaaagtgacctcatatgcctgactcagcgacctgcatcatgcaagtttttgtgtcatattttggaactttgtttctttttgaatttatgaacaggacttggatatatctgatgtctctgttctacacaatgttgatgagcctaccgtgcgaagtttgaatggctgtagggttgcagatcaaatnnnaaagcttgttcctaatgttgagcactcgcgcccgccacgtcgggccccccccccccccccaattgcaagttgatgctagatcgacgtgcccaattggaaaggttggggggaatcttgccttcaccaactaactttgagggtctaatacacctgttagtaaactcttgtttgttgggctagattttcttccttgactgacactataacaagggtcggcttctgccaggggtaagaaactagatctcgatcatctcccttttcccgggctgcaaccacatcgcattaatcatgggggaccccttcctgtgccattaattgccccttctttgaatactatagatattttttaaatgaatgatgtgctttcacttgttgctctttttttatagtcccatttttgcagtttatcctttttcttttagactgtgctttttgttgttttcccccctttgtgtcccctcctgcctggcgctccggcccgcctcatgcacgtttttgtgtcatattttggaactttgtttctttttgatgaacaggacttggatatatctgatgtctctgttctacacaatgttgatgagcctaccgtgcgaagtttgaatggctgtagggttg

SEQ ID NO: 4665 - DNA, 1555 bp, Glycine max
  misc_feature (23)..(24): n is a, c, g, or t
  misc_feature (28)..(29): n is a, c, g, or t
  misc_feature (298)..(298): n is a, c, g, or t
  misc_feature (304)..(304): n is a, c, g, or t
  misc_feature (329)..(329): n is a, c, g, or t
  misc_feature (340)..(340): n is a, c, g, or t
  misc_feature (363)..(363): n is a, c, g, or t
  misc_feature (374)..(374): n is a, c, g, or t
  misc_feature (751)..(751): n is a, c, g, or t
  misc_feature (866)..(866): n is a, c, g, or t
  misc_feature (889)..(889): n is a, c, g, or t
  misc_feature (944)..(944): n is a, c, g, or t
  misc_feature (1199)..(1199): n is a, c, g, or t
  misc_feature (1212)..(1212): n is a, c, g, or t
  misc_feature (1254)..(1254): n is a, c, g, or t
  misc_feature (1321)..(1321): n is a, c, g, or t
  misc_feature (1343)..(1343): n is a, c, g, or t
  misc_feature (1483)..(1483): n is a, c, g, or t
  Peptide Sequence Number=SeqID_7324
  Probeset Number=SeqID_14444
caccccccaacccccgccgcgcnncccnncacgccgccgcgcaggaaaaaaataaacgacacctcctctcatctctatctatggtatctgcgtactaccttctcttgtcggctctctcatcttatacaaaatgaagcccactatgcgcacatccaccttcacttcctcaccacacctctacctattcagtctctctcgcccgaccaccgacgcgcgtgtctctctcacctctcctgtcacgtttatttctgttcggttgcgccgcttcgccgctgtgtgggtgagagtgtgaatgcgnccaggntccggggggtgagcggcttagcgtnttagaataaanagtgaagtaagagcgggagtgcnacttgtgggtngtgtgagtcgtactggatggtggcgcgggtagcgtaggggcatggtatgtgtggggtgtagctctccgcccgcacgcgtgtgctgatgtggtgctactctctactccgtccgccgccactacgcctcagcgtcgcgcgtctgtgtacacgactaagcaccgtgcgggggtgcggctccaaccgcagcgcgcagctcgtccgcgcgctctccactgacctgtctatcacgcacacggctgtgtctctgctggcgcgaggtgcagacaactggtgcgtcgatctatcggtgccgtgcctgttggcatatatatctcgccctggccataaccatgactgtgcgatgcgtacatacatccacagtgtggtgtagtcgtgangtgcatagtaatcacgtatttaatatgatctacgtgtggtgcaaatggcgagtgtggacgtacctatttagtactacgtagttcgtgggtgtgttggttggactatagttgtgtntatcaatacatgttaatatatcncaggtggcgagtgtcacgaatgacagcgacgctagttatgtgtatgacgctcgtngatgtgcgtcgtaaacagtaagtgttgtgttgttgtgtgtggtgtgtgttagcatattatatctgttatatcattgcaactgcacggcgactcacgagcttcgtacatgatctaccctttatgttattattggtgtgtggtattctcgctagattcgcctgtctcatatagagtgcggtgtggtggcgtgtgtgtacgcgtgttcgtggggtgggacgatatagcacgaaacacacagatatagtagatgttggnagaaagagagcgntctgttacaataaatggtgggtgtagggatgatgttagtgantctgcgttgttatttgtgtgattgtgcgcggcgctcgttgctctgtgtgatgaatacatcggagaanaatgtgggttggtgatgtaganagggtgtgtgtgtgatcggtgtgtgactgtcggcgtggtggtgtggtgctggtgatatcaacagatacacacataatagtgggtggtgacaagacggcgaccgacggcacatacactgatgataatatcatactctttcngttgctattcatacactgtgtccgcgcgacgatgagttgcgcgacgtggcgcgtagatgcagttctgtgtac

SEQ ID NO: 4666 - DNA, 484 bp, Glycine max
  Probeset Number=SeqID_14445
tcgagtcagctacgtaggccccccccccggataccgagctactcacgttagttcgattaacctatcagagctgtttacgcagcacaaaagccatacaaggcgttgtagacgacttgcgtatgcttgcaaacaagattgaggcacctgccattaagaaatcgctgctttctgaactggctggcagcaataacgcagccgaaagtatcaaggttttagtcgcaagcgctgctcaaggccgttctccttgtgcgtttattgaggagatgctccttttcttgcctaaagagcagcttcgactacaactcccatcaatcacacggtctctcgtcgaagccgttgagcggaaaagccggctgccaactgagacatgttggtaccgtctgaatgtgtggctgggtgtcctcgaaaacctcgataacagattcaatgttcgctacactgataccggttatacgaacgccgcctttgtggaagtggttgagca

SEQ ID NO: 4667 - DNA, 428 bp, Glycine max
  Peptide Sequence Number=SeqID_7325
  Probeset Number=SeqID_14446
ctctgagcataacactcttatcaacaatgctctgaactctatatggaccattacactatttccaactccgcattctagtgggctaccccctcctgaacgacggggaaccatttaccgttctgaaccactcacctttgattttaaccccttgaacttccaacatacgaccgtgatcttcaattcaacggcgttctcttgtaataaccaaattctcaatgcatatatccataaattcttcccctctcctaaattcttccgataaatcaatgatatattctcagtctccttccaggtcaaatatcttcaacataactgatgcaagacaatgacacccagattcattagatccaaaaaaagtcatagggaagattgtcatttatgattgaaaaaatgacatttattattcaactgatgataaaattgtcata

SEQ ID NO: 4668 - DNA, 493 bp, Glycine max
  Peptide Sequence Number=SeqID_7326
  Probeset Number=SeqID_14447
cccgtaacccggccctatcccctccctctctgtgcgccgccgctttctcgtctcgcccctcgctctcaggtgcgccgccgctccctcttagcccctccctctccggcgcgcggtcactccctcgtcccccttccctctccgcacaaaaagggaggaaaatggggtgctaggaagaagaggagcacgtgcggacggcaagcagatgcgtggctgctgttgcagctggcctacagcagcgattgcgatcttcctcgaatatgctttggctctacagattttactgcatgtagctacgagagagatggagaggatattgagatgacactcgtggttgctttttgattaaagtttggtgttctatgctgttcaaatttgtgccatatcctttgcaaggattgttaattagtttctctgaaacaaaataggcacactcaaattgctattgtctgctactcctacatctttgtaataattagtggagccattgtttttt

SEQ ID NO: 4669 - DNA, 1438 bp, Glycine max
  misc_feature (5)..(8): n is a, c, g, or t
  misc_feature (22)..(22): n is a, c, g, or t
  misc_feature (24)..(25): n is a, c, g, or t
  misc_feature (29)..(29): n is a, c, g, or t
  misc_feature (31)..(31): n is a, c, g, or t
  misc_feature (33)..(33): n is a, c, g, or t
  misc_feature (40)..(40): n is a, c, g, or t
  misc_feature (67)..(67): n is a, c, g, or t
  misc_feature (98)..(98): n is a, c, g, or t
  misc_feature (111)..(111): n is a, c, g, or t
  misc_feature (151)..(151): n is a, c, g, or t
  misc_feature (153)..(153): n is a, c, g, or t
  misc_feature (180)..(180): n is a, c, g, or t
  misc_feature (195)..(195): n is a, c, g, or t
  misc_feature (203)..(203): n is a, c, g, or t
  misc_feature (209)..(209): n is a, c, g, or t
  misc_feature (262)..(262): n is a, c, g, or t
  misc_feature (292)..(292): n is a, c, g, or t
  misc_feature (327)..(327): n is a, c, g, or t
  misc_feature (359)..(359): n is a, c, g, or t
  misc_feature (441)..(441): n is a, c, g, or t
  misc_feature (447)..(447): n is a, c, g, or t
  misc_feature (508)..(508): n is a, c, g, or t
  misc_feature (635)..(635): n is a, c, g, or t
  misc_feature (746)..(746): n is a, c, g, or t
  misc_feature (748)..(748): n is a, c, g, or t
  misc_feature (758)..(758): n is a, c, g, or t
  misc_feature (933)..(933): n is a, c, g, or t
  misc_feature (1200)..(1200): n is a, c, g, or t
  misc_feature (1272)..(1272): n is a, c, g, or t
  misc_feature (1285)..(1285): n is a, c, g, or t
  misc_feature (1438)..(1438): n is a, c, g, or t
  Peptide Sequence Number=SeqID_7327
  Probeset Number=SeqID_14448
ggggnnnnaacgccgggagcgngnntcangngngggaggngaacgacgagcagagacgcgaagctcnccccttcctcccattatcggtagtatataantataacaaatatnaacgagacagcatgtaggatactatatatctttctcatanangctctttctccctcgctcctacgcaancatcacgtaagacgngccacatnttaagngagtgtgctctcccccacgactgccacaacgactctagacagctaggatctcnatatatctagatatgaggtgcgatacatanatgcatgactgcagccttgagtactaatatatcgncttagcgctgtatatatagatctaagttgctnattatgttagtagtcgccgtcgccatcgagatagctcaatagtacaatcaagatctcgagagacaactcagccatatacagngaagtnccccttcatctagcagatcacagagaacgaagcatgtatgactacgtgctcgtctgacacnagaaatagacatgtagcacgactgtgacgttaggtgtgcacgtatacacacccgctcctacgcgcagattcgatatggctctcagatcccaaagtagacttgagtacagtgactgtgcacaggcatntacgtacaccatcgtgtacaaatgagtatagcagtagctgtaggagacctcgacaacatgagtctgtagcatataaccgttgtggtatcagtcgttgatagcggaagacanancacatacatnattacaagtaggatgattcctggcatcgtcctatctcgagtcaggcctctcggctatacacggataagatagacttgtctctccaacatacgacaagaacatgcaatcccttggtgcaggttcgtgtggggagtgggtgttggcgtacggcacgaggttgtaatcgccccaccanactcatacttataagtctagtggcaagactttaacacctagggaatccgagttctcgatcgcgttccacggagcgtcacacgcgactactatgcaaatacgactccacccgtattgcacaccacgatacacgaagttgtgcagtacacgtcacttataccaatcaaacgtatctcgtacgtacgatactgggatatcgccgcgcctgagcacaccagaaggacatgtaaggccctaagggattgtgttagggtggagaatcgcatancccttcgcaccacgccgcgtgaggatggagaaggtacacggaccaatgtcatgaataagcaccgctccttcnacatataggacanacgaatgacgattgtattctgtcgtagagagtagggtctatgtactgattttatgagcagatcagacaacacaccgatatcgcgcacaatcacgttggacgtagatgtgtaaaacatagcaagatacaaagtctcacagacaacacacacccn

SEQ ID NO: 4670 - DNA, 538 bp, Glycine max
  misc_feature (158)..(158): n is a, c, g, or t
  Probeset Number=SeqID_14449
acagtaatacgttccacaacatatcgcatctgcagccgtgtatgcccagaatacagcagagggagagggttgctgcatcaggcggctgtcgaggctttgtacatgatctgtcatgcaaatgcagggtagcgaacgggggcggaaacatgcttagctgncctctgagcctcaactatgcatcgtttccgtcccacgtctcgtgccattcgtcaacccaggctgagagcgacaaagatacaagccgtactcctcctggggccctccagcggtgtgacaaatggcgcaggtgcatcagcacctgcaggtcagctcgcactgagcgggcaatagcaaagatcggacggagctgagaggatcatgtgttcgctttcagatgggtgcaaaaagtccagcgagaagcggtgtaacaacgttttgaggcgctgggaattgagagacgtcacgtcgttgtgagttccgagctgagacatctctcgcgacacaatgccattgtttggatccgaaacgagggttgttgggcgcaacgtgctatttgaga

SEQ ID NO: 4671 - DNA, 1396 bp, Glycine max
  misc_feature (1)..(1): n is a, c, g, or t
  misc_feature (8)..(8): n is a, c, g, or t
  misc_feature (15)..(15): n is a, c, g, or t
  misc_feature (22)..(22): n is a, c, g, or t
  misc_feature (25)..(25): n is a, c, g, or t
  misc_feature (29)..(29): n is a, c, g, or t
  misc_feature (31)..(31): n is a, c, g, or t
  misc_feature (34)..(34): n is a, c, g, or t
  misc_feature (147)..(147): n is a, c, g, or t
  misc_feature (176)..(176): n is a, c, g, or t
  misc_feature (211)..(211): n is a, c, g, or t
  misc_feature (241)..(241): n is a, c, g, or t
  misc_feature (313)..(313): n is a, c, g, or t
  misc_feature (654)..(654): n is a, c, g, or t
  misc_feature (1061)..(1061): n is a, c, g, or t
  misc_feature (1168)..(1168): n is a, c, g, or t
  misc_feature (1292)..(1292): n is a, c, g, or t
  Peptide Sequence Number=SeqID_7328
  Probeset Number=SeqID_14450
naagattntggtgantatgtanttntttntnctntttataacagtaaaatatcaacaaaacacatataatctattaatagtttcacaaagaatagacacccccatgagtcggctcctcccctccccctatcacatcaacacacaganggcgcaaacaccacaaattggtcgcccgntctcctcgagcgctgctgtgtgatgtctgtatgangtggtagagggcatatgatagagagaatanaagataataatatataaaagaatgcaggacaacgccctgatgagaataataggaagaatgaggataagagantgtatggtcgtcactgatggtggcctgcgtcgcgactgctgtactctgtatcatatgtgatatagaagaagaaagatatagaatagatacacgtctagacccagcacgctcgtgctcagtgaagaaagacaactccactataacgaacagagatgtaagagtgaaagacaagttgaacctatgagaatagtatgaaaggtggcaagttaagagccatgatatcgaccggtgatgctacctgatctgtctgatagatggagcaaccagcagtctgcgtcggacatcgcatagtgaagtactaccgagtatgatattatacagcgccctgccccgctgcgtgngtttatccgcctcgtgtctgctctgtcatgtgcgcgcggcgctgactgagatgagatagatagtggtgcagtattgaccagaagcaatgcgcttcttgtatctacacacccaccccacgatatattgaggagacatgaaactgagaagttggctgatggagacaatggccaatgcactatggtgtgtgtccaagatgtgtgagtataatgcagtactgtaagctattggtatgagataactatatgtgtggtttaggagaagccgaatgcgttagaagtgtaggataagattgatgaatagttgtttgtgctgtgcggcggctgtctccgatggtatatctggttgccatgcacgcacatgatcttagtggatcacaacctacacccagacgaactaccgagagatnaatgtaaatgttgaacgcgatgcacacccaccgaaccaacgtgaccacctgagatcagagatgcgatagatgaaaagtaattaatgatgcacagtagaaatatgatntgatactatacttacgacggttggtacagtctctggcaatgtgcctgcacatatcgcgctcgctcacagagcacagatctatttagtttacagactcatagataattggtagtcactgtattcntcaccaccataggcatgcgatacagctacactcactagtgcacgtgtctacaatagtataatataggatactgttccactctcacatccatgagtctctagctg

SEQ ID NO: 4672 - DNA, 469 bp, Glycine max
  Probeset Number=SeqID_14451
aaaaaaaatcaaaatcgaagaaggagaagagaaacagagaaagagaaagtttgaatcaaaatggctgggagagcttcgatccctgctcgcaactctgccctcatcgctatgatcgccgacgaggacaccgtagttggatttttgatggctggagttggtaatgttgacatcaggaggaagacaaactacctcatcgtggattcaaagacaaccgtgaggcaaattgaggatgctttcaaggagttctcatcgagagatgacattgctatcatcctcatcagccaatacgttgccaatatgatccgtttcttggtggatagctacaacaagccagttcctgcgattctggagatcccttccaaggaccatccttatgatcctgcccatgactcggttctctcccgtgtcaagtacctcttctctgctgaatctgtgtcacagcgttaaacatatatacacattctgcaag

SEQ ID NO: 4673 - DNA, 650 bp, Glycine max
  Peptide Sequence Number=SeqID_7329
  Probeset Number=SeqID_14452
tttttttttttttttttcttttttttttttttttttttttttttttttttttttttttttttttttttccccaactaaaaaacaaaattggttttttcatccccaatcaaaaattacaaacttcatatttgcgcctttggggattgaaaatcaaaactcagggtcttttcggttcataatcccaagggggaaccatacaaaaaacctgaggagctttttttaataaaaaacctttcatggggcccgtgccaaaagatctaaggaaaacaaatttttctggggggtccccccgaaccaaattaaacccacatagggctccacaaaaccttaaaaacctccggtaccccataaaaatcatcatcccctcattatcatcagcaatttggcacccctctggggggactgaggaggtacaaaaatccaaaaaaacattctctgacctctgaaggcccaatttccagaaacaatcgggaaaaagaatacattgtgttttgtcaaaaaaaaaccaaacgcgggttcaccccaaccgaaatccacaaataaccattcccaaacaaaccccgtggccattgatcaattatgggctccaaaatttccttagagaccaccataattgtaaaacttggttgaactttgacaaatatccctaa

SEQ ID NO: 4674 - DNA, 294 bp, Glycine max
  Probeset Number=SeqID_14453
atcgactcaggcgcagccaccaccgaagcagactccggagagcaggcaaggcgaggaccgagatggcgcgcggcgtggcggcggcgtcgttggtggttctttaccgcatctatggtggcggcggcggtattcggtggtggtcatagtcgtgctagcggttttgcaaacttgttaagcttcggttatttgtgtcgagcagtgttcgaactgcttattgctctggtcagcattgtatcgttccgttgtgttggtgaaacttcgtcagttaatgttgctactttatatatgcgtggt

SEQ ID NO: 4675 - DNA, 1662 bp, Glycine max
  misc_feature (96)..(96): n is a, c, g, or t
  misc_feature (131)..(131): n is a, c, g, or t
  misc_feature (205)..(205): n is a, c, g, or t
  misc_feature (330)..(330): n is a, c, g, or t
  misc_feature (752)..(753): n is a, c, g, or t
  misc_feature (1015)..(1015): n is a, c, g, or t
  misc_feature (1037)..(1037): n is a, c, g, or t
  misc_feature (1154)..(1154): n is a, c, g, or t
  misc_feature (1300)..(1300): n is a, c, g, or t
  misc_feature (1324)..(1324): n is a, c, g, or t
  misc_feature (1392)..(1392): n is a, c, g, or t
  misc_feature (1408)..(1409): n is a, c, g, or t
  misc_feature (1411)..(1411): n is a, c, g, or t
  misc_feature (1414)..(1414): n is a, c, g, or t
  misc_feature (1419)..(1419): n is a, c, g, or t
  misc_feature (1421)..(1423): n is a, c, g, or t
  misc_feature (1440)..(1440): n is a, c, g, or t
  misc_feature (1475)..(1475): n is a, c, g, or t
  misc_feature (1512)..(1512): n is a, c, g, or t
  misc_feature (1543)..(1544): n is a, c, g, or t
  misc_feature (1555)..(1555): n is a, c, g, or t
  misc_feature (1557)..(1559): n is a, c, g, or t
  misc_feature (1561)..(1561): n is a, c, g, or t
  misc_feature (1568)..(1569): n is a, c, g, or t
  misc_feature (1571)..(1571): n is a, c, g, or t
  misc_feature (1573)..(1573): n is a, c, g, or t
  misc_feature (1575)..(1575): n is a, c, g, or t
  misc_feature (1578)..(1578): n is a, c, g, or t
  misc_feature (1580)..(1582): n is a, c, g, or t
  misc_feature (1584)..(1587): n is a, c, g, or t
  misc_feature (1590)..(1591): n is a, c, g, or t
  misc_feature (1594)..(1595): n is a, c, g, or t
  misc_feature (1597)..(1598): n is a, c, g, or t
  misc_feature (1600)..(1601): n is a, c, g, or t
  misc_feature (1614)..(1614): n is a, c, g, or t
  misc_feature (1620)..(1623): n is a, c, g, or t
  misc_feature (1626)..(1626): n is a, c, g, or t
  misc_feature (1635)..(1636): n is a, c, g, or t
  misc_feature (1638)..(1638): n is a, c, g, or t
  Peptide Sequence Number=SeqID_7330
  Probeset Number=SeqID_14454
cgcgcggcgcgacagtcttataatatcacgctagtggtggtcgcgatgcagatttcgtatagtatacagcacagtctacgtgagtctgtgcaagancatagcatgagaagagtcggcgtgtgggcgagcgngtgtgagcgtgcatacgatatagcctatcaacacagtagtggcagcagagcgcgcgcgtatattactgaccagnatagaatgagttgcgctgatctcggcgacgttgctgacagagagagtatactgtcgtacaggttgtctagcgtgtcgagctgagtgcggtggtggagagtatgatgacagatgacgatacggaanataccgatgtctgagagacacgagctgcggcgcgctatactctatcagcggttagtagcgtgagatgtagtgtggtagctgcacagtcacatatgctcctctctccggtgtcacgtcgcagctgccccacctcgacctgtggacggtgtgggtcgttgctcgttgtcgcgtgttctcgttgcttcgtcgcgtcatcgcgatgggttctgtgtcgatccttcttcgtatattctatgctgtcgcgtgcggtgaccacagagtggcgtagagtctctaatggaagtgtgcagccgcatacacagaatattgcgtgttcgcggtctattcagtatcgcatgacttataacattacatacatctgagatgagtactacaacgcagcaacgcgcgcgactccacaatcaatactacatgtagaaaannaacaactgtatctcatcgctagcaaggtgcagcaggcatagatcggcacacgacatcactgctttcttataaattatgataactatagcatgattatgtacactcttcttcggcccagcgacactgaacgtcttaagccatcatgcatcattaactctacgtcgaccacgactccgcgtacgatgtgtctagactcatgagtgagctacgccagtgtgctcctatgtagttggcgtgtagtctgcataatcgagagatctcntgtgtatatactatatttgtgngatatgtactttctatattgtgttgagatcgtttcatcattactcctattttgctgttatcggcgttgtcgtattcctatctttgccaggtcctcactcatctcttgacagtatacntgttcgcggccactccctccgtcgtccgctccgcgacgcccgcatcagcgtcttctctgcctctctctcctcatcctcgatctcgtgagtaagtagattaagatgtgtgagtgtagtatagcgagatattgagtgatcgcactgcntcagagagctcgtcatctagcacnctagctctacgcgctccctctttctcgctcgtgttctcgctcgctctcgtctctctctccttcaggcncggggcgtgcgccgcnncntcnacgantnnnagacatccactcccganccaggcgccggccgctggcaggcaccatgtgccancgcagagcgtagcagaccaccagcgcagcaggagacncgccgcgcgcgagatgaggggggggcccggnngagggagggtngnnngngtggggnngngngnganannnannnnaannggnnanncnnccacaaaaacggntagaannnnacnccccccccnnancccccccacccccccccccccccc

SEQ ID NO: 4676 - DNA, 409 bp, Glycine max
  Probeset Number=SeqID_14455
ctttgcaaatggatggtttcattccggggatcttgctgtgaagcatccagatgggtatatagaaattaaagacagatcaaaggacatcataatctctggtgctgaagacatccacagtgtagagatggacaatactctttactcgcgccctgcaatactggaagcatcaatggttgcaagggcatatgacaaatggggcgagtctccctgcgcttttgtgagattaaagccgagagtggatatcagcaatgagcggggctgtcttgatgatatactagaggtctccagaggcgatgtgcctgctcatagggttacgcaagcaattgtgtatgatgccttacatcatacgggtgctgggaagaggcacatgcatatgctgctggccagcgctacagacactggacctgta

SEQ ID NO: 4677 - DNA, 1951 bp, Glycine max
  misc_feature (8)..(12): n is a, c, g, or t
  misc_feature (25)..(25): n is a, c, g, or t
  misc_feature (31)..(32): n is a, c, g, or t
  misc_feature (38)..(39): n is a, c, g, or t
  misc_feature (41)..(41): n is a, c, g, or t
  misc_feature (43)..(43): n is a, c, g, or t
  misc_feature (45)..(46): n is a, c, g, or t
  misc_feature (48)..(48): n is a, c, g, or t
  misc_feature (52)..(52): n is a, c, g, or t
  misc_feature (62)..(62): n is a, c, g, or t
  misc_feature (67)..(67): n is a, c, g, or t
  misc_feature (70)..(70): n is a, c, g, or t
  misc_feature (75)..(75): n is a, c, g, or t
  misc_feature (87)..(87): n is a, c, g, or t
  misc_feature (89)..(89): n is a, c, g, or t
  misc_feature (92)..(92): n is a, c, g, or t
  misc_feature (97)..(99): n is a, c, g, or t
  misc_feature (103)..(103): n is a, c, g, or t
  misc_feature (105)..(105): n is a, c, g, or t
  misc_feature (107)..(107): n is a, c, g, or t
  misc_feature (110)..(110): n is a, c, g, or t
  misc_feature (132)..(132): n is a, c, g, or t
  misc_feature (139)..(140): n is a, c, g, or t
  misc_feature (165)..(165): n is a, c, g, or t
  misc_feature (174)..(174): n is a, c, g, or t
  misc_feature (187)..(187): n is a, c, g, or t
  misc_feature (225)..(225): n is a, c, g, or t
  misc_feature (237)..(237): n is a, c, g, or t
  misc_feature (247)..(247): n is a, c, g, or t
  misc_feature (253)..(254): n is a, c, g, or t
  misc_feature (259)..(259): n is a, c, g, or t
  misc_feature (267)..(267): n is a, c, g, or t
  misc_feature (294)..(294): n is a, c, g, or t
  misc_feature (328)..(328): n is a, c, g, or t
  misc_feature (343)..(343): n is a, c, g, or t
  misc_feature (359)..(359): n is a, c, g, or t
  misc_feature (363)..(363): n is a, c, g, or t
  misc_feature (390)..(390): n is a, c, g, or t
  misc_feature (399)..(399): n is a, c, g, or t
  misc_feature (411)..(411): n is a, c, g, or t
  misc_feature (415)..(415): n is a, c, g, or t
  misc_feature (418)..(418): n is a, c, g, or t
  misc_feature (425)..(425): n is a, c, g, or t
  misc_feature (428)..(428): n is a, c, g, or t
  misc_feature (433)..(433): n is a, c, g, or t
  misc_feature (437)..(438): n is a, c, g, or t
  misc_feature (440)..(444): n is a, c, g, or t
  misc_feature (446)..(446): n is a, c, g, or t
  misc_feature (500)..(500): n is a, c, g, or t
  misc_feature (513)..(513): n is a, c, g, or t
  misc_feature (540)..(540): n is a, c, g, or t
  misc_feature (542)..(542): n is a, c, g, or t
  misc_feature (550)..(550): n is a, c, g, or t
  misc_feature (561)..(561): n is a, c, g, or t
  misc_feature (567)..(567): n is a, c, g, or t
  misc_feature (569)..(569): n is a, c, g, or t
  misc_feature (576)..(576): n is a, c, g, or t
  misc_feature (586)..(586): n is a, c, g, or t
  misc_feature (608)..(608): n is a, c, g, or t
  misc_feature (610)..(611): n is a, c, g, or t
  misc_feature (628)..(628): n is a, c, g, or t
  misc_feature (644)..(644): n is a, c, g, or t
  misc_feature (651)..(651): n is a, c, g, or t
  misc_feature (656)..(656): n is a, c, g, or t
  misc_feature (658)..(658): n is a, c, g, or t
  misc_feature (669)..(669): n is a, c, g, or t
  misc_feature (693)..(693): n is a, c, g, or t
  misc_feature (756)..(756): n is a, c, g, or t
  misc_feature (795)..(795): n is a, c, g, or t
  misc_feature (816)..(816): n is a, c, g, or t
  misc_feature (826)..(826): n is a, c, g, or t
  misc_feature (881)..(881): n is a, c, g, or t
  misc_feature (885)..(885): n is a, c, g, or t
  misc_feature (893)..(893): n is a, c, g, or t
  misc_feature (905)..(905): n is a, c, g, or t
  misc_feature (924)..(925): n is a, c, g, or t
  misc_feature (929)..(934): n is a, c, g, or t
  misc_feature (938)..(938): n is a, c, g, or t
  misc_feature (946)..(946): n is a, c, g, or t
  misc_feature (949)..(949): n is a, c, g, or t
  misc_feature (953)..(953): n is a, c, g, or t
  misc_feature (957)..(957): n is a, c, g, or t
  misc_feature (969)..(970): n is a, c, g, or t
  misc_feature (983)..(983): n is a, c, g, or t
  misc_feature (1005)..(1005): n is a, c, g, or t
  misc_feature (1010)..(1010): n is a, c, g, or t
  misc_feature (1022)..(1022): n is a, c, g, or t
  misc_feature (1036)..(1036): n is a, c, g, or t
  misc_feature (1056)..(1056): n is a, c, g, or t
  misc_feature (1058)..(1058): n is a, c, g, or t
  misc_feature (1084)..(1084): n is a, c, g, or t
  misc_feature (1086)..(1086): n is a, c, g, or t
  misc_feature (1135)..(1135): n is a, c, g, or t
  misc_feature (1152)..(1152): n is a, c, g, or t
  misc_feature (1174)..(1174): n is a, c, g, or t
  misc_feature (1176)..(1176): n is a, c, g, or t
  misc_feature (1200)..(1200): n is a, c, g, or t
  misc_feature (1202)..(1202): n is a, c, g, or t
  misc_feature (1227)..(1227): n is a, c, g, or t
  misc_feature (1229)..(1229): n is a, c, g, or t
  misc_feature (1238)..(1238): n is a, c, g, or t
  misc_feature (1333)..(1333): n is a, c, g, or t
  misc_feature (1344)..(1344): n is a, c, g, or t
  misc_feature (1357)..(1357): n is a, c, g, or t
  misc_feature (1383)..(1383): n is a, c, g, or t
  misc_feature (1394)..(1394): n is a, c, g, or t
  misc_feature (1397)..(1397): n is a, c, g, or t
  misc_feature (1455)..(1455): n is a, c, g, or t
  misc_feature (1500)..(1500): n is a, c, g, or t
  misc_feature (1557)..(1557): n is a, c, g, or t
  misc_feature (1560)..(1560): n is a, c, g, or t
  misc_feature (1617)..(1617): n is a, c, g, or t
  misc_feature (1632)..(1632): n is a, c, g, or t
  misc_feature (1641)..(1641): n is a, c, g, or t
  misc_feature (1655)..(1655): n is a, c, g, or t
  misc_feature (1671)..(1671): n is a, c, g, or t
  misc_feature (1679)..(1679): n is a, c, g, or t
  misc_feature (1725)..(1725): n is a, c, g, or t
  misc_feature (1729)..(1729): n is a, c, g, or t
  misc_feature (1744)..(1744): n is a, c, g, or t
  misc_feature (1753)..(1753): n is a, c, g, or t
  misc_feature (1766)..(1766): n is a, c, g, or t
  misc_feature (1793)..(1793): n is a, c, g, or t
  misc_feature (1795)..(1795): n is a, c, g, or t
  misc_feature (1805)..(1805): n is a, c, g, or t
  misc_feature (1807)..(1807): n is a, c, g, or t
  misc_feature (1812)..(1812): n is a, c, g, or t
  misc_feature (1814)..(1814): n is a, c, g, or t
  misc_feature (1817)..(1817): n is a, c, g, or t
  misc_feature (1820)..(1820): n is a, c, g, or t
  misc_feature (1833)..(1833): n is a, c, g, or t
  misc_feature (1846)..(1846): n is a, c, g, or t
  misc_feature (1883)..(1883): n is a, c, g, or t
  misc_feature (1898)..(1898): n is a, c, g, or t
  misc_feature (1906)..(1906): n is a, c, g, or t
  misc_feature (1937)..(1937): n is a, c, g, or t
  misc_feature (1945)..(1945): n is a, c, g, or t
  misc_feature (1947)..(1947): n is a, c, g, or t
  misc_feature (1951)..(1951): n is a, c, g, or t
  Peptide Sequence Number=SeqID_7331
  Probeset Number=SeqID_14456
tggccccnnnnncccccccccgcgntccccnncccccnncncncnncngcgnctctggcggnccgcngcncgtcnctgcgtctagcncngtncgcgnnngtgntngnctnggggctggcttttcttctctantctaccnntcacacagaaaaaagagcagcaganagagcgcangcagcaacggcancacactgtatgatctgttatattgagtgtagagtattngatatatttatntgttctttcnacaaannaaaanaacagagnagggatgcagagcgtagtagacacagnagtcgacgatgcgcagtagatagcatcactcctntacttacacatcatntactcattctttcatnaatntgtactgtggtgtctagattaccttgnctatttgtntcatcagcgcgnacgngancacatcnatnactantagnntnnnnngnatagaagtacacgatgagcactgagcgtcgctaccggctgatgatgcgatgatnacgagtgacgacntgcgcgcatcggatgtatgatagatgntnacgaatangatgcgatcanccctcncngacaccngcagccggcngagggaacagaaagtatagaanannggtcggcgtcagctctntgtttgatgtgtagtnttattanaacgngnagcgatcgaangacagctgtgagtctgcgcgtggnagtgatagacgaggacgataagagataataatgtagctgaatcatctctctgctcagctcagnctctagtactaccgtgcgagtactcgcatactgggtgangtggtgagcgagtgcgtgcgnagtgtaatgngtgtcggtgcgtgagtgctgcttgtatgtgctgctatatgatgtattgtagtatngtgntttgtatntaatatcatatnatgatacatactacaaatnntatnnnnnntcanattagtantantcanacgnaacgggcaaacnnagacacacgagantcatacacacatatcctatccnctccnatatctacgagnagatattatgcaanagtgtatgacatatgtacgncntcagacccaatccctagatgcgactncntcgatgacatcgataagatgtgatgatgctgacatcacatatatctgantatgtaggtgatagtgntatgtatactcactaccacccncnaggactagatggatgactatagtngntactcacaccatacatcacacactncncactctgantcatgctacactctgctcacacgtcacgttgcacatatatgctgcatgactgactagacagagccgacacgacacttcgatctgtcacgatagcngaaccacaatncgagtgagacatnagacgcggcatacagcgcgtcatcantaacgagatancanatgatagtatgactccacccagctcccactcactcatcctcactacaacgtatagtanctacatatgctcgtgcgtctcgactacgcagccagacagaacccnagtacgacgtggcgcagctgcatttcgcgacgatagctacaagacaaatacctacangancgactatactaatgacgatgtgtcgatatgagatgtgcagtagagatgacgtgtagnatactacacgtgagnagacgctantgtcgaaagcggcntgctgtggtgacagantccagcantgctctactctcgcgatcgatgcgacagtcggcggtagctacagantacntatgagatcgagtgncactgtaancgacatgacgaantacgaccatcagctagcgacgtagcangncatcagtacnangtagntncgntantcactgacagacntagttttaacganctaaaacatgccgtacactagcatgctcacgactagntaaaccgatgatatnactcgatncactgcctttgatgactgctacacatgactngtctcagntncagn

SEQ ID NO: 4678 - DNA, 1740 bp, Glycine max
  misc_feature (71)..(71): n is a, c, g, or t
  misc_feature (163)..(163): n is a, c, g, or t
  misc_feature (219)..(219): n is a, c, g, or t
  misc_feature (269)..(269): n is a, c, g, or t
  misc_feature (379)..(379): n is a, c, g, or t
  misc_feature (484)..(484): n is a, c, g, or t
  misc_feature (663)..(663): n is a, c, g, or t
  misc_feature (722)..(722): n is a, c, g, or t
  misc_feature (1026)..(1026): n is a, c, g, or t
  misc_feature (1179)..(1179): n is a, c, g, or t
  misc_feature (1229)..(1229): n is a, c, g, or t
  misc_feature (1252)..(1252): n is a, c, g, or t
  misc_feature (1271)..(1271): n is a, c, g, or t
  misc_feature (1335)..(1335): n is a, c, g, or t
  misc_feature (1358)..(1358): n is a, c, g, or t
  misc_feature (1517)..(1517): n is a, c, g, or t
  misc_feature (1548)..(1548): n is a, c, g, or t
  misc_feature (1604)..(1604): n is a, c, g, or t
  misc_feature (1608)..(1609): n is a, c, g, or t
  misc_feature (1649)..(1649): n is a, c, g, or t
  misc_feature (1665)..(1665): n is a, c, g, or t
  misc_feature (1705)..(1705): n is a, c, g, or t
  misc_feature (1731)..(1731): n is a, c, g, or t
  misc_feature (1740)..(1740): n is a, c, g, or t
  Probeset Number=SeqID_14457
gtggggtgtagcctgtctgtatgctctctcctactccgtcctcagtcacgttatgctgtcacgtacactantgtataccctcgccagcgacactccagacagagatactagtgagtgatctctgcatcacgtatgtaagaagaggacgacggcaggccacacnataaggcaagctaagacgagtgatatgccctcctgcgcagggttgtagctaaggcnatatatgagcctatgctgttcactgtcgcttgtctatgtgagcatagatngttcaagtcttatcatccttcctgtccgtgtctggacgtatggtcattgcaagctctctggtggttacccattggtgagatagtcctttgtctatgcaggatgcggcggnccagcgagcatactgacggactccacgcgagcacgcgtactatatgacagggacatctcgtggctctacgaccacgccatacgaccagcggtatctaggtgttgncatgtagagtaaacgcgagctctctggtccgttgcatgactcatgtgtgccatagttcatttcacatgcataacaaggaccgcaacaaacgagaagggacgtcgcccgagtcgcctatccgcactcgcacagctgaccgagtgattaagctgttacttccccgtctgacatcctcactnccagataccccgttcacatagccttctctctatcacataggtgagatcgtgtcgctgcnagcgtcgagagtgctaacagatcttccgccgtgatgaataactgtgtcgcgagacatctgtcgatcataccaggctactgccgcgcacgaggcgactgcgcgagactcgccttcacgagtcatcgcgaccgcaactcagcgtctgccctgcgtcgtcgctgattggctccacgctcgtactgcgacctgcctctcgtactctggcgcagcgccgtactcgtcctgcggcatggatcgactcgacgatgcgtacatctcactactcgtaccagctgcgaggcgatcacgcctgtctaccgtaacnacaagcgtctcgcgagcgtctcagcacctccgcctgcagcacttcgacagactgggctcacagacacagcgacatgagggagcaccctacctttcttattatactctctgcccgcatgatggagacctgcctatcgactctcgcgatcatacntcaagcagcacatagctagatgtcatcgtctagatctatgataccactcngctcgcacctgtgacactttacnagtgtcgactactatctcnctctatctcacattgcgatacacactgctatgcgtagactagctcactcctgtgccactctacngatatgctacgctagagcacatngctggttagcgatacacgcacgtgacatgaagcacgctggctcgctgaacgcgcgcgtcgactctgtctgctctgcgcgtacgctactctacatataccagacagtagcgctgcgtagcctgttgctcagcactactcacacacacttcacgctgcgtncactgtctgagtcgagatatcacactgcgcnctgctgccgatggtactgagctcacgcgagccacagcatcatcagattgatgagtntagnnagctgaactacacactagctgcagaggaacgtgctgttgnggacgacagacgaccngcatgtctaatcccgtgcgacgtattatacgatgcagcgnactgtgagattgactatgccgtctcnacctgatcn

SEQ ID NO: 4679 - DNA, 1593 bp, Glycine max
  misc_feature (1)..(1): n is a, c, g, or t
  misc_feature (109)..(109): n is a, c, g, or t
  misc_feature (194)..(194): n is a, c, g, or t
  misc_feature (326)..(326): n is a, c, g, or t
  misc_feature (530)..(530): n is a, c, g, or t
  misc_feature (1137)..(1138): n is a, c, g, or t
  misc_feature (1317)..(1317): n is a, c, g, or t
  misc_feature (1322)..(1322): n is a, c, g, or t
  misc_feature (1325)..(1325): n is a, c, g, or t
  misc_feature (1476)..(1477): n is a, c, g, or t
  misc_feature (1479)..(1479): n is a, c, g, or t
  misc_feature (1481)..(1481): n is a, c, g, or t
  misc_feature (1483)..(1485): n is a, c, g, or t
  misc_feature (1489)..(1491): n is a, c, g, or t
  misc_feature (1499)..(1499): n is a, c, g, or t
  misc_feature (1559)..(1559): n is a, c, g, or t
  misc_feature (1562)..(1563): n is a, c, g, or t
  misc_feature (1565)..(1565): n is a, c, g, or t
  misc_feature (1570)..(1571): n is a, c, g, or t
  misc_feature (1573)..(1573): n is a, c, g, or t
  misc_feature (1576)..(1578): n is a, c, g, or t
  Peptide Sequence Number=SeqID_7332
  Probeset Number=SeqID_14458
nagttatagtagatctagggaatgttgtagctctggattatagacatgattaattgatgcatagtattatagagagttgagtgttagaagtgtttgaggttgttagtgnactacatctacgatatatagagcagcatcctcgtcgtgtaggtgagcggtacgtgcacgctgactgatcaagatacttgacgtanactgtgaggagaagctgctgtgtggtatcggacacagcgtgcgcgatatagtattagtattattatttctttagtagatgttgtgacatcagtcgaaactatttatgtgagagtgtctgcactaatgattantggcgttattgttgatggtatattagtatgtgtgaggcgagaggtgtgctgtcagtaatgtcatgtatattgactcatgtttgtgtgtggtggatgtgtagaggtatttactaactctgttgtcgtgtggtatcatatgttgatgtgtggtgtgtattgtagcaatcgtgttaagtacgcacgtgaccagagatgtgatatcancaactagctactaggcgagagtctgtgcagtgaaccacgttaattaggtgtatgattagtagatttgtgtcttgtgatagttcatataccacctcgagtgagcgatacaactatgatagttagaggtcgcgactgaatcatcaagccgcagcatatcagaataggataatgattgctcaacagcacacgtgtgtacaaaagatgttcaaggtgcagagcatttttttcaattgatcaattgagtagggaatgaataatgtatggtgctgtgtaggtgttacagatctttgatagttagtaagtagaggtggtatgagtattggtggatggagaggaagaaatgagaatgtattacagaatcatgccctatctacaaataagcggatattgaatttataaatgggtgtttagtatttagtaatagatgtgagatagtggtgtctcttatagggatgtaatatgatgtattgaaatcttaatattacacagtatcttgtgatgatttgttatcgctgtgtgatgcgggagggcgcgtgccataaatgagtgtggttagacgctgtgtataaagtcatagaatagaaagaaacgacagatatatatgaanncaaacagcgcatagagcgaacgatgcccctctcaacgtaacgaatgacgtgatagaggtgatgttggtgacatcgcgcgttgagatgtatttatttaatgggtagtgttatagatgtatgttgtgttcgctaagtgttctctaaatatcagtagtgcacagtaaaaaacatcactaatncattnaantttatctcctctagtaatgataacacgctttgcggggtagagataatcacgagagatgataggtgaggagaaggcggagcggtggtgtatgcggtgtggtatggggtgtgtatgtgtagtatttatgaaagtgggagggtgcgtaaccagnntntntnnntttnnntatatttnaattgagttggattatatattctggtatttttcgttttaatatcgagtagtgtggtgganggnnanaatcnnanttnnnagacaacttcaacac

SEQ ID NO: 4680 - DNA, 549 bp, Glycine max
  Probeset Number=SeqID_14459
cagcaagaactagcaattgttcaccaattaaggtttcaagaagttttaagaaaatgggttccaagggtgttgcatccgttgccctaattctgctctccctcaaccttcttttcttttccatggttagctctagcacccctccccgtgttgcccctccctcgatgtgtgcccctgtcaggcgaccaccgccaccaccaccgcgccaaccaccgccattgccaccgccccttgtctcgccaccgctaccaccctctaacacaatatgatcaccaccctgaggccgctgtctttggaatcaattagcgttgaaccataagttgtggacgcaaaacgacgactaccccttgcaattaagaacagaatatgtatgacacccatcatcattttctgttgtgttacttcgtatcattgtgtgtttgttcgtgtgtttaaatttaaggataattacctttcgtgcctgctacatatgcacatgcatagtttcaatggacggattctataatattaccaataaattaacgtccgtacgtattaataaataaatgtgtt

SEQ ID NO: 4681 - DNA, 1928 bp, Glycine max
  misc_feature (12)..(12): n is a, c, g, or t
  misc_feature (17)..(18): n is a, c, g, or t
  misc_feature (21)..(21): n is a, c, g, or t
  misc_feature (23)..(25): n is a, c, g, or t
  misc_feature (27)..(34): n is a, c, g, or t
  misc_feature (43)..(50): n is a, c, g, or t
  misc_feature (85)..(87): n is a, c, g, or t
  misc_feature (144)..(144): n is a, c, g, or t
  misc_feature (189)..(189): n is a, c, g, or t
  misc_feature (231)..(233): n is a, c, g, or t
  misc_feature (263)..(263): n is a, c, g, or t
  misc_feature (378)..(378): n is a, c, g, or t
  misc_feature (385)..(385): n is a, c, g, or t
  misc_feature (417)..(417): n is a, c, g, or t
  misc_feature (443)..(444): n is a, c, g, or t
  misc_feature (492)..(492): n is a, c, g, or t
  misc_feature (688)..(688): n is a, c, g, or t
  misc_feature (717)..(717): n is a, c, g, or t
  misc_feature (750)..(750): n is a, c, g, or t
  misc_feature (833)..(833): n is a, c, g, or t
  misc_feature (870)..(870): n is a, c, g, or t
  misc_feature (881)..(881): n is a, c, g, or t
  misc_feature (889)..(889): n is a, c, g, or t
  misc_feature (962)..(962): n is a, c, g, or t
  misc_feature (983)..(983): n is a, c, g, or t
  misc_feature (1000)..(1000): n is a, c, g, or t
  misc_feature (1006)..(1006): n is a, c, g, or t
  misc_feature (1010)..(1010): n is a, c, g, or t
  misc_feature (1022)..(1022): n is a, c, g, or t
  misc_feature (1024)..(1025): n is a, c, g, or t
  misc_feature (1046)..(1046): n is a, c, g, or t
  misc_feature (1049)..(1049): n is a, c, g, or t
  misc_feature (1052)..(1052): n is a, c, g, or t
  misc_feature (1054)..(1054): n is a, c, g, or t
  misc_feature (1088)..(1088): n is a, c, g, or t
  misc_feature (1140)..(1140): n is a, c, g, or t
  misc_feature (1166)..(1166): n is a, c, g, or t
  misc_feature (1169)..(1169): n is a, c, g, or t
  misc_feature (1184)..(1184): n is a, c, g, or t
  misc_feature (1231)..(1231): n is a, c, g, or t
  misc_feature (1265)..(1265): n is a, c, g, or t
  misc_feature (1276)..(1276): n is a, c, g, or t
  misc_feature (1483)..(1483): n is a, c, g, or t
  misc_feature (1543)..(1543): n is a, c, g, or t
  misc_feature (1551)..(1551): n is a, c, g, or t
  misc_feature (1553)..(1553): n is a, c, g, or t
  misc_feature (1556)..(1556): n is a, c, g, or t
  misc_feature (1574)..(1574): n is a, c, g, or t
  misc_feature (1589)..(1589): n is a, c, g, or t
  misc_feature (1615)..(1615): n is a, c, g, or t
  misc_feature (1621)..(1621): n is a, c, g, or t
  misc_feature (1626)..(1626): n is a, c, g, or t
  misc_feature (1629)..(1629): n is a, c, g, or t
  misc_feature (1657)..(1657): n is a, c, g, or t
  misc_feature (1706)..(1706): n is a, c, g, or t
  misc_feature (1765)..(1765): n is a, c, g, or t
  misc_feature (1830)..(1830): n is a, c, g, or t
  Peptide Sequence Number=SeqID_7333
  Probeset Number=SeqID_14460
gggggagggagnggggnngtnannnannnnnnnntacaatacnnnnnnnncagacggaggtacgaacacaacataaccacaccannnacccccacgaaacaacaccgaagagtccgaacgagctatcacaatataacaaataanggtatatagaagaagtgcgcaggaaaataacagacacagagtctntataagaccatcaaagagcagtgatatgatatgaggtttccnnnccacgccagacatataccctatgagagctntgctatgcacagcaatgctcgcgtcgcctcgcgcggctcttctcttcacctcaccaacatcttgcaagccgatcatatgcttgttctaattctagatgtcaccacccgacgcacntccctantatctactacccactcaatcgatctccttacngtctctctgtgagagatgtacgacannatgatatctatctcatgtccagacataatgactgataactcatcaccntatactatcagatacacataatacatagacatagagcaaacatacaacaccataatcacatagtatcaacgtctttatctagcaggtgcgcgctcacacgataaccattaagcactagccacagtgctcagcacatatcatatgagagagaggctcgatcgtcctccccgctccaccacacgtatcctacatagcnaaggcgcggctctcctacttgatgactcntctgcatctcttccgcctcacattcacgtgcgncacactacgctactccgccccacgtcttcatgctaattgtgtactctgcctgatgggttctgtcagtctccaccacgtctctngcgtctcacaacgacaacacgatctatgtgcgtgtcntgtaatgattnacgagctnatgcaggtaggagagagatagagagacgcggctactgtggcatagcgcgatattctacgctatctctacgctngagagtgagtggtataggaanagagggagaaggaaaanaataangatnaatacaatagantnnagtatataatatcgatacaanggncananacatgactgaataaccaacatctaagacactganacataaatcaccaccaccgcccgcgcgcccgcctgactgctgcgcggtatantatctaggtgtgattgtagtgcgtgngtntgagttctgtgtganagaatcaactacacacccactacgtactcatgtgatgatgtattagngacagagagatatgatatcgagatcctggaagangagaatggaancatgcagcgaagtagaatgcagggtgacaccgtggcctacacgagataacatctgctatgtgctgcgaccactcacggacatccatgactcagcgactatagtgtagtatgatatgaataagtacgagcatagtgccacagcgacgatacactctttgacataccgtatcaactctcatgacatgtcgttcacgcacgcgacagtgnacgctcatctctctcatacgtcgtacgtgctatcgtgcgcgcgcacaccgactacagcanactgcatncntcncgtcgcgatcgttcacanatgaactctctacantatctatcatctgatcagactcgatntctctntgtantanctactcgatctctcatctcaattaattnatatacatatatacgtctacaaaagtatgacattgtgagagaatcgtangtgcatagtctacgccgggatgcaaccgataaggataaagcctactgcgccactgatcnagtctacatctgatattacacgactagacgataggtcgttgcgagcagacgacagagcgtggctntactctgtctactggacatttctcatcaacgaacgtcactgcaatcagattatactatgataaacacatcgatataatacatagtatacatcactgag

SEQ ID NO: 4682 - DNA, 748 bp, Glycine max
  misc_feature (1)..(3): n is a, c, g, or t
  misc_feature (748)..(748): n is a, c, g, or t
  Probeset Number=SeqID_14461
nnncctaatcgaaaaaaacactcagtactcgcactgtacgacatggccgtctaccgactcaccttcgcactgctcatcgcctccaccctggtattaggggacaaacaagaagaacctaacgccatcctacagttttttaacgatatcaatgacaagttccaaaatgcgacacacgctgttgagggcatcttaggcgtggacattccctctacccaagcagaggtcaagacagctcttgaagacaacttgaacaagctcaagtcaaatgctgaacatttgcaaaagaagctgggagagtacagcagctctggcaacaccacgctctcaggactgctgcagcaagtccagacccaggtcaatcaaaccattgaagacctcggaaagcgaaaccctgaaaccggcaaacttctggagcagataaaaactggttacaacgatctgttgggcgtgagcaagaggatgcaggaggtggtggagcagcaggcaggtagcgcctctcaggacctcaagggcctggcacaacaggcgcgctccgagctccaacgcgcaactactcagctcgaggccaagattcatgatttagtggcggacaaaagcaagacttcctaatcatgcactcgaggtcttgctatctatcaccactaacagctccatttcctcagattattcctttcttcatttatatatgctcatcatttctaaaactattggacgttaggaacattttctgtaaaaaataaaattgttn

SEQ ID NO: 4683 - DNA, 1876 bp, Glycine max
  misc_feature (1)..(1): n is a, c, g, or t
  misc_feature (32)..(32): n is a, c, g, or t
  misc_feature (53)..(53): n is a, c, g, or t
  misc_feature (69)..(69): n is a, c, g, or t
  misc_feature (89)..(89): n is a, c, g, or t
  misc_feature (112)..(112): n is a, c, g, or t
  misc_feature (117)..(117): n is a, c, g, or t
  misc_feature (138)..(138): n is a, c, g, or t
  misc_feature (173)..(173): n is a, c, g, or t
  misc_feature (179)..(179): n is a, c, g, or t
  misc_feature (184)..(184): n is a, c, g, or t
  misc_feature (187)..(187): n is a, c, g, or t
  misc_feature (237)..(237): n is a, c, g, or t
  misc_feature (248)..(248): n is a, c, g, or t
  misc_feature (276)..(276): n is a, c, g, or t
  misc_feature (284)..(284): n is a, c, g, or t
  misc_feature (286)..(286): n is a, c, g, or t
  misc_feature (300)..(300): n is a, c, g, or t
  misc_feature (306)..(306): n is a, c, g, or t
  misc_feature (316)..(316): n is a, c, g, or t
  misc_feature (323)..(323): n is a, c, g, or t
  misc_feature (335)..(335): n is a, c, g, or t
  misc_feature (342)..(342): n is a, c, g, or t
  misc_feature (349)..(349): n is a, c, g, or t
  misc_feature (386)..(386): n is a, c, g, or t
  misc_feature (466)..(466): n is a, c, g, or t
  misc_feature (469)..(469): n is a, c, g, or t
  misc_feature (544)..(544): n is a, c, g, or t
  misc_feature (561)..(561): n is a, c, g, or t
  misc_feature (563)..(563): n is a, c, g, or t
  misc_feature (567)..(567): n is a, c, g, or t
  misc_feature (593)..(593): n is a, c, g, or t
  misc_feature (690)..(690): n is a, c, g, or t
  misc_feature (693)..(693): n is a, c, g, or t
  misc_feature (706)..(706): n is a, c, g, or t
  misc_feature (772)..(772): n is a, c, g, or t
  misc_feature (790)..(790): n is a, c, g, or t
  misc_feature (844)..(844): n is a, c, g, or t
  misc_feature (851)..(851): n is a, c, g, or t
  misc_feature (854)..(854): n is a, c, g, or t
  misc_feature (956)..(956): n is a, c, g, or t
  misc_feature (1002)..(1002): n is a, c, g, or t
  misc_feature (1004)..(1004): n is a, c, g, or t
  misc_feature (1040)..(1040): n is a, c, g, or t
  misc_feature (1077)..(1077): n is a, c, g, or t
  misc_feature (1219)..(1219): n is a, c, g, or t
  misc_feature (1237)..(1237): n is a, c, g, or t
  misc_feature (1260)..(1260): n is a, c, g, or t
  misc_feature (1340)..(1340): n is a, c, g, or t
  misc_feature (1476)..(1476): n is a, c, g, or t
  misc_feature (1498)..(1498): n is a, c, g, or t
  misc_feature (1514)..(1514): n is a, c, g, or t
  misc_feature (1653)..(1653): n is a, c, g, or t
  misc_feature (1672)..(1672): n is a, c, g, or t
  misc_feature (1852)..(1852): n is a, c, g, or t
  Peptide Sequence Number=SeqID_7334
  Probeset Number=SeqID_14462
natatgtcagtactctagacatgacgatgacntggagtgagtcgactagcgtnaagtaattaacacacnagctctacgacgaagcaagnaatgttcgcagagactcggacgngaagnacgacagagacggcggagtgngagtagaagcgtctgctatgcagcgtagattactntatatngtganagnctcgaaggactaatagactactatgaaagtttgattggtatatatgtcancgactgtaacnttcacacgtgtgtcaatacgatcatatngcatgagnantgagtcgtcgtcantcagtngcatgatacnaacatantgtcatatagtngtaggangtgatanatacgtcagtctagtcactagatatgcgtgtatcagntgacgttgcaaacgacggtacatacagtgtgaatgtgatagtcgtctagcagagacagagcgctagagtagacgatgatnccntatatcatacggacaggtagcacgatagagtcgtctagtgtgctgtatatgatgactatatgtagtcgtgatcgnatatatctcgctgcgcngnggtngggagagtagtgaagcggcgcggcantatgtctaatatattataacagtagtacgagctgcgcaaatagagacgtgctatcacgatagagatgtgactatcacgtcgctgcgcgcgagtgatngcnactgtacgatgtntcatgtagagttcgatatatgtgaagtatgatcgagtgaacatccatcgtgatagcagggcgcatngagtgtaatgtatattgnagtatatgcagtactgcgagagtatccgaggagatcactcggctatgtgtaagnatggcantancaatagggtaggttaggcacgtgaagtgcgagagtatgcgtacatactggtagcgatacatctatacatagcggtcacgagatctcggtgtcacgtgtgttntcgcgtactcgtcgggaaatagtactcacacgacagcgatacacgnancgacagtagcatggtgtatcgtagtgatatgttaanatagagagtgttactaatgtatatgtgatatagtagnagaggaatgtgagtacagtagtaacgagcgaagctgatacgggatacgcgtacataccaatcaacagaagtatcagcgatcggcgacaccacgtagacgatgagcacataggtactacacacatcagacaagtaaggagcgntctgaactcataggatgngattcttcgttcagtgtcatgtnggtagtagcagatgtcgcagagtatcttacagcgctaccatatcgatacacgagtgtagatgcatcagagtaagctatantaccgatctcactctgcatagacagtatatgagacatgaatgtctatatgatacgagatcacgcgtgagatagattcatattcatttgtctatgtgtgtgtaggttgtaatggaatggatacgaggacatgcgtantcacatctcgctcgcgtctganttgtctcatgatgtanagtatatagtagctctcgttgtcatagatgcaacctcattagtgctcgcgctagtccgatggccgcgcgggcaagagcatagagcgaaatatggactatgtagaacatagccaacatataggtgtcgcttagtggaganacaggtaatatagagacangggatgtctgctcgagtcgaagacgcgcgtaggggaggattctcaagcatatgtcatgctgaggatcgcggcgcgccgtctccgcgggagcgagggagaggccttcatacgcatatgtacgaggcgtgagagggtggcaatagcgctcggtgtgcgagagagataccaacgtagaagagnaagagaaaggtatggagtgagggt

SEQ ID NO: 4684 - DNA, 506 bp, Glycine max
  Probeset Number=SeqID_14463
ggccggaataaaccgccgggtacgcgagtcacagtggttccgcgtgcaggccttcgtgtttcttagtcttccactttgccttatcataaactttcctcttctggcatacgctatcggatgcattggaccatgcagaaccctcaacgactgcgacggccaactcatttgcatcaacggaaggtgcaacgacgaccgcgacggcggagcccacatatgcggcggcggaaggcctctcaaatccgccaccacgcggtggaagctgccagtcctcgggaaccctaaattgctgcggataatcgtatcctcagtaccgttgctctccgccggttacttgctctacgccggcgatcctgacgctgaacgacttcaccgaatgctgcgacggacgggacccgtcgcagcgctgcgagaagttccataccttcacggagcgggtggaggcactctcctctgggtggctcgacggcggttggctgcgtttggcactgatctggacactggcgggg

SEQ ID NO: 4685 - DNA, 1352 bp, Glycine max
  misc_feature (94)..(94): n is a, c, g, or t
  misc_feature (96)..(96): n is a, c, g, or t
  misc_feature (133)..(133): n is a, c, g, or t
  misc_feature (141)..(141): n is a, c, g, or t
  misc_feature (154)..(154): n is a, c, g, or t
  misc_feature (220)..(220): n is a, c, g, or t
  misc_feature (222)..(222): n is a, c, g, or t
  misc_feature (234)..(234): n is a, c, g, or t
  misc_feature (249)..(249): n is a, c, g, or t
  misc_feature (252)..(252): n is a, c, g, or t
  misc_feature (288)..(288): n is a, c, g, or t
  misc_feature (324)..(324): n is a, c, g, or t
  misc_feature (329)..(329): n is a, c, g, or t
  misc_feature (362)..(363): n is a, c, g, or t
  misc_feature (408)..(408): n is a, c, g, or t
  misc_feature (410)..(410): n is a, c, g, or t
  misc_feature (467)..(467): n is a, c, g, or t
  misc_feature (486)..(486): n is a, c, g, or t
  misc_feature (498)..(498): n is a, c, g, or t
  misc_feature (501)..(501): n is a, c, g, or t
  misc_feature (550)..(550): n is a, c, g, or t
  misc_feature (599)..(599): n is a, c, g, or t
  misc_feature (910)..(910): n is a, c, g, or t
  misc_feature (1287)..(1287): n is a, c, g, or t
  misc_feature (1294)..(1295): n is a, c, g, or t
  misc_feature (1305)..(1305): n is a, c, g, or t
  misc_feature (1321)..(1322): n is a, c, g, or t
  misc_feature (1324)..(1324): n is a, c, g, or t
  misc_feature (1328)..(1329): n is a, c, g, or t
  Peptide Sequence Number=SeqID_7335
  Probeset Number=SeqID_14464
cctatagtccatttacaatacataagacgtgtacagtctatcaggagtgatctcaggtctctccgcctgctactgaaccatcgtaaatggtgangncagtatctacccactccgcagaggcgtgcacaaacanatacatgnccacaaaggaaangaagcaagctacctggccaggtacacaacaggcaggccggagtgacaacgacctcgctgcgcgcangngatgcgctcttnaggtcggctctgatnaanaactcctttgctgcgccaccacggccgcaccgcganagcacacacgcggccggcgagcgcgtcaataaaganagggnaacggcgcgatcagtggagaaagacccgtgccnncgcggcgcaaacacacgcgcgggagaccagtccgcccaacaccgncnccacacgagtgtctgtcacatatcggcaccggatatgactgtagacagcaatacacncacaagcgacggcgtcatncaaggtggtgangcncccctcaagcacacgacgccaagccgcgtgtgctaggctcagccgcgtngtaacgcatacactcctggggtcgctcacgccaccccgtgctccagtcnctccgcgtcgcgctaaactatgttctagataatgtgaagaaacactaaccgctcgcggacacttatcttatacacacaacacacaaacgactagtcgcgcatacgctctcgccatggccacgcccgcccccgggctcaggtaataacacacaagtggtaatcaatataatgtctgttagctgtgagtgctgaaatgcaataacaggtttcataataagggcttgcgaatcaccgcgaccactatactatagactctctctttgtcactaatcagctaggctactccccacctcgcgttgcctagtcagcancaatgcgcattcagctccagcgaaactgacccccagcgcggagcgctcgcaacacaggttaaacatcttcgaactctctcaatacaagaattattaataataaattactaactcagtagctttgtttacaaggctgcatgtaatgatccttatagagactacgagaaggaatacggggataaggcacataagcaacaatcaccatcccactgttccctagcaaacgacctcccctggggaggtggtgggtcccttttccgtattccctgcacccaggaaggggagggggcccccggccccaccctatgacggaggcgaacgatcggatgggggggggcgtcaaacaaaaacaacatcaacacaccctccgccacgtntgagaannaattgctaanaaagaaaactacgagnngnacannaaaaaaaaacgcccacacaaaac

SEQ ID NO: 4686 - DNA, 1425 bp, Glycine max
  misc_feature (1)..(5): n is a, c, g, or t
  misc_feature (19)..(21): n is a, c, g, or t
  misc_feature (23)..(24): n is a, c, g, or t
  misc_feature (26)..(26): n is a, c, g, or t
  misc_feature (28)..(35): n is a, c, g, or t
  misc_feature (37)..(39): n is a, c, g, or t
  misc_feature (42)..(43): n is a, c, g, or t
  misc_feature (46)..(46): n is a, c, g, or t
  misc_feature (48)..(49): n is a, c, g, or t
  misc_feature (52)..(55): n is a, c, g, or t
  misc_feature (79)..(79): n is a, c, g, or t
  misc_feature (83)..(83): n is a, c, g, or t
  misc_feature (205)..(205): n is a, c, g, or t
  misc_feature (318)..(318): n is a, c, g, or t
  misc_feature (359)..(359): n is a, c, g, or t
  misc_feature (608)..(608): n is a, c, g, or t
  misc_feature (657)..(657): n is a, c, g, or t
  misc_feature (708)..(708): n is a, c, g, or t
  misc_feature (772)..(772): n is a, c, g, or t
  misc_feature (830)..(830): n is a, c, g, or t
  misc_feature (840)..(840): n is a, c, g, or t
  misc_feature (890)..(890): n is a, c, g, or t
  misc_feature (1123)..(1123): n is a, c, g, or t
  misc_feature (1320)..(1320): n is a, c, g, or t
  misc_feature (1425)..(1425): n is a, c, g, or t
  Probeset Number=SeqID_14465
nnnnnttggggggtgtggnnncnncncnnnnnnnncnnnccnnccngnnggnnnntggggtgcccactctccttccaancccngcgcacagcggtggagtgtggattctgataggcgttcacagggcggaatactaccgcatcgcgcatcagcacaatcgtatagagatagtatgcttgtttgcgtgtgtcagagctacaactanatattccgataggataaagccatagcgcagcacatgatattgatctaacgcgcatacagcagcccacatgcgcctacaccaccgcttgatctcgctcatgacactcgttagcngagagagagaaacgaggcgaggactagtagatctgcgatgnttgtgggtcgttgtgtctgcctcctaccgtgcgataagagtcccactagcgcggaacgcacaccgagccagctcccgccgtctctcggactacggagtgcgccgaacagcgccctcctgccgtgcacctgcgacatcgctcacaacaattccacacctctcgacccaccatcgtgacaccactaatatgtcatcctcgtgagtagtgctctgactatcaacaatgcatggagtatggtagaggtgagangaggtggaagtgattagagcgaaggagagagcaatcaaaaatagaaaanaaatacaaaaaaaaacacttcacgtgaacgaccacaacccacaacacaacnccacgccgcggcccggcggcgcaccacatcagatcatcggtctgtgtctatgccagagaccagncgagtggtggtggtataatgtataaggatagaaagcgagccactgaggcagaaatatnaacacactanctcatacccaccccccacaccccccccctctctcacgactatcacagctncttgcttgtcacgtccttcctactctctgcttactcctctgttagtcatataatcgacatgacaccaccctaccactcgctctacgcacacgccgtgtgagaggatagagtccgctcgcgcgccgcgacatacgtccgcgggcgtaccgtgcgcagcagcgcagacgcatgacgacgggccgcgctagatggcgtagcagtacacccacgagcgctgtgtgtaccaccaccancatcacacgctgatgagtcgctagtcgtcgcgcagggagccgtcgcagcatcggcggctcgacgacggagttcgagccttgtgtatacgtcgtgtgcgtgacgctgtgcatgctgcgtcgagctgtgtgcactgatcataccaccacgcaatacgacacacccaaccagctacgtcatgcgcaggacgcactacatncatgacactatagcgtgagtgtaatgacatgtctcaccacacgacacaacggacgctgcgtcgccactacacctgcgcgcgcacagcgcgctgacacctcacgcn

SEQ ID NO: 4687 - DNA, 403 bp, Glycine max
  Peptide Sequence Number=SeqID_7344
  Probeset Number=SeqID_14466
ccgttcgaaacaaactgctcggaagtgcacatgaggaaaggctcctaagaagcggttcgcatccaaggctgcccgttactgtgcgccaactactggtggtgtgaagaagccacatcgctatcgttctggtaccgatgctcttcttgagattaagaaataccatatgagtaccgagcttttgatcacgaaggttcccttccaaaggctggttcgagaaattgattaagacttcaagactgatctgcgttgccagagccttgctgtgcttgcattgcgcgaagctggtgaggcataccttggaggactctctgaggatactaatctgtgtgccattcacgctaatcgtgtaactattatgcccggagatatccatctggcaagaacgatccgtggtgagcgtgct

SEQ ID NO: 4688 - DNA, 545 bp, Glycine max
  Peptide Sequence Number=SeqID_7345
  Probeset Number=SeqID_14467
gacatgaaggacgtcttgggccacaagagatgcgttcctttcaccagattcagaaaccacaccggtagaactggtcaagctaaagaattcggcttcactcaaggtagatggcccgaaaagtctgtcaagctcatcctcagcttgttacaaaacatccaatccaacgctgccgtcaagggactcgaagaagacaagttggttgtgagccatgttcaagtcaacagagctcaaaagggtagaagaagaacttacagagcccacggtagaatcggaccttacctttcctcaaactgccacatcgaattgttctgcaccacccaagaaactgacgtcaagaaggaagccaataaaaacgccgtccccagacttagcaagaaacaaatcgccaagactagactcagaactggtgaaaactaaataatgtgaggtgagtgagttcaggtgaaatggaaaaaagttcgtatatattggaattaacgttggcatgatcttttgcttatataaaatgcatcccatcataaaacaataagacacgcaacatatgg

SEQ ID NO: 4689 - DNA, 1577 bp, Glycine max
  misc_feature (13)..(13): n is a, c, g, or t
  misc_feature (30)..(30): n is a, c, g, or t
  misc_feature (111)..(111): n is a, c, g, or t
  misc_feature (830)..(830): n is a, c, g, or t
  misc_feature (919)..(919): n is a, c, g, or t
  misc_feature (1230)..(1230): n is a, c, g, or t
  misc_feature (1233)..(1233): n is a, c, g, or t
  misc_feature (1286)..(1286): n is a, c, g, or t
  misc_feature (1297)..(1297): n is a, c, g, or t
  misc_feature (1307)..(1307): n is a, c, g, or t
  misc_feature (1388)..(1388): n is a, c, g, or t
  misc_feature (1400)..(1400): n is a, c, g, or t
  misc_feature (1418)..(1418): n is a, c, g, or t
  misc_feature (1468)..(1468): n is a, c, g, or t
  misc_feature (1471)..(1471): n is a, c, g, or t
  misc_feature (1538)..(1538): n is a, c, g, or t
  misc_feature (1552)..(1552): n is a, c, g, or t
  misc_feature (1577)..(1577): n is a, c, g, or t
  Peptide Sequence Number=SeqID_7346
  Probeset Number=SeqID_14468
acacacttacatncattcaatatatattanaatatttatatgaacagctactagtgtgtagttggcgacatcaaccgcaacaacaagatatggcagtcgcgtgtcgctgangcgcccgccacgcacgcgactgctgcgttgtgtgggggggatcgcgaacattcatgctcttagcgtcgcgaccgtgtgcaccggacgcggcgccgtcgacctcccctctgcgacgcgcacacaactctagagttgcacagtccgtcgcgttgtacccagttgacaggtaagttctgcgatactgcatcctgccacaccgcccgccgcagcgccgcacgctcgcagcacgcagcgaaaaagacaggcacagttaggacctgtctctgtactccgctcgacgctcccgcattactcctctctcagcgcactctccaaatatacaccacacgatatattagcctctcggccgtcgcgcatattaatgagtggtcgacatgcctagcgtacattatataataatataatctatgtatcagaagtgtataccaattgagcataggagatgtgatatacctgtggcgtgaggcgccagcgtgggtacaagagaatactgaaaagcatgaatatctaagtggaatgagagtagtaagtaagtggcagatagtgcgtgctcgattagcaccgttatagatcgtcgctgcatgagcgccacatactcatacgtggtgacccgctagaagcgttgatgcctttgcgtactttacctatctataatagggcggtaacatcggacacatatacgagatgtacctcgataccagaacacgatggggaggcgncgtgagtcatcgatgctttctctttcatccgtatcgccctgcttctgtctgcacggattggcctatgcgtctcacatacgtgagatctntgtacgagagtgaagaccttgcatgcgtcgtgcgaattatatatttattatgatatgttatgtagagatgataatcactttatacgcaaaacataaccatcgcgagcgctgctatgattcgtgtacagccatctcgttgatggcgcgacgcgttgcgtctcatcttcactgcgtactattatatcaatccgcgcacacacaacgatcattatcgtccatatatcttatcaatatgtcagcgtctgtcctctactcgcatacgcggtgtgacagatatatggcgcacatgcgtagtcgctacatgatatatntanatgttgtatcacatacatgatcactgacatgcgcacgttgtatgtatatatantatctctattnagcgtgtcgncgtctcatctcgagatctcgcgcgccaccactatcgctgatcggtcgcgcgtgatgactggtgcatctcactcgcgagtcncactacgatctncgcacgcgagttggttgnccgcgcttaggctctgcgctgcccatcgacgacgacgagtaccagcacgnacncgacagcgtcgcgtcgtctgataagcatcagtactactgatatgagtgctcgatcaatactcactgntacactgagtaatnacgcgtcgttacatacatcgttttn

SEQ ID NO: 4690 - DNA, 2048 bp, Glycine max
  misc_feature (1)..(1): n is a, c, g, or t
  misc_feature (8)..(8): n is a, c, g, or t
  misc_feature (40)..(40): n is a, c, g, or t
  misc_feature (58)..(58): n is a, c, g, or t
  misc_feature (84)..(84): n is a, c, g, or t
  misc_feature (111)..(111): n is a, c, g, or t
  misc_feature (144)..(144): n is a, c, g, or t
  misc_feature (148)..(148): n is a, c, g, or t
  misc_feature (188)..(188): n is a, c, g, or t
  misc_feature (192)..(192): n is a, c, g, or t
  misc_feature (271)..(271): n is a, c, g, or t
  misc_feature (313)..(313): n is a, c, g, or t
  misc_feature (429)..(429): n is a, c, g, or t
  misc_feature (467)..(467): n is a, c, g, or t
  misc_feature (496)..(496): n is a, c, g, or t
  misc_feature (539)..(539): n is a, c, g, or t
  misc_feature (688)..(688): n is a, c, g, or t
  misc_feature (807)..(807): n is a, c, g, or t
  misc_feature (936)..(936): n is a, c, g, or t
  misc_feature (943)..(943): n is a, c, g, or t
  misc_feature (955)..(955): n is a, c, g, or t
  misc_feature (1000)..(1000): n is a, c, g, or t
  misc_feature (1406)..(1406): n is a, c, g, or t
  misc_feature (1435)..(1435): n is a, c, g, or t
  misc_feature (1574)..(1574): n is a, c, g, or t
  misc_feature (1647)..(1647): n is a, c, g, or t
  misc_feature (1739)..(1739): n is a, c, g, or t
  misc_feature (1761)..(1761): n is a, c, g, or t
  misc_feature (1801)..(1801): n is a, c, g, or t
  misc_feature (1855)..(1855): n is a, c, g, or t
  misc_feature (1886)..(1886): n is a, c, g, or t
  misc_feature (1930)..(1930): n is a, c, g, or t
  misc_feature (1934)..(1934): n is a, c, g, or t
  misc_feature (1938)..(1938): n is a, c, g, or t
  misc_feature (1944)..(1944): n is a, c, g, or t
  misc_feature (1950)..(1951): n is a, c, g, or t
  misc_feature (1959)..(1963): n is a, c, g, or t
  misc_feature (1981)..(1981): n is a, c, g, or t
  misc_feature (1990)..(1990): n is a, c, g, or t
  misc_feature (2008)..(2011): n is a, c, g, or t
  misc_feature (2014)..(2015): n is a, c, g, or t
  misc_feature (2018)..(2018): n is a, c, g, or t
  misc_feature (2021)..(2021): n is a, c, g, or t
  misc_feature (2028)..(2032): n is a, c, g, or t
  misc_feature (2037)..(2038): n is a, c, g, or t
  misc_feature (2048)..(2048): n is a, c, g, or t
  Probeset Number=SeqID_14469
ncacacancagcaaagagcatatgaggcagagtatagacntagcgagatacgcgaggnccatagcgacaccatcatagacggcncgcaaaccagacacactgctatcagcntcatgtgagatgtcgacgacagacgagatacgngcgncgcagagtggactcgtacgctcgcatcggacagatcgtcntgtncgcatctcgatcacgttcaccagacgagttggaaactacgcgtcgactatatgacaaacactgaccacacatgctgcancagcagacatcgcacaaagtgatgatgaacggaatgatagtnaggcagagcaagtactgtcgcacaagtataggcagcgtgcgcatgactgtacgctacactcgtacagcaccggcacacgataagatccatacagtcacgctaacagcagcgtcgcnccggtcgagacgcagcgcgagcgcgcgagagtgagcancgcaccagcacgacgcgcgacagagacangcgcgccagaagagtgtcaaacgccattacaaggcagcacgcnggtgtcaagacagacaggagacaacagtgaccagggcagagcgcgacgtacaagagacatatcgcaatgagttacatactatatatatatatataaagaagtagaagatcataaataattgagtgtgagcacaggagagtatgaagagnaactcgcaccacgtgttcgcgctgcgctgtcagacatgtacttcggagtgatgacgacggcacgctgcgcgagcgtgcagcacggggctacggcgcgtaccgagcagcagaggtatcanctactcgagcaacacgatgcagaacacatcacaacagagtcgaggagtatacgcgcgagtgacaccacgagacatagagcgagacgaaacatcagatcacgacagcgcgtgagatcagagaacgtcacngcccgtnatcgacagtcantgtgtctgatgctgtactccgagagcgactcacacggcgcagcanacgtcagaatcactgtcgttcagtcgacagtactctaccataagtgcactcacctaatacgtagcgctatcggctgctcaagcatcatgcgagcacatatcgccatagagagaatggatggagcaagaatgagaagacagagcaacggcgtcggcgcgatacgaccgagttgtaggcaaattatgagacaaacgaacatacactgacgagaggatcaagtgaaagagcgaatgcaatagagagacatgtgcagcaggcatgctacacgaacccacagaggtgcgatagctacgagataggaggaagagcgtcggacgcgagtcccgcagcgcgttatgtatgctgcgtcatctctcgctagaacacgagagaacaacgcagcaggcctgcgaacgctcgactaganagacaagatgacgcgctgccgctgcagcncggccgtcgcgctcgtcagactcgccggtgatcggcgctttgtcgacagagcgcgtgaatgcgtggtgcgccgtctcgtcggtctgcagcgagctctgcgggatgcaagtgggcgagcttcaggcatggctacgggcgngccactcacgcgggtcggcgatgcgcggtggcgcggcgcgtcgcggcgctagcgagctcatcctatcgtctcnccctactccgcacctcgcctaccatcatcactcggctcacacacgaagacgagcacgaagacgaagagaaatgatagagtggtgtagaaganagagaggtagctagagagtganaggcgatacgcgccccacacaagcacgccagctccgcgcncgaccgcgctatacactacgtgcgcgactccgccgcgcccagcgtcgcaccgcnctagagatgagagctgaagaggatgatcagngcatgctccacactacgtcagcgtgacaccacccaccacctcanctcnctcncaccgngcgcgnngcgcgcgnnnnncgcgcgcgcgcgcgcgcngcgggcggncggcgcgggggcgcgggnnnnggnnggnggnggggggnnnnnccggnngggggggggn

SEQ ID NO: 4691 - DNA, 441 bp, Glycine max
  Peptide Sequence Number=SeqID_7347
  Probeset Number=SeqID_14470
acggcggcgagaggacgacggaaggggaacctggtttcttttctccgcctttacccttcccttcacagaagcgtaaaaccaaaaggcttgactagagaaggagagagagagagcttcgaatcgaaactcagaagtagaaggaagcacaaatcacaatcgctatggctaggtacgaccgagcaatcaccgtgttctcccctgtcggccatctctcccaggtcgagtacgccctcaaagccgtccgcaagggcatcgccgccgtcggcgtccgcggcaccgacaatgttgtcctatactaagaaactacaaatccaccgtcaaactccaagactccatgtcggtgaggaagatattgtttcagaactaccactttccatttccttgagctgggccttaaagccaacattatagtggttattcgttgagcacgtgtggagtgcc

SEQ ID NO: 4692 - DNA, 2460 bp, Glycine max
  misc_feature (1)..(1): n is a, c, g, or t
  misc_feature (16)..(16): n is a, c, g, or t
  misc_feature (59)..(59): n is a, c, g, or t
  misc_feature (64)..(64): n is a, c, g, or t
  misc_feature (88)..(88): n is a, c, g, or t
  misc_feature (110)..(110): n is a, c, g, or t
  misc_feature (113)..(113): n is a, c, g, or t
  misc_feature (120)..(120): n is a, c, g, or t
  misc_feature (150)..(150): n is a, c, g, or t
  misc_feature (161)..(161): n is a, c, g, or t
  misc_feature (163)..(163): n is a, c, g, or t
  misc_feature (178)..(178): n is a, c, g, or t
  misc_feature (187)..(187): n is a, c, g, or t
  misc_feature (195)..(195): n is a, c, g, or t
  misc_feature (224)..(224): n is a, c, g, or t
  misc_feature (238)..(238): n is a, c, g, or t
  misc_feature (284)..(284): n is a, c, g, or t
  misc_feature (289)..(289): n is a, c, g, or t
  misc_feature (310)..(310): n is a, c, g, or t
  misc_feature (323)..(323): n is a, c, g, or t
  misc_feature (326)..(326): n is a, c, g, or t
  misc_feature (330)..(330): n is a, c, g, or t
  misc_feature (339)..(339): n is a, c, g, or t
  misc_feature (349)..(349): n is a, c, g, or t
  misc_feature (366)..(366): n is a, c, g, or t
  misc_feature (370)..(371): n is a, c, g, or t
  misc_feature (385)..(385): n is a, c, g, or t
  misc_feature (405)..(405): n is a, c, g, or t
  misc_feature (432)..(433): n is a, c, g, or t
  misc_feature (457)..(457): n is a, c, g, or t
  misc_feature (462)..(462): n is a, c, g, or t
  misc_feature (492)..(492): n is a, c, g, or t
  misc_feature (494)..(494): n is a, c, g, or t
  misc_feature (500)..(500): n is a, c, g, or t
  misc_feature (512)..(512): n is a, c, g, or t
  misc_feature (514)..(514): n is a, c, g, or t
  misc_feature (517)..(517): n is a, c, g, or t
  misc_feature (533)..(533): n is a, c, g, or t
  misc_feature (544)..(544): n is a, c, g, or t
  misc_feature (547)..(547): n is a, c, g, or t
  misc_feature (569)..(569): n is a, c, g, or t
  misc_feature (579)..(579): n is a, c, g, or t
  misc_feature (594)..(594): n is a, c, g, or t
  misc_feature (606)..(606): n is a, c, g, or t
  misc_feature (623)..(623): n is a, c, g, or t
  misc_feature (643)..(643): n is a, c, g, or t
  misc_feature (651)..(651): n is a, c, g, or t
  misc_feature (670)..(672): n is a, c, g, or t
  misc_feature (674)..(674): n is a, c, g, or t
  misc_feature (677)..(677): n is a, c, g, or t
  misc_feature (703)..(703): n is a, c, g, or t
  misc_feature (706)..(706): n is a, c, g, or t
  misc_feature (710)..(710): n is a, c, g, or t
  misc_feature (744)..(744): n is a, c, g, or t
  misc_feature (780)..(780): n is a, c, g, or t
  misc_feature (786)..(786): n is a, c, g, or t
  misc_feature (791)..(791): n is a, c, g, or t
  misc_feature (804)..(804): n is a, c, g, or t
  misc_feature (810)..(810): n is a, c, g, or t
  misc_feature (829)..(829): n is a, c, g, or t
  misc_feature (832)..(832): n is a, c, g, or t
  misc_feature (834)..(834): n is a, c, g, or t
  misc_feature (843)..(843): n is a, c, g, or t
  misc_feature (853)..(853): n is a, c, g, or t
  misc_feature (860)..(860): n is a, c, g, or t
  misc_feature (869)..(869): n is a, c, g, or t
  misc_feature (890)..(890): n is a, c, g, or t
  misc_feature (913)..(913): n is a, c, g, or t
  misc_feature (922)..(922): n is a, c, g, or t
  misc_feature (930)..(930): n is a, c, g, or t
  misc_feature (938)..(938): n is a, c, g, or t
  misc_feature (956)..(956): n is a, c, g, or t
  misc_feature (958)..(958): n is a, c, g, or t
  misc_feature (974)..(974): n is a, c, g, or t
  misc_feature (978)..(978): n is a, c, g, or t
  misc_feature (981)..(981): n is a, c, g, or t
  misc_feature (989)..(989): n is a, c, g, or t
  misc_feature (1015)..(1015): n is a, c, g, or t
  misc_feature (1035)..(1035): n is a, c, g, or t
  misc_feature (1047)..(1047): n is a, c, g, or t
  misc_feature (1056)..(1056): n is a, c, g, or t
  misc_feature (1075)..(1075): n is a, c, g, or t
  misc_feature (1077)..(1077): n is a, c, g, or t
  misc_feature (1084)..(1084): n is a, c, g, or t
  misc_feature (1087)..(1087): n is a, c, g, or t
  misc_feature (1098)..(1098): n is a, c, g, or t
  misc_feature (1110)..(1110): n is a, c, g, or t
  misc_feature (1202)..(1202): n is a, c, g, or t
  misc_feature (1217)..(1217): n is a, c, g, or t
  misc_feature (1249)..(1249): n is a, c, g, or t
  misc_feature (1269)..(1269): n is a, c, g, or t
  misc_feature (1276)..(1276): n is a, c, g, or t
  misc_feature (1292)..(1292): n is a, c, g, or t
  misc_feature (1296)..(1296): n is a, c, g, or t
  misc_feature (1310)..(1310): n is a, c, g, or t
  misc_feature (1327)..(1327): n is a, c, g, or t
  misc_feature (1341)..(1341): n is a, c, g, or t
  misc_feature (1382)..(1382): n is a, c, g, or t
  misc_feature (1419)..(1419): n is a, c, g, or t
  misc_feature (1424)..(1424): n is a, c, g, or t
  misc_feature (1453)..(1453): n is a, c, g, or t
  misc_feature (1495)..(1495): n is a, c, g, or t
  misc_feature (1507)..(1507): n is a, c, g, or t
  misc_feature (1509)..(1509): n is a, c, g, or t
  misc_feature (1513)..(1513): n is a, c, g, or t
  misc_feature (1547)..(1547): n is a, c, g, or t
  misc_feature (1560)..(1560): n is a, c, g, or t
  misc_feature (1573)..(1573): n is a, c, g, or t
  misc_feature (1575)..(1575): n is a, c, g, or t
  misc_feature (1577)..(1577): n is a, c, g, or t
  misc_feature (1582)..(1582): n is a, c, g, or t
  misc_feature (1589)..(1589): n is a, c, g, or t
  misc_feature (1593)..(1593): n is a, c, g, or t
  misc_feature (1600)..(1600): n is a, c, g, or t
  misc_feature (1642)..(1642): n is a, c, g, or t
  misc_feature (1658)..(1658): n is a, c, g, or t
  misc_feature (1679)..(1679): n is a, c, g, or t
  misc_feature (1686)..(1686): n is a, c, g, or t
  misc_feature (1713)..(1714): n is a, c, g, or t
  misc_feature (1730)..(1730): n is a, c, g, or t
  misc_feature (1859)..(1859): n is a, c, g, or t
  misc_feature (1868)..(1868): n is a, c, g, or t
  misc_feature (1879)..(1879): n is a, c, g, or t
  misc_feature (1882)..(1882): n is a, c, g, or t
  misc_feature (1886)..(1886): n is a, c, g, or t
  misc_feature (1888)..(1888): n is a, c, g, or t
  misc_feature (1895)..(1895): n is a, c, g, or t
  misc_feature (1902)..(1902): n is a, c, g, or t
  misc_feature (1910)..(1911): n is a, c, g, or t
  misc_feature (1980)..(1980): n is a, c, g, or t
  misc_feature (2035)..(2035): n is a, c, g, or t
  misc_feature (2064)..(2064): n is a, c, g, or t
  misc_feature (2080)..(2080): n is a, c, g, or t
  misc_feature (2084)..(2084): n is a, c, g, or t
  misc_feature (2086)..(2086): n is a, c, g, or t
  misc_feature (2089)..(2089): n is a, c, g, or t
  misc_feature (2106)..(2106): n is a, c, g, or t
  misc_feature (2117)..(2117): n is a, c, g, or t
  misc_feature (2121)..(2121): n is a, c, g, or t
  misc_feature (2148)..(2148): n is a, c, g, or t
  misc_feature (2157)..(2157): n is a, c, g, or t
  misc_feature (2171)..(2171): n is a, c, g, or t
  misc_feature (2229)..(2229): n is a, c, g, or t
  misc_feature (2244)..(2244): n is a, c, g, or t
  misc_feature (2313)..(2314): n is a, c, g, or t
  misc_feature (2317)..(2317): n is a, c, g, or t
  misc_feature (2348)..(2348): n is a, c, g, or t
  misc_feature (2353)..(2353): n is a, c, g, or t
  misc_feature (2379)..(2379): n is a, c, g, or t
  misc_feature (2400)..(2400): n is a, c, g, or t
  misc_feature (2414)..(2414): n is a, c, g, or t
  misc_feature (2416)..(2416): n is a, c, g, or t
  misc_feature (2427)..(2427): n is a, c, g, or t
  misc_feature (2434)..(2437): n is a, c, g, or t
  misc_feature (2444)..(2444): n is a, c, g, or t
  misc_feature (2448)..(2448): n is a, c, g, or t
  misc_feature (2457)..(2460): n is a, c, g, or t
  Peptide Sequence Number=SeqID_7348
  Probeset Number=SeqID_14471
natctgtcgcgagtcngacgtatgatcagtatgagccactcgtccggcagtcactacgnattanctgctcgtaccatcacgcactgantagatttattagcttgctgtcngtnctgtacngagtgcatcagtagtcgagcagtccgatangattatcgacnancggcgcgggtgagcngtatgatgnatatccgnatcttcataattctatctcagtatagtgncgtatcctacatcnctgatcatcgggtagtctgacgtcattgacctatcgatctgcatcnttcgnacagcttgattacatagctcngtttactacgtangtngtangttagtganttgacagtancaacatatacgtcgttnatgnnacagctacatctangtattgatgtcgtctgctanaattcatggtgatgatgatacccgatnntgagtaagtctactatcatccgtncgtgnattgatagtaaatcatagtctcatcggttntnatcacntgctactcagtncncancaaatcatgtcgactngcagcgctacnacngtcatcgtcgatatactagtanttcgatgctngtcgcactgcattcntatgatcactgngttgagatctgagcagntcggcgatggctacagtacnttagcgtnctctacttaagtcgagctnnntnacngtcagtcagtcgtcgtgcatgcagtngcntacngttcttacggatgagtagccatcagcgactacgntacatcatcactcgacgatgcgtcgtcgtgtcgcgntctcanccatncgcgcagcagcgnccatgnatctgtgactgtcgtgtantgntntgtggttgnattcggcatnactacgntacgtcatnagtctatcagcgttcccgtanggacgtcgatcggttgatcagtngagcttctncatcagantcggtcangtcgtgcatcatcaccantncgtcacgacctcacgntcanctncgtgctantacgtttgtcgagtgcagtgcagagncgagtagtactatgtcgtgnagatggggtgtngtgtcatantaagatgtgctgcagtcananacgagtngtnagttttcgatnctatatcatcantgtagatgctgctatgagtcgagtctcgtgtcatgtgacatcagcgactcagtctctcatacataccagagtcagtgtggcgtcgtgtacgntctctagccctcganttcgtgtttcgtagtatatttagtgatcatcntcgtgagattgataccagcngtaattnagatgcgtcgcgatgnacanagagcgctcatgtnatatattacatcagtcngcaatcacgtgagncgtagtagagagatgcgtacgagatagtcgatgtgtagtangatactgatgagtaatcagacgtagcgcgagtgcatnctagnacgtcgatagcagagtatgatagcacatntcgtagcaggaagactgtatgtagatcgtcgaggtagaggcngtgtgggtagangngatnaagagatatggtagtcaatggtactgtacgcacnttcatgacgatgntttgacgagtgcncncntcctntctacanacangagatantgtacacacgctgcacacatatcgacgcatgatcgtcgtacnatgataatcgtgtgcncatatgtacggattatgttcngacagtnatacagacatactgatcacatcactannagcagtcagctacatntactagtttacagtcatgagtagggagagcgacgagaagctggagcgtgtacagcacacacagcgctccacactgtcagtacatgtcagcacagtgcgcacgcgtcacatatgcagatatgagctgtanttatatatnggatgttgcgngtntgtntnatgagtnttgactnctctgcanntatcgtactgcgtcattgcgtgctctatcattactgtctatcagctatgtgtccgtatcttgtcgtcantaattgcaccacggcgtgtgatagtacgcgttcgctccatcctacatccgctcgncatcttcgtgcagttattacgatacagtntcgctcatctctcctncctncnatnagagtggtggtgtgcgncgtctacgaanaatnccatccaccacatacaacacaccatcncacggcggngcagcgtagtcgtntctgtcatcatgagctactcactatgatagatggttgtatgatatgatgcgtgcgtancttctccctcacttnttatgtctgtgttatgtattattgtacatggtcgcagttgtgtcctatcctcacccacctcgcacaacnnaancacaccggaggggacacgcccacgctacgcngagcnccagcaccatcccataactacactanataaaagcactacaccccgcnacacgagacacacngnacacaacacanaacacannnnacacaanaggnaaaaaaaannnn

SEQ ID NO: 4693 - DNA, 722 bp, Glycine max
  misc_feature (601)..(722): n is a, c, g, or t
  Peptide Sequence Number=SeqID_7349
  Probeset Number=SeqID_14472
aaaaaaatatccttttcctaacaccacggctttttctccccctatacaaaaacccccagccttttaaaatggggtacttcccgggggacccgggggtcaatatttttccccccaaaccctatcctttttaaattaacccaaaacctgaacatcttccccattatgggaaccagtttgaaagaaacgaaaacccccgacggaaggaattggagatttttccagcgacgaaagcgcgatcttaggcgtcctctcggaaccagtcggtggcggagaccacgttcggcatggaggacgaaatccggtagctccgaagcacgtttcgagctgtcgtcgacggacctcgacaaggctccgcggtagcttctcagatcggcgtccgtttcggcatctccgtcgtcgtcttcgtcgtcggaggtggcgagaggtttgcggcggagttcgacgaggcggtggaggacgtggtcgacggtgtggcggtggatgtagaaggcagagagggccatgaaggaagcgccgagcagcgcggcaatggcgaggtgaagagagggagggagcgaagaggagggatccattggaggaagtgatcagtaatgatgatgannnnnnnnnnnnnnnnnnnnnnnnnnnnnnnnnnnnnnnnnnnnnnnnnnnnnnnnnnnnnnnnnnnnnnnnnnnnnnnnnnnnnnnnnnnnnnnnnnnnnnnnnnnnnnnnnnnnnnnnnn

SEQ ID NO: 4694 - DNA, 482 bp, Glycine max
  misc_feature (31)..(31): n is a, c, g, or t
  misc_feature (210)..(210): n is a, c, g, or t
  misc_feature (247)..(247): n is a, c, g, or t
  Peptide Sequence Number=SeqID_7350
  Probeset Number=SeqID_14473
tttttttttttttttttggtttggttttttnaattttcattacaaattttagcacacaaatttcccaccaaagtcctaactacaactactaatttcttagcttgtaatttgggtatttcatcatctaatgtttcaattacatttaaaaataattccacttgtcttttcaattctttggtattagaaataatattgtctacttcttgtggngggtacattccactgcagatttcatcagtgtatttanaaatcatatcagccaaaattaaactctcttctaatttatccactactcccaattcgctttcaattttattattatttgtttcatttaattttaaactcactctctctaaaagagtgtaatttgcttttgcgaattgagaaacaggtcctactctgtttttctcttctggggaaagttcttcttcttcgaaatcatcctcactaaattccccagcctccaacaatgcctggacctc

SEQ ID NO: 4695 - DNA, 464 bp, Glycine max
  misc_feature (386)..(386): n is a, c, g, or t
  misc_feature (393)..(393): n is a, c, g, or t
  Probeset Number=SeqID_14474
aaaaaaccctaaaatctcatttcacttcactgcgcctcccacactcaacaaaacaagagccgaaaccacaaactctaacaaccatgccgcccaagttggacccgagccagatcgtcgacgtctacgtccgcgtgaccggaggagaagtcggagccgtcagttccctcgcccccaagatcggtcccctcggtctcgccccaaagaagatcggagaagacatcgccaaggagacagccaaagagtggaaaggactccgcgtcaccgtcaagctcaccgttcagaaccgtcaggcgaaagtcacggtggttccgtccgccgctgctctcgtcatcaaggccttgaaggagccggagagagacaggaagaaggtgaagaacatcaagcanaatggcnacatttcgtttgatgacgtgatcgagatcgctaggatcatgaggcctaggtcgattgcgaaggagctgagc

SEQ ID NO: 4696 - DNA, 423 bp, Glycine max
  misc_feature (223)..(223): n is a, c, g, or t
  Peptide Sequence Number=SeqID_7351
  Probeset Number=SeqID_14475
actcacaaagcctcgatgtatggtaattatatcttccctcaaactgaaggcacaggcctcccaaacccttcaccctacttctgctcaaaccttggttcttctccactaccgactaactctttgtttacaaactttgctattccatacaggtcccaagctgagtacattcgcccgtacctaagaaaagcctcaagcttttcactctcagactcatacccttgtntactctgcacacacagcactttggtaccactgttgtgtgccagatatcacaatctctgccgctgaaacacactcccatcagctaaaccgtgaaagctcataatacagtgacctcagtggcactttggacattacctactccaacctaaggatgtgtctctcaagaggaagcccttctataaccgctcttgtgacatctcc

SEQ ID NO: 4697 - DNA, 445 bp, Glycine max
  misc_feature (384)..(384): n is a, c, g, or t
  Peptide Sequence Number=SeqID_7352
  Probeset Number=SeqID_14476
tttttttttccgatccgataatggcctctctattcaacaatgctaacggcgttctcggaaaatccgagaagctcattatcgacaccgaccctgggatcggttagttttcacttttttttaccgactctgcttttactctcttcgtttatttactactttttcccttcattttttttataagaacacttgaaaaactgacggaattcacttgtgaaattggagttttaatttgcaatattttggattggagatgccagatgaagatgattttgattgatgagaatcgatcttagaatttccttgtattgatatctggattgtgacttttcattggttttttgaaaagtagtttattgtttcattagtgagataggaatggcattnttgtgattctgcagatgatagcatggctatttttatggcttttcaaagtccagacgtggag

SEQ ID NO: 4698 - DNA, 735 bp, Glycine max
  misc_feature (56)..(56): n is a, c, g, or t
  misc_feature (64)..(64): n is a, c, g, or t
  misc_feature (76)..(77): n is a, c, g, or t
  misc_feature (94)..(95): n is a, c, g, or t
  misc_feature (123)..(123): n is a, c, g, or t
  misc_feature (183)..(183): n is a, c, g, or t
  misc_feature (723)..(723): n is a, c, g, or t
  misc_feature (729)..(729): n is a, c, g, or t
  misc_feature (732)..(732): n is a, c, g, or t
  Probeset Number=SeqID_14477
gagtgagcgagcgatggaagaagaagattttgatttcgagaagaaggtttcgatanaaggaatnccgatgtcgatnngtcgatcgtcgacaganngcttgactccagccaaagttctgtcttnttgcttgcgtggtttcactccaaattcagcaaccgcaggggccgaagcatatatctaagnactcaaaagtgggttttctgactacatggcctctggaggggaattggcttacaagcagctctgcagtgaaatcacaatagagtttaacaattgctcgaaaaaagtcctttgaaatggagtccctgtttagaagccctgaatactgccgagttgatctagcgcagcttcttagagctgttcaagatcaggaaaagccagaaccttcactgactgccaccattcaggtgtttaagaaagccggggccccatctgatcgtctggtaagcccttagacttgccaaatgtccatgccagcagagcatgagtgcgttcatgtttaggagaatacagaagcttctggtactgagaagcttgcacatatgcttggtatggcagtgcgtctacagaagctatagaggtgtccagaatgctgcgtggccgatagtaacatcgtgaagaaagcaatgatgagattgctgccttggagcgaagtgatcctgtgcacttatttactagccatgttggacttcattcttattcagatcattatacattgcctgngaatgnatnctc

SEQ ID NO: 4699 - DNA, 1573 bp, Glycine max
  misc_feature (36)..(36): n is a, c, g, or t
  misc_feature (158)..(158): n is a, c, g, or t
  misc_feature (253)..(253): n is a, c, g, or t
  misc_feature (264)..(264): n is a, c, g, or t
  misc_feature (303)..(303): n is a, c, g, or t
  misc_feature (342)..(342): n is a, c, g, or t
  misc_feature (348)..(348): n is a, c, g, or t
  misc_feature (350)..(350): n is a, c, g, or t
  misc_feature (369)..(369): n is a, c, g, or t
  misc_feature (393)..(393): n is a, c, g, or t
  misc_feature (517)..(517): n is a, c, g, or t
  misc_feature (597)..(597): n is a, c, g, or t
  misc_feature (647)..(648): n is a, c, g, or t
  misc_feature (716)..(716): n is a, c, g, or t
  misc_feature (759)..(759): n is a, c, g, or t
  misc_feature (761)..(761): n is a, c, g, or t
  misc_feature (780)..(780): n is a, c, g, or t
  misc_feature (882)..(882): n is a, c, g, or t
  misc_feature (887)..(887): n is a, c, g, or t
  misc_feature (891)..(891): n is a, c, g, or t
  misc_feature (944)..(944): n is a, c, g, or t
  misc_feature (965)..(965): n is a, c, g, or t
  misc_feature (1042)..(1042): n is a, c, g, or t
  misc_feature (1081)..(1081): n is a, c, g, or t
  misc_feature (1128)..(1128): n is a, c, g, or t
  misc_feature (1170)..(1170): n is a, c, g, or t
  misc_feature (1285)..(1285): n is a, c, g, or t
  misc_feature (1339)..(1340): n is a, c, g, or t
  misc_feature (1400)..(1400): n is a, c, g, or t
  misc_feature (1412)..(1412): n is a, c, g, or t
  misc_feature (1435)..(1435): n is a, c, g, or t
  misc_feature (1505)..(1505): n is a, c, g, or t
  misc_feature (1511)..(1511): n is a, c, g, or t
  misc_feature (1526)..(1526): n is a, c, g, or t
  misc_feature (1540)..(1542): n is a, c, g, or t
  misc_feature (1544)..(1546): n is a, c, g, or t
  misc_feature (1549)..(1549): n is a, c, g, or t
  misc_feature (1552)..(1554): n is a, c, g, or t
  misc_feature (1557)..(1557): n is a, c, g, or t
  misc_feature (1568)..(1568): n is a, c, g, or t
  Peptide Sequence Number=SeqID_7353
  Probeset Number=SeqID_14478
ctagagtatgtattatatcatgaactcccgtatcangtctgcactagtggactgagacatgctccgctgtaccatacagtcatgtcatgtcatcacgatgatcagcgcagatagatattcaacgccacagcgatcgagccacgcgtcgtgtgcgcagntcacgcacatgcgatgttatatgcgacgacacgagcgactatggagagagaagactatacgcacgtagcagatcgacacgcctagcagacagcanagtaacaacgngagagtacgagatgctgacgcaagacataatgagtaacncatataagtgcagataacatcacacaaagtcacagtgancacagncngataatagaagcacacgantaactaccgcgtgcggcagcgacncgcgagagcataacacagccagcatgatagatcagaagcagactcgtacgcgatacgaataagcgcagatgcagcgtccgctagagcagcgatgagtgacgcatcagccgtagtacgcgtgtcntgatcatcacgtcacacacaacagactccgatattaccacgagcacacgagcatcttgaatctagcttctactagtctcntctgtagtatatatccctcatcatccttctcgtctcaagagattagtttnntgcagtgtgtgatgcgcagtatcagagcgcgcacataatccgtatgtgattctatgtcacagagatgngtggggccgagcgacaagaaagcaagacgtagattgtgagtgngngatacatacactcactctntaataataacactagacgcatatggtagtatagtgtactgtaagttgttgtgagtgtgtagttatatctctagctgggtcatggcgactcatacatatttancgacntatnttttcttctcactagtcttcttccactccaccttatatgtataataattctanataattgcacaccgcgcctcntcgatggttcgagcagcgtcttgtatattgtatactgagtcagggcgaatgtcacgcgtaatctatcattcacgtangacggcaggccgacgggagagcgagtatgacctccagcnagatgaatataagaatatattataaactatagagatagacagtagantgtatatattactatattttacctcctccccacccaccaccnccaccacgccacgcgcgcgcaagagacagcgcgtgagtgaggccaagcacacctacaatgcagcgatccacacaggcagatgcaggagaggggcacacacagcgcatgaacaacnagaacattagccagacgcagccgcagcggcgagctgggaaggccgcagcgcgcnncgctagcatatataagatataacatcatgtagatcatatatcgtttcgcgcccattgatngtgagataagtntatcggcagtgtcagtcttactnactgcctacctatgtgataggcacataatcatatatacagcgggtgggagtgtgtccacgcgctgggcgngagcgnatatagacgtacagncgccgatacaaacnnntnnntcnccnnnaanctttcacgaantttta

SEQ ID NO: 4700 - DNA, 636 bp, Glycine max
  misc_feature (636)..(636): n is a, c, g, or t
  Probeset Number=SeqID_14479
tcagctacgtaggccccccccccaaatttttcaatgcaaggcacaccaaatatgcaagctcccgtcctcatccttaacactaaggccaagagagaacaaggacgtcaagcccaactcgccaatatcaacgctgctcaagctgtcgctgatttagttggtaccaccctcggccctagatccatgttaaagatgcttatggaccccatgggaggcatcgttatgaccaacgacggtaacgctatcttgagagaagtcgatgttactcaccctgctgccaagagtatgattgaactcgccagagctcaagatgaagaatgcggtgatggtaccacttccgtcatcattttgaccggagaaatgatgactgttgccaagccttttatcgaaaaggatatgcatccttccgttgtcgtcggagcttactatagagctcttgaagaaggtattaagatcatcaatgaagtcgctctgcccattgatatcaaccaagacgaagaagtcaagaaggccctcaagagttgcgttggtaccaagttctcttccagatggggaagtctcgttgttgacctcgccctcaagagtgtcagaactgtcatgattggtagctccaacgaaggcagaatcagcattgatacn

SEQ ID NO: 4701 - DNA, 593 bp, Glycine max
  Peptide Sequence Number=SeqID_7354
  Probeset Number=SeqID_14480
gtcagacccacatttgggcctgttcctagtttttgttggttggtggggccttgctgagcacggggtgggtgagggccgctttggctagctttgcggaggcatgggtggtggtggtgccctgctcagagaggtgatgatgggggccgctgacgcgtgctttgaggtggcatcggatgtgtggcggaacctctcattgtctcatgcctctgctgccgttctagtcatcagtcacctgcctgacgccttcgttggcacgtttttgcgtgcgggggcttactggaaatgcgttggccacgctgtctcgccatttagtcgtcctagcctctcgcccgaggctccggctgaaggctttcgtccccctcaattcatgctcggggtcgggagacccttgggatttagcaggtgggcgccgcaggcaggcccgtgcgccccctcatgtcgacggtcatgtaccaggagactatgtggtcgaggctgggctgttggtcactttcttgggatgcgccctgcaccccccccctgccctgagtcggccgatcaattgggctgagactcctgctgaaagcatactaccccctgaatataaacaaggt

SEQ ID NO: 4702 - DNA, 253 bp, Glycine max
  Probeset Number=SeqID_14481
gccgatagggactcggagagtcccctataggacacctgatgaaggaactaggcaatgggctgatgtgtggaacacccttcatcgggagcgtgttatctacatagcacaagaaatagatgaagaatttacttaccaaatattggctactatgctttatcttgacaggatacaaaactgcaccaggctttatatgtccatcaatggccctgacggtgatctgcacaccagcatagctatatatgacgccatgcat

SEQ ID NO: 4703 - DNA, 562 bp, Glycine max
  Peptide Sequence Number=SeqID_7355
  Probeset Number=SeqID_14482
ttaaaagtgcgcgagggccttaaggcaaccagcgggcgggcggggcatgggttagtgccgaggtagcgggaccgattccagccggcgggtcgtgggtagggatgggccgcgggagtgggagggcgtgtttggaaagggttcgtgagggcggtgggggaggccccgtcgtgggatccgccgccgggcggttcgcgtgccgtggtgttgcccgggccttttgttggtgggcgttatccggggaatgttggggcgcctgttgtggcgggtgaagcgtggtttttgcgggctttgtgggggcatgacgaggatccggtctcggtgggcgcccaaggcggggtgcccagtgagggcgggagggaaagcccggaagaggggggtgcccccacgttacgccctaggccgccctttctgcgggcgccgcgtttgggccgggtttccattaatttccagctgggcgtcgaccaggtttttttccggcctgggaaaatcggggcagtgaagcgcccacgcaacgtaatgggagtttaggtcaggtcatttaggcccccccgccccccctgcc

SEQ ID NO: 4704 - DNA, 548 bp, Glycine max
  Probeset Number=SeqID_14483
ggacccccagtaggggggtccaaaggaggaccaccattggttaccccaaaagtgggggattccactggggaggcaccagccagcaccccaaagagggggttcctaggcaaattcaaaggccaagatccatggtggggggggcccctccgagggggagaagaagatgaagatggtgaagaagcagaaggaggatgtccatgaccatggccatgacagcatcaccagcagtgacagtgtttaaactgctgcgtcgcctatatatataaaagctttatgggaccatagtagagagggctgtaccctaaggtctctctctctctgtctctctctctctctctctctctcttcttcctttttccctatcgtgtgatctatttatgagtgagaaaatcaaaagtcagaaattgtgcgtgtatctggatgctaattcgagtgctattagtctgtggtttggttggtcagtaaccccgctacttgggttatgtatgattgtatattatccttgagaaataaaaattttaaattgtcagtaaatatgagaataaaaa

SEQ ID NO: 4705 - DNA, 1559 bp, Glycine max
  misc_feature (48)..(48): n is a, c, g, or t
  misc_feature (159)..(159): n is a, c, g, or t
  misc_feature (217)..(217): n is a, c, g, or t
  misc_feature (288)..(288): n is a, c, g, or t
  misc_feature (387)..(387): n is a, c, g, or t
  misc_feature (403)..(403): n is a, c, g, or t
  misc_feature (425)..(425): n is a, c, g, or t
  misc_feature (521)..(521): n is a, c, g, or t
  misc_feature (913)..(913): n is a, c, g, or t
  misc_feature (933)..(933): n is a, c, g, or t
  misc_feature (1410)..(1410): n is a, c, g, or t
  misc_feature (1531)..(1531): n is a, c, g, or t
  misc_feature (1534)..(1534): n is a, c, g, or t
  misc_feature (1549)..(1550): n is a, c, g, or t
  Peptide Sequence Number=SeqID_7356
  Probeset Number=SeqID_14484
tacttagctactcgcgtagcccacataccaatcagtcataccctgcgntgagtgtgtaccattcgactgcgcgcgttacgcgagaatcgccgtctcattgtgtatagtcgcgccacgacttaactcatgttcgacacacctgcgttgtcgcatcatctncatacaataacacatagataataatatgtgtcgtgcgatgtgtcgtctctgcgacgcncactctatactatcattgatcttcactcgacgcgcaagatcgtgatacagctacttatatcgcgcattacntgccagcccttcgcgttcgtcgtatgcgtacgcttctcctgtcctcttatccctcatcaatccgtctgcatcgctctgttaggttctatatagtcacantcgctagggtgttgtngtttctctccgctctgtatgantctcactcgtcacatctctattcattggttccgcgcgctccgcgtcttgtctgcctcgtgccgttcatagtccgactctcgtctccgcgtcgagcnatagcagtggggctcaagtgataattagataatatcctccactctatctttataccacgtgtgacactgccgcagacttatgtagacagtattctctggttcagctccagtcaactcaccataactacggacgagaggcgaatatattcacacagtatttctaacgtgttcacttatgtgttgatcacgatgacgatctggtgggcgcgtgcgtgtctccgtccatcctgacctcgtcgctgtcatgcatcgtgcgcgctatagtatatgtatggtagcgtcgaatcctcttgactgtgttgagtatagcttcgagcgcgcttgatgccattattctaatctactagttggtagcagatcaccacgcctcaccatacacccacaaatcgctncagcgcacgcgaagctgcgnggcggcccgccaccgtcgactcttcacatcgcgcgccctccacgtgccgcccacgcggtcgccggcgaacaacgcgacacgactacttatatacgggatgcacgcatgtatgagtgtacatatatgcgatacagcgctgtaatatattagcaatgattacttataatatcaccgtcgggcaacctgactacattctccaccgtcatatcatggtgcggttttctctcgtttatttgttgtcttctattcaatatttgatttattcgtgtgtgcaaagaacatataatataccctttcactatctatcattcaatacgtcggatacgtatatatacagatagtcgtagccgtccggtctgttctctacttattgcgtgggaaaatcatcgtggggcgagcgggtgttatatgtagttttattattattgtgagagataatttgttgcgtttcgtgtgctctctcagtcggttggtgtngtgtgttgtgtgcgggtgggtggggggcggcgcgctgcgggtgagggagtcacacaccaatacagcataatcatctaatatgtttttcgctgtagtacctgctcctactactggacgcacnacnatccacacacacaannaacaaggaa

SEQ ID NO: 4706 - DNA, 781 bp, Glycine max
  misc_feature (1)..(180): n is a, c, g, or t
  misc_feature (781)..(781): n is a, c, g, or t
  Probeset Number=SeqID_14485
nnnnnnnnnnnnnnnnnnnnnnnnnnnnnnnnnnnnnnnnnnnnnnnnnnnnnnnnnnnnnnnnnnnnnnnnnnnnnnnnnnnnnnnnnnnnnnnnnnnnnnnnnnnnnnnnnnnnnnnnnnnnnnnnnnnnnnnnnnnnnnnnnnnnnnnnnnnnnnnnnnnnnnnnnnnnnnnnnnnnccccgcgctgggcaggcgcgcgctgcgccaccggccggtgccgcccgacgccgacgccgcccggcaccgccgcggccagcccggcggccgccaggaggccggagcggggctctgcgcgaacggagccggggcgggcccgcggggggtcacgggggggtgccggtgccagcgtaggggggtgaggccccaggagccgacggacttgagtcaacaatgcgccgcgtacacggagacgcgggcgctcgagaagaactgactagggcggattcaacaaaagtgcgcctaagaaataatgcactgggggggtcgtcggagttgctcccggccggctggcttgcgcgggccgccggtgaagtgatttgggcatgaacgcagcggaaaggggctggactggatttgagcaagtcaatgaaaccggattttccacggccttagccggcgatgcgggcccctcgcctctccttttttttcccgcgttagtgtcagttctgtatgagagcgaatttgcaaagaaaattgcactgggttcgtgcaatcccgtttctgttcatgattcagcgtgcgtgctaatgggattttacaagcaaaaaaaaaaaaaaan

SEQ ID NO: 4707 - DNA, 2435 bp, Glycine max
  misc_feature (14)..(14): n is a, c, g, or t
  misc_feature (16)..(16): n is a, c, g, or t
  misc_feature (18)..(18): n is a, c, g, or t
  misc_feature (20)..(20): n is a, c, g, or t
  misc_feature (24)..(24): n is a, c, g, or t
  misc_feature (27)..(27): n is a, c, g, or t
  misc_feature (32)..(35): n is a, c, g, or t
  misc_feature (37)..(37): n is a, c, g, or t
  misc_feature (61)..(61): n is a, c, g, or t
  misc_feature (68)..(68): n is a, c, g, or t
  misc_feature (134)..(134): n is a, c, g, or t
  misc_feature (136)..(136): n is a, c, g, or t
  misc_feature (150)..(150): n is a, c, g, or t
  misc_feature (194)..(194): n is a, c, g, or t
  misc_feature (218)..(218): n is a, c, g, or t
  misc_feature (274)..(274): n is a, c, g, or t
  misc_feature (339)..(339): n is a, c, g, or t
  misc_feature (346)..(346): n is a, c, g, or t
  misc_feature (367)..(367): n is a, c, g, or t
  misc_feature (416)..(416): n is a, c, g, or t
  misc_feature (418)..(418): n is a, c, g, or t
  misc_feature (523)..(523): n is a, c, g, or t
  misc_feature (609)..(609): n is a, c, g, or t
  misc_feature (611)..(611): n is a, c, g, or t
  misc_feature (617)..(617): n is a, c, g, or t
  misc_feature (666)..(668): n is a, c, g, or t
  misc_feature (685)..(685): n is a, c, g, or t
  misc_feature (755)..(755): n is a, c, g, or t
  misc_feature (757)..(757): n is a, c, g, or t
  misc_feature (760)..(761): n is a, c, g, or t
  misc_feature (767)..(767): n is a, c, g, or t
  misc_feature (780)..(780): n is a, c, g, or t
  misc_feature (864)..(864): n is a, c, g, or t
  misc_feature (932)..(932): n is a, c, g, or t
  misc_feature (961)..(961): n is a, c, g, or t
  misc_feature (968)..(968): n is a, c, g, or t
  misc_feature (976)..(976): n is a, c, g, or t
  misc_feature (984)..(984): n is a, c, g, or t
  misc_feature (1010)..(1010): n is a, c, g, or t
  misc_feature (1037)..(1037): n is a, c, g, or t
  misc_feature (1051)..(1051): n is a, c, g, or t
  misc_feature (1070)..(1070): n is a, c, g, or t
  misc_feature (1111)..(1111): n is a, c, g, or t
  misc_feature (1122)..(1122): n is a, c, g, or t
  misc_feature (1132)..(1132): n is a, c, g, or t
  misc_feature (1143)..(1143): n is a, c, g, or t
  misc_feature (1161)..(1161): n is a, c, g, or t
  misc_feature (1172)..(1172): n is a, c, g, or t
  misc_feature (1246)..(1247): n is a, c, g, or t
  misc_feature (1285)..(1285): n is a, c, g, or t
  misc_feature (1310)..(1310): n is a, c, g, or t
  misc_feature (1337)..(1337): n is a, c, g, or t
  misc_feature (1377)..(1377): n is a, c, g, or t
  misc_feature (1404)..(1405): n is a, c, g, or t
  misc_feature (1410)..(1410): n is a, c, g, or t
  misc_feature (1412)..(1412): n is a, c, g, or t
  misc_feature (1424)..(1424): n is a, c, g, or t
  misc_feature (1502)..(1502): n is a, c, g, or t
  misc_feature (1553)..(1553): n is a, c, g, or t
  misc_feature (1567)..(1567): n is a, c, g, or t
  misc_feature (1581)..(1581): n is a, c, g, or t
  misc_feature (1598)..(1598): n is a, c, g, or t
  misc_feature (1605)..(1605): n is a, c, g, or t
  misc_feature (1634)..(1634): n is a, c, g, or t
  misc_feature (1661)..(1661): n is a, c, g, or t
  misc_feature (1667)..(1667): n is a, c, g, or t
  misc_feature (1707)..(1707): n is a, c, g, or t
  misc_feature (1742)..(1742): n is a, c, g, or t
  misc_feature (1746)..(1748): n is a, c, g, or t
  misc_feature (1753)..(1753): n is a, c, g, or t
  misc_feature (1795)..(1795): n is a, c, g, or t
  misc_feature (1805)..(1805): n is a, c, g, or t
  misc_feature (1825)..(1825): n is a, c, g, or t
  misc_feature (1851)..(1851): n is a, c, g, or t
  misc_feature (1864)..(1864): n is a, c, g, or t
  misc_feature (1886)..(1886): n is a, c, g, or t
  misc_feature (1889)..(1889): n is a, c, g, or t
  misc_feature (1958)..(1958): n is a, c, g, or t
  misc_feature (1966)..(1966): n is a, c, g, or t
  misc_feature (1969)..(1969): n is a, c, g, or t
  misc_feature (1976)..(1976): n is a, c, g, or t
  misc_feature (2011)..(2011): n is a, c, g, or t
  misc_feature (2036)..(2036): n is a, c, g, or t
  misc_feature (2039)..(2039): n is a, c, g, or t
  misc_feature (2122)..(2122): n is a, c, g, or t
  misc_feature (2127)..(2127): n is a, c, g, or t
  misc_feature (2133)..(2133): n is a, c, g, or t
  misc_feature (2250)..(2250): n is a, c, g, or t
  misc_feature (2318)..(2318): n is a, c, g, or t
  misc_feature (2321)..(2321): n is a, c, g, or t
  misc_feature (2374)..(2375): n is a, c, g, or t
  misc_feature (2378)..(2378): n is a, c, g, or t
  misc_feature (2435)..(2435): n is a, c, g, or t
  Peptide Sequence Number=SeqID_7357
  Probeset Number=SeqID_14486
ctcaatatctcggntncncnaccnttntcgtnnnncntacccgtgagtatcacgagtggtncagagcnaggcggccccgttatcgcgtggcagttcgcttatttacaccggcaccccgcgggacggatgtgtananagtatcgagcgaanaagcgccctcacgcgcgctgcaccaacaacaaggacctatcccnctctacgtatcacagctaacgganagatacacatctatagatggttatgctttcacagtgtgttgtgcgccatcgaccgngtccgtcggatcgcacgctgcatcgatgcgacacgacgagcgagcggtctgctatgccgtacagngtgcacntgtctgagctgcgagcagggngcgtagacgtgagatgatatctgagatatgtagtgtctgtatagttttntntgtctccatgttgcggttgtgtgtgtgcgagtctagttgctcgcgtggtgtgagctgtatagcgtctcgcgggtgtggtgcgagtcgcgcgttctctgtgcgtgnagtctcctctcacgatggacgctcgtcgtcatgcgtgactagcgttgtcgatatgagacaggcagtctcctcagctcgtcactctntncatgtncctgtcgacccacatcactcacatcctgatggacgcgcggtgattgggnnntcagactcgctggtgtnatcagcgacacgctcagcgcaaacgacgcacagatggacgacagtcgattagtagtatcgccgcgacacncncgnncgctanacatactgtcccnacattcatcacctatactgataccatatatatctgactaacacacctcgctatcgatacggctcatactcactctacatactcntactatctatgtatgcatacactctactcgagagcgtatgctactctctcatgcgtcggtcattagcngactgatcgagcgtagtatagtacagctntcatccntctatctncttgttantctcccatctcacatgcgcagtagcncgagcgatagtacgcagtcgacgacangtcgatatataganacatgtatctcgagcagcntgtaacagcgactaacaccactgcactcacagatgctcgcnctatcagaatngacgtgaggnacgatagcgancgtcgtgaggtgagttgntgtactatgtnctcacgacatgatagcgagtcggccgcatcgtccgcgcggtatagcgcatcgcagcgatcggtgtgtgcgcatnnctaaatgcagagctactacgctgtcactgaatgtgctnagggcaggattgacggactgatgcntagtcgatcaatacggtcactcaactncgatgttcagtatgcatacagacgtatcgacatgatcgantacagtatactgcacatcgccgatgtnntacgntngcgtgacgactntcacatatgacgctgtcgtgactgtatcgctactgcacgacgtgtacagagcgctaggacatcgctatgaccgaagantgtgcagacgcgatcataatactactcgtgcagcgcgtcgaaccgagtcancacacgtgtgtgantgcaacggatgctngtacagcgcgctgatcnactctcntgctcacactacgcgatgcctcgtttctnttgactatagacagtcgctacctgtcntagttntactcctgatagtagatatgactggctctctgatcacgantagtgcgtgcaggtgtcgagccgacacgagagagntgannngacangtaatgtgatgcttcgttcggtatagacgctacgacacgcgntcgaccattnatgcatgagagcgacgcagnagtgctgcgctctcatacacacgatntgttactatactnctctacatgacagcatctgtcngcntcatgcactaatcatgagcacatagtctatagtgaccgacacaacgaccgcacagagagccaacaatcngcagcgcnacnatatatnaaagtaggacacgacatcaacatacacgcaaaccncataccaagcgcatcaactgtatgntcnactcacgcccacgtactcaacccgagtcacaaagctattgataaatgacacggcgtgtatgctcactattatcacttcatgantatgngctctncgatgactcacatcatctcctacacgccgcagtcgaatgtatatcgactagtcactgcgcacgcgtataccgagtcattcgttctcgtcgatatgcatcgtaggcaggcagcgcacnctcatttaccaccactatagatcctaggttcacggatgacatactctattagacaccagcagttacanctncatcactaagcagacgcgcgctcggcgaccgatgcgaccaggaccatgacatnntgngatgaatgatagctaggtaacttaggctcggcagtacagctgaccgcagagagtcgn

SEQ ID NO: 4708 - DNA, 498 bp, Glycine max
  misc_feature (64)..(64): n is a, c, g, or t
  Probeset Number=SeqID_14487
cctgtttttatcttatttatttttttatcattagtattatttgttcttctatcttcattatcantaaaatttatgtggataggatttgatagatattattatcttatgttcgtagatgtacactgacctgtaaagttatgtggacatcaatatggattctggtccagttgcaacattccaagatcacgagtatttaaggccagagctttgtgatttatatgaaaatgattcaatttttgattatacgagtgttgactaagtggtgatggattgcgtgtttcaactggttcttacagcaatctattccgtgtgtttggtaagtgcccctggaagtactgacgctatgactttggaagccagtaaaaatccaatgaggcgctaagttccaaccccttcaaggccatctagatcacagggaaacagtataacacgagttgtgagacgcggaacataaagtgccagtgtcgacgcaaatgggaatcctcctgatttcacaac

SEQ ID NO: 4709 - DNA, 654 bp, Glycine max
  misc_feature (1)..(1): n is a, c, g, or t
  Peptide Sequence Number=SeqID_7358
  Probeset Number=SeqID_14488
ngcagatgtgtcacgccgcgcggctctgtgcgcagagaacgcggtagatcttgtgcgagagcaccacatcgctgtgggtgttgtcgctgtcacacatatagaagatgtggtacacacgcgccacagcctttttgtgtgtgtgccacagaagaaggctctcgcacacattctaacacatatggcgccacatgtcttgtgcgaccgagatgtcgccgcttttctagaggcgcacaagatagagcacatccgcggtctcgagcacaaagatcttcttatggatctccctctgtgacacatgcatatagagaagcgctatctccacaatctcactcacaacacgcacacaggtggggagagccctttccgtgtctccccttgagaaacacagggccgccacaagcacaagcgcgcgtctcgacgccacaaagaccctcttgtgcacatataggagagcgcgcgccacattctacacaaagtggaggaagagtcttcgagagcactatattcaatatacacagagtggaggaggagagttatatgctcttatatctataatataatctgcggaatatatgggggggtgttattctgttccgcggtgtttccgagaggggtatcacacacataatcgcgcgctctctataaaatcatatg

SEQ ID NO: 4710 - DNA, 569 bp, Glycine max
  misc_feature (102)..(102): n is a, c, g, or t
  misc_feature (240)..(240): n is a, c, g, or t
  misc_feature (276)..(276): n is a, c, g, or t
  Peptide Sequence Number=SeqID_7359
  Probeset Number=SeqID_14489
accaatagcaatacatttccgatttccagacagaggaactactcagcttagcttgagtattttcaagaggggatcaaagggaagaagaagggaaggactcanacttgcacacgcaacctttggttcctttccccacactcaccatggtggcagattctaagtccaattccgacctctccttcggaaaatcttttgcagcagtgctttctctgcatggttcgctgagggtgtactaatccnttggatacggccaagtgaagcttcagcttcaaagcnagctgaactggggaaggttgctccctaccaaaataaagggatgcgggaaaagttggaaccatgcacgggaaaaaggcttcacactctggaagggatgtggcagggtactcctccatgttgtttgtaggctaaaaattggggtaatgaaccggtaagacttttttgtggggaagaccgctggtagaagtttcttggtcgaaaaaatctggtggattacaaacaggggttttttaattgggggggaaaccccccaactttgttgagtagaatccggcgggaggaataccccctgg

SEQ ID NO: 4711 - DNA, 1947 bp, Glycine max
  misc_feature (37)..(37): n is a, c, g, or t
  misc_feature (40)..(40): n is a, c, g, or t
  misc_feature (48)..(48): n is a, c, g, or t
  misc_feature (58)..(58): n is a, c, g, or t
  misc_feature (62)..(62): n is a, c, g, or t
  misc_feature (68)..(68): n is a, c, g, or t
  misc_feature (81)..(81): n is a, c, g, or t
  misc_feature (84)..(84): n is a, c, g, or t
  misc_feature (126)..(126): n is a, c, g, or t
  misc_feature (134)..(134): n is a, c, g, or t
  misc_feature (156)..(156): n is a, c, g, or t
  misc_feature (159)..(159): n is a, c, g, or t
  misc_feature (233)..(233): n is a, c, g, or t
  misc_feature (385)..(385): n is a, c, g, or t
  misc_feature (428)..(428): n is a, c, g, or t
  misc_feature (528)..(528): n is a, c, g, or t
  misc_feature (572)..(572): n is a, c, g, or t
  misc_feature (657)..(657): n is a, c, g, or t
  misc_feature (728)..(728): n is a, c, g, or t
  misc_feature (758)..(758): n is a, c, g, or t
  misc_feature (760)..(760): n is a, c, g, or t
  misc_feature (919)..(919): n is a, c, g, or t
  misc_feature (967)..(967): n is a, c, g, or t
  misc_feature (993)..(993): n is a, c, g, or t
  misc_feature (1018)..(1018): n is a, c, g, or t
  misc_feature (1038)..(1038): n is a, c, g, or t
  misc_feature (1072)..(1072): n is a, c, g, or t
  misc_feature (1076)..(1076): n is a, c, g, or t
  misc_feature (1088)..(1088): n is a, c, g, or t
  misc_feature (1090)..(1090): n is a, c, g, or t
  misc_feature (1207)..(1207): n is a, c, g, or t
  misc_feature (1211)..(1211): n is a, c, g, or t
  misc_feature (1271)..(1271): n is a, c, g, or t
  misc_feature (1432)..(1432): n is a, c, g, or t
  misc_feature (1470)..(1470): n is a, c, g, or t
  misc_feature (1688)..(1688): n is a, c, g, or t
  misc_feature (1748)..(1749): n is a, c, g, or t
  misc_feature (1776)..(1776): n is a, c, g, or t
  misc_feature (1789)..(1789): n is a, c, g, or t
  misc_feature (1800)..(1800): n is a, c, g, or t
  misc_feature (1825)..(1826): n is a, c, g, or t
  misc_feature (1831)..(1831): n is a, c, g, or t
  misc_feature (1838)..(1839): n is a, c, g, or t
  misc_feature (1841)..(1841): n is a, c, g, or t
  misc_feature (1847)..(1849): n is a, c, g, or t
  misc_feature (1853)..(1853): n is a, c, g, or t
  misc_feature (1869)..(1869): n is a, c, g, or t
  misc_feature (1872)..(1872): n is a, c, g, or t
  misc_feature (1876)..(1876): n is a, c, g, or t
  misc_feature (1901)..(1903): n is a, c, g, or t
  misc_feature (1910)..(1910): n is a, c, g, or t
  Probeset Number=SeqID_14490
ggagtggtgggtggagatgcgcagttaggacgacgcnggngacggacngcgatggcanacancaagtncgcgccgacgcgnggnaggcggcgagatgtctcgagtatgtgagtgcgcgcgatgtgngggcactncactcacatcggcggagacgtntgngctgccgggggtgcagttagtctactattccctatcacaactcatgacgaacgcacgcgaagtgacgtgtcacncaacatgcatccagagcggcacagactctgtggtgcgccgcgtcgcacgatgtgcgcatgagctatataacagcacgaccaggcatgcgacagagacagcggacgtgtcgcagagagcagagagctcatggtgatactgtgtgtatagaggngaacgactatcaacgaggtaggctgagcgtgagcgcgtgaacncaaacatacatccgtacaagacatgatatgacacgcatgacactcgttgtgggcggagagatgtctgcgacgaccacacagagtagcgcgcgcgcgggcnagcgcagtcgtccgtgtccgtgaccgtactgcgtattatctctntgctagcgctcctggtctacacacacatccatgagcagtcgagcacgcgcattccgcgaccgcatctagatcgcgcgcagacgtntctgtcctggcgcgcacgagtactcacatataacacatacctgcgcacgcatcaccgcgcgcaacgtgtcncagcgccgccgcgcagtgcgcggcgcgagnanagcagaccctcggaccaaacgagtagagacatatatagcacacgagacgacgttcgacacacgcagagtgcgtagaggtgcgtcgctcgtcgctcccaaccttctacgaagcgcgtgtctgccagcgcgattagcgcggcgccgactgtgcgcgtaccncgacgagctcatgtagcgtgggctccgccgcgcgcgcgtctcttctcntatactctacatctgctcgcacacancgcacgacttatgtccaccacaccntctatctacgcgtaacgacngcacacgcgatgatctcttctatgctagcacagntgtnttagaagtaatnantttagaggcgagagagtagtagacgacctacgatagtgtgtgttcgtgcgcgcgtcatgagttctctatgtagatatatatctgcgcgcgctctgtgcgcgtgtggtgtgcgtccgncgcnccggctcccagacgctattctctgcgcgtctggtcgcgtctgctcggccgtgagtagcgnggggctgttcgcacgttgtagtgtagatgcgcattctcgtctatctctctactcgtcagctctcatcgctcgtctgcatcccgactctgctgctacccgcatatcattctattatatataaaattaacttaaacacaacagcaacacagcattacaagcangtgcacgtgcgtgcgcgagcggcgcgtgtcggcgtgcngtgtgatgaacgagagacgacatagagtcgctgagatacagagatgtattaatagagagagagagaatatgagaagtagagaggaggcgtggacagcataagagacgccgccggtggcaacaaattgaagcgaagagaaggtttggtcgttgatgtagaacagcatatacaagagacagagaacgcggcagtagaggaacagtgtgtgatgcgtcgancacatactattgtcgatcgaagctcgcattgagcgcgcagagcggcagcaacaacacacnnccacaaacgaacaaacacatcatcaanaaccaacctaatncataaacacancacactatccaatcacatctagccnnctcgntctcatnncncccccnnngccntccacggggcgcgcgnggngggngagggggggggcgggggcgggaggnnnttgaggngggggggtgggccatacctccatcacaacaacacaac

SEQ ID NO: 4712 - DNA, 532 bp, Glycine max
  Peptide Sequence Number=SeqID_7360
  Probeset Number=SeqID_14491
cctcacggtacttttcactatcgctaaacacgtatacttagccttagagaatggtatccctattgccctactttttttttcaagaaaaaaagtgaaggcttattcgagcggaatttcctccactctacttactatcgcgccgaaggcgcgcagaattattgttaatgtacaggactgtcaccttctatggactactttttccaaagtattctattaacaattcatcgataggctagtccagtttcgctcgccactacttctggagtctcggttgatttcctttcctacagttacttagatgtttcagttcactgcgtatgatatattaggtttacccataggagtgctattgttgttatttcctgttctgcccccgaagggggcctagttaataactaaagaaccaatagcttttggtgtttccacctcctttcaatacgtgtttgctagacatccttaacaatcactttgattacttacatctaaatttccatataacgccagcgattaaactaggcgattgtgatcccgc

SEQ ID NO: 4713 - DNA, 1360 bp, Glycine max
  misc_feature (16)..(24): n is a, c, g, or t
  misc_feature (26)..(29): n is a, c, g, or t
  misc_feature (32)..(32): n is a, c, g, or t
  misc_feature (34)..(36): n is a, c, g, or t
  misc_feature (43)..(44): n is a, c, g, or t
  misc_feature (69)..(69): n is a, c, g, or t
  misc_feature (118)..(118): n is a, c, g, or t
  misc_feature (151)..(151): n is a, c, g, or t
  misc_feature (158)..(158): n is a, c, g, or t
  misc_feature (356)..(356): n is a, c, g, or t
  misc_feature (437)..(437): n is a, c, g, or t
  misc_feature (519)..(519): n is a, c, g, or t
  misc_feature (735)..(735): n is a, c, g, or t
  misc_feature (851)..(851): n is a, c, g, or t
  misc_feature (986)..(986): n is a, c, g, or t
  misc_feature (992)..(992): n is a, c, g, or t
  misc_feature (1269)..(1269): n is a, c, g, or t
  Probeset Number=SeqID_14492
tgtgtgtgcgcccccnnnnnnnnntnnnngtnannngatgacnnccaccgcccgtgtgtgtcccaaatnatctctctcagccaggagcggacccggtgcgccagaacggacgacgacngaagcatcgtgagacctcgcacctgtcgtctcncatatangcgctcggtggtgtattctgttgagatgccaggcggtgtccgcttcaggtatgcggtgggctctatgccgagcccgcgagaagcgacaccccacctaagttccggtacactcgcagcgtctctgctaatgttcgttggtaatctatcgtatcaggtgtaggaagagataataataagtaatagacccgcgcgcagatnttttgtggtgcttggtgcggtaggctctctctcgcgcggatgtggtgtgggagggggagggaggaaaaatggcagagacgntgtatgttaattatagtattaaatcgccacggtagacgggacaggaaagaaaacaacaactcaactacagaggacgagcgcnaggccgaggctatatcatctctcctctactcctcccagccatttccatatatagcgtaccccgtcttgttgtgggtgctgtctcgccgtctccgcctaccagcgaactccgcgacctactagataggtgtgatttgagtgcgctcactacaaccaaccaccacaccgcgcggcccgcccctcctttagtgttagtggtatgggagagatgaatatntattatattagccgacacaacaaatcttgtgttatcgctcgtatgtggtgggcgatggttgtgtcgtggcgttttctgcgagatggtgatcgtgcaccgccgctcttagttgtggnaggagtagtctcccctcttctgtgccttcgtcgcgcgcgcgcccccacgtgcagagctctgcgtacatggactagggaagggagatcggtgtggaccgcacgtcgatgacgcgacagcgcaatagctcagcaggnaggtangtggagtataccggcgaaggtcaatgaggcagagcgtgtacgattgcctgagccctgctcgtctgacctatgcgtgataacatgtacacgacatcggcgtgcctccgggaatacacgcgcaagcaacttgttccatccgcgccacaacactcctctctccacgagacaacacgttctactatgtcactgacctcgcccatccgcgagacctcttcgctcgcgctactccattgcaagagcgcaagctcggcgccgacgcttgatacacgactataanaagttatataaacactcacactgtctcgtgtgccgaggtattatccactctccagcacaccgtctgccgctctcttcgctcgtatcttgct

SEQ ID NO: 4714 - DNA, 1713 bp, Glycine max
  misc_feature (1)..(1): n is a, c, g, or t
  misc_feature (112)..(112): n is a, c, g, or t
  misc_feature (199)..(199): n is a, c, g, or t
  misc_feature (258)..(258): n is a, c, g, or t
  misc_feature (363)..(363): n is a, c, g, or t
  misc_feature (427)..(427): n is a, c, g, or t
  misc_feature (782)..(782): n is a, c, g, or t
  misc_feature (1384)..(1384): n is a, c, g, or t
  misc_feature (1496)..(1496): n is a, c, g, or t
  misc_feature (1625)..(1625): n is a, c, g, or t
  misc_feature (1664)..(1664): n is a, c, g, or t
  misc_feature (1683)..(1683): n is a, c, g, or t
  misc_feature (1691)..(1691): n is a, c, g, or t
  Peptide Sequence Number=SeqID_7361
  Probeset Number=SeqID_14493
ntcgtgcgccaatcactacgcactgactcgcacattatagccaccccgcacactcttcctcctgcctcgtttactcgccgccagagagtagtcagtgacagcgtaagcgcgncagatactatcatcaagtagatagcgtcgcacgacacgcacatcgtgtagcgagacacggcacgcgtgtctatatctcttgtgcgtnctctatgtatcgctagcacggcgtaagagtggcgacgcggcgccgcgcgctggatcaantgacacgctggtagctatatcatgcgtataacattcattgtccggtgtcgatatagattccgtgagctatgatagtgtgattcgtgtgaatagtgcggtatagtngcgtcgtcagtgagtggtgaggtatttgtgttatagtcgaggacgaagtgatcgcatgcatcgnggacgtgtacactccaacattcgcgcccgtgcgcactcacacgcgcgtcgcgcgcgcgcccgtcgcgtacacctcgcttgctcatctgtcgtaacccgtactacagccctgcacacgtgcctcgtgtgcttagagcgatgtgcgaacttaatattatacatgcgtattatctataatgtcgctgctgacgtctcgcacagctgtccaccgccgagtcagccgcgtatgtatatagccacgtaggtacagtgatcgtggaacgaagcgatgtagaatcgacgtcatcgcgcacaccgccgcactactgctacccacgcgcgtacgggtcgcgatacactctcaactgcatacaagntgtgctggagttacgtgggcaccgcgtgcgcgcgtggcgatacatatcacgagcccactatctcacatgtcgtacggtctgcgtcactcacatcaatacagatcacacgtgcgggtgcatccctcacgataggtccggagcgaagtgttgctacacactatactaaacgcatcactctcccacacatcataccgacgctacgccagaacgtgtatacggtaggagcgagacgtgacagatagtagctttgagacacgagtctaattatcaagccagcagcgactattcacgtactcatgccctacagcgaacacacagctcatcccgactggcacgagccgacgcatcgcgcaagcctcgctcgtactcgttgcgtgtcgcgtagtcgcctgtataggttatgatgctctggtgtcgcgtggggctgtcacgttgggtgctagtgtgagctattgaggtgtgtgtgtctatgacgatcgcatcgagtgctggtgcgtgcgtgtgttcatctcatagcggcacaacgagcgcaagaagagagagagcagagagcaaggaattttattcatttctcaaatttatttttaatatatgtattgctnaacacaagcatacatacagcgcagaaagattagaataacaaaggataatctagcatgacgatgagagacgacacaatgtcatagattgtacgagatgcgaggagtatttgtnggttagagtatagttgtcacgcaccttggcgcggcgaggaactcgttgtattgtagttagcatatatggtttcgttgacacagctctctctttgcttgccttatagcagcattatagtcacgtcttgcngtcaaaaaacgatacggccaaaactaaataatctctcantatacccctgttagttaanaaacaaanaaaaatagaaaaaaataccaaa

SEQ ID NO: 4715 - DNA, 521 bp, Glycine max
  misc_feature (199)..(200): n is a, c, g, or t
  misc_feature (296)..(296): n is a, c, g, or t
  misc_feature (339)..(339): n is a, c, g, or t
  misc_feature (342)..(343): n is a, c, g, or t
  misc_feature (363)..(364): n is a, c, g, or t
  misc_feature (456)..(456): n is a, c, g, or t
  Probeset Number=SeqID_14494
atcccaaacccaaagcactggagtagctatatcattctagcacacccacacaatcacaatggcacccagtgctgccctcttcatcgccctgagcctcctcctctccgccgtcgccgcccacggctgcggaagcacctattgccaaccgccggtcgtcgtgccgacaccacccatcgtcgttccgcgccattaccatggnnaggaggagggcacggccacggccaacgccgggcagtgctccatcaacgtgctcaaccctgagggtgtgcgccaacgttctcagcggactgctcggnctccaagaccgggcgttccggtgcacgaacaatgctgccgtgnttnnccaggggttggccgactccnnacgccgccgtctgctttttggaaaccgcgtcaggccaacatcctcggctccactcaaaggtgcctgtggaaatcagctcctctccacatggnggaagaggggcccccgccggttcacttgccagccaataaaaaaagaccggtttgaatggcgccca

SEQ ID NO: 4716 - DNA, 2004 bp, Glycine max
  misc_feature (8)..(10): n is a, c, g, or t
  misc_feature (20)..(20): n is a, c, g, or t
  misc_feature (25)..(25): n is a, c, g, or t
  misc_feature (44)..(44): n is a, c, g, or t
  misc_feature (59)..(60): n is a, c, g, or t
  misc_feature (117)..(117): n is a, c, g, or t
  misc_feature (137)..(137): n is a, c, g, or t
  misc_feature (170)..(172): n is a, c, g, or t
  misc_feature (198)..(198): n is a, c, g, or t
  misc_feature (211)..(211): n is a, c, g, or t
  misc_feature (235)..(235): n is a, c, g, or t
  misc_feature (327)..(327): n is a, c, g, or t
  misc_feature (340)..(340): n is a, c, g, or t
  misc_feature (357)..(357): n is a, c, g, or t
  misc_feature (365)..(366): n is a, c, g, or t
  misc_feature (374)..(375): n is a, c, g, or t
  misc_feature (379)..(379): n is a, c, g, or t
  misc_feature (413)..(413): n is a, c, g, or t
  misc_feature (433)..(433): n is a, c, g, or t
  misc_feature (439)..(439): n is a, c, g, or t
  misc_feature (451)..(451): n is a, c, g, or t
  misc_feature (454)..(454): n is a, c, g, or t
  misc_feature (456)..(456): n is a, c, g, or t
  misc_feature (476)..(477): n is a, c, g, or t
  misc_feature (503)..(504): n is a, c, g, or t
  misc_feature (668)..(668): n is a, c, g, or t
  misc_feature (699)..(699): n is a, c, g, or t
  misc_feature (709)..(709): n is a, c, g, or t
  misc_feature (746)..(746): n is a, c, g, or t
  misc_feature (799)..(799): n is a, c, g, or t
  misc_feature (805)..(806): n is a, c, g, or t
  misc_feature (808)..(808): n is a, c, g, or t
  misc_feature (849)..(849): n is a, c, g, or t
  misc_feature (872)..(872): n is a, c, g, or t
  misc_feature (874)..(874): n is a, c, g, or t
  misc_feature (941)..(941): n is a, c, g, or t
  misc_feature (977)..(977): n is a, c, g, or t
  misc_feature (1014)..(1014): n is a, c, g, or t
  misc_feature (1057)..(1057): n is a, c, g, or t
  misc_feature (1069)..(1069): n is a, c, g, or t
  misc_feature (1094)..(1094): n is a, c, g, or t
  misc_feature (1131)..(1131): n is a, c, g, or t
  misc_feature (1151)..(1151): n is a, c, g, or t
  misc_feature (1184)..(1184): n is a, c, g, or t
  misc_feature (1235)..(1235): n is a, c, g, or t
  misc_feature (1252)..(1252): n is a, c, g, or t
  misc_feature (1262)..(1262): n is a, c, g, or t
  misc_feature (1286)..(1286): n is a, c, g, or t
  misc_feature (1303)..(1303): n is a, c, g, or t
  misc_feature (1310)..(1310): n is a, c, g, or t
  misc_feature (1316)..(1316): n is a, c, g, or t
  misc_feature (1354)..(1354): n is a, c, g, or t
  misc_feature (1388)..(1388): n is a, c, g, or t
  misc_feature (1390)..(1390): n is a, c, g, or t
  misc_feature (1393)..(1394): n is a, c, g, or t
  misc_feature (1413)..(1413): n is a, c, g, or t
  misc_feature (1421)..(1421): n is a, c, g, or t
  misc_feature (1460)..(1460): n is a, c, g, or t
  misc_feature (1463)..(1463): n is a, c, g, or t
  misc_feature (1465)..(1465): n is a, c, g, or t
  misc_feature (1627)..(1627): n is a, c, g, or t
  misc_feature (1758)..(1758): n is a, c, g, or t
  misc_feature (1766)..(1766): n is a, c, g, or t
  misc_feature (1775)..(1775): n is a, c, g, or t
  misc_feature (1832)..(1832): n is a, c, g, or t
  misc_feature (1884)..(1884): n is a, c, g, or t
  misc_feature (1946)..(1948): n is a, c, g, or t
  misc_feature (1956)..(1956): n is a, c, g, or t
  misc_feature (1965)..(1965): n is a, c, g, or t
  misc_feature (1989)..(1989): n is a, c, g, or t
  Peptide Sequence Number=SeqID_7362
  Probeset Number=SeqID_14495
gttttttnnnttggggggtntgtanaagataaacatacaatatnacgctcaagctgtcnntagcccgtgcgtgcagctcccgcccattatctcatacctctaccatacaccctcgcngcgcccctccccgcccgcgncgcgcggaggacagcagacgcacccaccccacnnncgcgagccgcgcgagcacgctctatnctgctgcatcccnacctgcgcggcagacggctctacntatcaaacaggtaccacacacagtcatgcgcgcggtcgccggtgtgcgtagtcgactatgactcaatgctacgcctgcgcgggcgcctctcntgtctccgttgcntgttcccatcttcaccntcattctnntgtgtgtnnttantcttaaataagcctaatctgaatcttactgtttntgtgctgtttcctaatcatnagacangtgatatgtacnaanancggtaaagaacatacagagnnaagcaaaatagatcatgaatcacaanntcggccacacagatagataagcgctgaaacagaccaacacacagcgaacaacgccacggtgtgcacacatcaacacaacacatacactctatgtttcttgttctctatttgcttcctatttcctcttctgattgtgtacttgcatgtgtcgtcgttctctccantgctttgtcgtctatccgtgatgtcactccngcagcaccgngcaccgaaagaggagaagagcgagagagaagatagangtaaatgcaaggacagcaatatgagagggcaatgcgagaggaagagacgaaanagcagnngnacgacaacgacacaatctacactcaactactctatatacanctactctcactcagttcgactancntcgacctacagtataacagcactcctacatgtcgacagcacataatatgatcacgctattctctaantatctccgcatctacatctccagattgacgcaggtnacgcgcaacgccagcgcgctattcaatatatatatgntaatctcatatgcacatggaatctagtcaactgacgatatctntatatacactgngtttcatcacgcacgagcaatcganacatgaacatcactcacataccacaacactatacatntagatgacacaaatctaccncaacgactcaacaacacatacttcactcactcngctgtagatactgcgtacgacaagcactcgcccgaacatagtcattgcttnccgtacgtctcgtagtnctagatgatngtatatgcatcacatagagacganttacatcgctgcgcgtnctgctcntgacanactcgatgatctctcatcaacatacttccttctatcgnacgacacatactactctatctactaatgcccacnanccnnactatgcatctactcactnctcgcgcntgcactctctccatctctataatccattatacaacgacnatncncactacgatacgattaaatcatcactcacgcagagaactagcatgctacgtacacgatatcccatcactcatcactactctcactgacgtcactccactctacagctctaccactcctccagcactcactcatctccctgacgacacactcagctcactcangctactaactacagcactacgacacgaacaacacgacgtgactctcacttcatgctctttcatcagagatcactgttactctcctacacagatctctcatgccgatctatcgtcctcagctgatctatagncattactntctatatancaccatactacaaaataacagcaccgagcatcgatgacagacatgcagcataacgtntaaggacacatgatcaacacaaccatccacatacactactacactcctactntgacgatcgctaccctacatctcaacagcatcagtatatctatgtgccaccacaagacacannnctctattngcctcctanctacacgaatacgacgcatgacanacgaccaccacgcgg

SEQ ID NO: 4717 - DNA, 1799 bp, Glycine max
  misc_feature (86)..(86): n is a, c, g, or t
  misc_feature (104)..(104): n is a, c, g, or t
  misc_feature (132)..(132): n is a, c, g, or t
  misc_feature (138)..(138): n is a, c, g, or t
  misc_feature (145)..(145): n is a, c, g, or t
  misc_feature (174)..(174): n is a, c, g, or t
  misc_feature (195)..(195): n is a, c, g, or t
  misc_feature (310)..(310): n is a, c, g, or t
  misc_feature (326)..(326): n is a, c, g, or t
  misc_feature (328)..(328): n is a, c, g, or t
  misc_feature (354)..(354): n is a, c, g, or t
  misc_feature (361)..(361): n is a, c, g, or t
  misc_feature (368)..(369): n is a, c, g, or t
  misc_feature (372)..(372): n is a, c, g, or t
  misc_feature (381)..(381): n is a, c, g, or t
  misc_feature (420)..(420): n is a, c, g, or t
  misc_feature (448)..(448): n is a, c, g, or t
  misc_feature (573)..(573): n is a, c, g, or t
  misc_feature (676)..(676): n is a, c, g, or t
  misc_feature (710)..(710): n is a, c, g, or t
  misc_feature (800)..(800): n is a, c, g, or t
  misc_feature (991)..(991): n is a, c, g, or t
  misc_feature (1007)..(1007): n is a, c, g, or t
  misc_feature (1038)..(1038): n is a, c, g, or t
  misc_feature (1087)..(1087): n is a, c, g, or t
  misc_feature (1098)..(1098): n is a, c, g, or t
  misc_feature (1114)..(1114): n is a, c, g, or t
  misc_feature (1134)..(1134): n is a, c, g, or t
  misc_feature (1143)..(1143): n is a, c, g, or t
  misc_feature (1252)..(1252): n is a, c, g, or t
  misc_feature (1328)..(1328): n is a, c, g, or t
  misc_feature (1332)..(1332): n is a, c, g, or t
  misc_feature (1388)..(1388): n is a, c, g, or t
  misc_feature (1395)..(1395): n is a, c, g, or t
  misc_feature (1495)..(1495): n is a, c, g, or t
  misc_feature (1527)..(1527): n is a, c, g, or t
  misc_feature (1552)..(1552): n is a, c, g, or t
  misc_feature (1556)..(1556): n is a, c, g, or t
  misc_feature (1588)..(1588): n is a, c, g, or t
  misc_feature (1615)..(1615): n is a, c, g, or t
  misc_feature (1687)..(1687): n is a, c, g, or t
  Peptide Sequence Number=SeqID_7363
  Probeset Number=SeqID_14496
ccaccaccatcaacaacacgcccggtcacacaaccacacagcgccctgctcgtcgtgaggctgacgcgcgcgcgcgacggacttcnacgaccgacgcctgctgncgcgtcttgcctcaccgtagagctgtgngtgtgntacttcngtgtcgtcagtgctcgacgactcgccgancttatgtacattctcacgacngatttgcgctctacacttacttttctcgtctggtctgcctatatacgcgtggttcaatatgaacagatatacgatcatatctctagtctcttatattcattgctcctctcttccncaactcgaccggccgncngcgatcatcaccatcctccgcgatgnacgcacncgcgccnnccnctggccacngtgggtgtgtgtggtgtctctttctctatattcgtgctntcgtgctattgtcgctcatctgctacantactaaagtaggtgggtggcgtgtgtccgcgtgctcctctctcacccgctcgcccacttcctctgcggccatacaccctcctctctcgtcctctcacgatatatataaaaaatctgagaatatantatgatctgagtatactgtggtgtctttgtcgatgcgtgtgtgtctctgtgtctctgttggtgtctgtttgtgtgtgtggtccagaacagtaaaatgtatttntgtggggggtgagtgttatctcatatattgtggnagatgagtgggagagatgtgagatgtatctgtcgtggtgtggtgcgcacacctgtggtcctgcggagtgtgtggataatatgatactgantctgctgttattatgcatctgactctgttacaactcatgtgtctgtggggtggggtcgtagatactattgtcatgtacgcttacacgcttatatagtgtgcgcgcgttcgtcatgtatatggattgtatgtaggtgtgcgttctcgctcggagtgacactctatcagatgactcttcacgaataacgaaantatcgtaacggtacgnactcatctatgctgcgacgtcgtgtgcgggngtgcggtgcggggcgacctcacacatctctgcgtgcttcttgtgtgggngtgtcgtgctnttggcgtggtctctcnctcacacgctagtctcatcncgaatcttnctgcgcgcgagttgttcgcgtgtgatcttagctatctgtgtgctatgcgcgcgtgttggtggatgtgtgctcttcatctctctctctccactcgttgtgatagctactnatatctactattatgttcactcgctgactcggggttggtgtgcgggtgcgtagcgtgcgtgtggctgtctcacacnctanataatgtgggtgagtacacgataacatacatacttaatcgtgtgtgtcccactctntttctantactctgtgtgatcaaaaacttctctcatacacctctgatctgtcgtctgtgggtggtctcactcttgtgtgtgtgtgggatctaatatacagcagtaangggggctgagatgaagtaagacactatcgagnacgtgttgaccacctcatacagtgngcgnggagagcgctgtcatactcccattatcatcgngctgcgacttcatgaatgtgactcttntatatcacttaactcttattatctgtgtagtatgcgttgtcgtcatctcaaatcgcgtatctcaatcatacnttccttactactatcgtcttgatgagtcatttctgtgtgtgggggtccgtatagtatattgtgattatatcactactgctatgttgacagctagtctcagtctgattggtgg

SEQ ID NO: 4718 - DNA, 1645 bp, Glycine max
  misc_feature (135)..(135): n is a, c, g, or t
  misc_feature (137)..(137): n is a, c, g, or t
  misc_feature (278)..(278): n is a, c, g, or t
  misc_feature (378)..(378): n is a, c, g, or t
  misc_feature (422)..(422): n is a, c, g, or t
  misc_feature (453)..(453): n is a, c, g, or t
  misc_feature (503)..(503): n is a, c, g, or t
  misc_feature (540)..(540): n is a, c, g, or t
  misc_feature (547)..(547): n is a, c, g, or t
  misc_feature (597)..(597): n is a, c, g, or t
  misc_feature (604)..(604): n is a, c, g, or t
  misc_feature (610)..(610): n is a, c, g, or t
  misc_feature (672)..(672): n is a, c, g, or t
  misc_feature (685)..(685): n is a, c, g, or t
  misc_feature (702)..(702): n is a, c, g, or t
  misc_feature (713)..(713): n is a, c, g, or t
  misc_feature (737)..(738): n is a, c, g, or t
  misc_feature (741)..(741): n is a, c, g, or t
  misc_feature (743)..(743): n is a, c, g, or t
  misc_feature (746)..(746): n is a, c, g, or t
  misc_feature (891)..(891): n is a, c, g, or t
  misc_feature (1051)..(1051): n is a, c, g, or t
  misc_feature (1071)..(1071): n is a, c, g, or t
  misc_feature (1142)..(1142): n is a, c, g, or t
  misc_feature (1195)..(1196): n is a, c, g, or t
  misc_feature (1198)..(1198): n is a, c, g, or t
  misc_feature (1208)..(1208): n is a, c, g, or t
  misc_feature (1264)..(1264): n is a, c, g, or t
  misc_feature (1315)..(1315): n is a, c, g, or t
  misc_feature (1321)..(1321): n is a, c, g, or t
  misc_feature (1337)..(1337): n is a, c, g, or t
  misc_feature (1362)..(1363): n is a, c, g, or t
  misc_feature (1376)..(1376): n is a, c, g, or t
  misc_feature (1412)..(1412): n is a, c, g, or t
  misc_feature (1464)..(1464): n is a, c, g, or t
  misc_feature (1469)..(1469): n is a, c, g, or t
  misc_feature (1480)..(1480): n is a, c, g, or t
  misc_feature (1540)..(1540): n is a, c, g, or t
  misc_feature (1543)..(1545): n is a, c, g, or t
  misc_feature (1547)..(1547): n is a, c, g, or t
  misc_feature (1550)..(1550): n is a, c, g, or t
  misc_feature (1552)..(1552): n is a, c, g, or t
  misc_feature (1554)..(1559): n is a, c, g, or t
  misc_feature (1562)..(1562): n is a, c, g, or t
  misc_feature (1564)..(1564): n is a, c, g, or t
  misc_feature (1604)..(1604): n is a, c, g, or t
  misc_feature (1606)..(1606): n is a, c, g, or t
  misc_feature (1612)..(1613): n is a, c, g, or t
  misc_feature (1618)..(1618): n is a, c, g, or t
  misc_feature (1622)..(1622): n is a, c, g, or t
  misc_feature (1638)..(1638): n is a, c, g, or t
  Probeset Number=SeqID_14497
cgtactcctcgcaagactatccgtagacacaaacctcggagatatccgcatccacacatcacgttgagcccggccacgcgccagtctgacacgactgcacgtacgtacacgatactatgcacatcagacatcacnantacgactagcacagaactaagcgtatagagagcacgagacatgcgtcacgcatattctctcatcaccctactatactctatccatattacgcgatatctgcactctatagataccacaacaccaacacgacgaacatagcnacagtccacgaatcgcatgtagccgagtcgcagtgttctgtggagaccaggataataacaccaacataatagctcacgctgagcacatacgagtggactnacatatatagaggttcgatgagacgaggccacgaacccgtcatnaatgttgtgcctaagcgctacgcgtgtgtgntacgagcatggcgcgagaaccatactgacgagcgaacgtacctctcgtcntctgctcatcggcagtgatgatgatctatcgcacatnaagagtngggactggagagggtcgagagcgcacatccaccacatctcacctccgttnagagagnataccncaactcagctgtacagtgtgagcggtgataaggagtgtcctgtgcttacccgaacataatcnattctatttgttnttttctatttatatgtnatcgcgtcgtnttatatgatataagctacttctannacncncancactcatatctacgtctgactcgacacttcagaatcacactaaacgcgacaacgtgtattaacgtctaaacgactatactacagcgagcgagcaggtcgagtgtatgtagtgcgtgctatcacaccatggctgacagcaggacanccgccctaacacagaacgacagcaattagtatccatgatatgtatagacactgatagcacgagttcggactcatctgttcatgtagttagtaatcgtggactctatattagtgcatataacacgaagtcgagtagatacaactctcatagcagtgagtgncgccgacgagacagcgagcnaagcacacgatagtatatatgaatatattggatacgatactctagtgtttctacactatatattaacatanagcacgaagaacacagcgagagcggtcacagagtatagtcgacatcgtgagtnngntgatagcgtngcgtctcctcactgtctagggacacagtcctctcgtacacgtctacatcctgctcncatctaatatatatatgctcatctcccatacatcgatctagtatgatatgnatagtntagttcatagtgtatngtatgtgctcactcatcacagaganncgagtatacatanatagcgtcatagtctctctctctctcatgtccgccncccggcacagcgccacggagcatagtgcactactcagacctacattgtgtantgagngtagccctcgnccctctccctcacaccacgactcgcaagcacacagcacacaccactacacctctcttatnctnnnantantncnnnnnnatntnttagaggagaaggatagtcagacagctgtgagagcacagnangagacnnaagcnacancgacccgcagggaaanaaaaaaa

SEQ ID NO: 4719 - DNA, 469 bp, Glycine max
  misc_feature (89)..(89): n is a, c, g, or t
  misc_feature (125)..(125): n is a, c, g, or t
  misc_feature (127)..(127): n is a, c, g, or t
  misc_feature (198)..(198): n is a, c, g, or t
  Peptide Sequence Number=SeqID_7364
  Probeset Number=SeqID_14498
agaggagcacggacacggcaacaaagaagagaaccagcgcacggggggcaaaacgacccggacccacgcgggcgaaggcgccaccgacnacgaaggcaaaggccaaccagcgcacagagacgacncncacgggcccgacacccgcgacagagacgaacaacggcgcacggagccgaactgttttttttttctcaccgnacggcgaaagaggccgagtttgtttcaacggcgggaaggcttcaaaggggagagaatggacggtgataaacccatcttcagcgtgaggagagcgtcgatcataggacggtcgcgtgcgagtttgacggtggagatgtacgacaacccaggtgaggaataccagatcgatgggggcttctcgcagcggttgctgccgggttccaatgtgacgaaggaatcggtgggtgagattcgtcgtaaagtggaccccatcagcagctgcgtgcttggg

SEQ ID NO: 4720 - DNA, 1354 bp, Glycine max
  misc_feature (952)..(952): n is a, c, g, or t
  Peptide Sequence Number=SeqID_7365
  Probeset Number=SeqID_14499
gtgtgtgtctccctccccccccgctgccccgccgcggtacttctacacatcattaattatctttttggtgtagtcgcaccgccggcgccggcgcgggtcgtctcttatgagaaaggagacagccgcccccgccggtggggaggggtcccgaggtggtatatctcgagcgcaggtgtgtggagtgcattcaacagaacgagacgaaagggagcagggccactttcattatcgctctaactcattcctcatatacgaggatcgcgctactgttatcatagacacttgagagaaacacattacctcccggatctgtgggcggtctgcggcatgcaatcttgaaggcgggctgcttcacacgcggctatagcagtcggagcgtgcggcagcgttgtcgtcctcagcaccacgtaacacgacgagtgggcgcgaggaacagaaggcctccgcagactcatgggaccgttctgaggcttcgccgctccttcatgttgtgttgctgcgcgtctctgcgtggggagacgtatttcatagcgatctatgagggagagactgcgaggaacgacgcatgatagtagaacataatcacgcctccgaagtatagtcacacgaatgactcagtactcgtgggtcgcgacgagtgatcgcgacgctcaaggctgcttacaccatcggttgtgcgaggtagccgcgcagcgacgtctgcgttattcttatagtatgcgtgcgtggatatcgaatgcaccccgcagatcagtcgtgaccaggcgaggctagttgaggcggaagaccgggcgacacgtcatggtgcagtcgttaccatcgcacgcgcgtcggaggtatcgagctcaagccgtgatactacatgttactagatatagcgtctctcgtggctccgagtcgctgcgtgatcgatcgtgagacctgcttactcataatgcgtaggaagacggcnccgatctgcgcgcacgagacactcacggcgatgcgtcgtgaggcgtacgtgacgcgtggcgacagtcgcagaacactacgcgtagcgtggagcacagcattcagtgaatcgaactggcgagacgtcactctcatcctctgtggtagacgccgcgcggtcgaccggagctcgacacgtgcgacatacgcgcgcgtccgtcagtgtgagagcgatgagctgatctatctacgcatcgatgacacagatatctacatgaggagtgggcactcgtctacacaactcttcactatacacctctaccagtcggaccgtaggagagatcgacatcagcagttgccgcgcttccgcacagatgatgctcgcgacgttcgggatctaagacggacatcctcgccgcgctga

SEQ ID NO: 4721 - DNA, 1483 bp, Glycine max
  misc_feature (9)..(9): n is a, c, g, or t
  misc_feature (19)..(19): n is a, c, g, or t
  misc_feature (71)..(72): n is a, c, g, or t
  misc_feature (79)..(79): n is a, c, g, or t
  misc_feature (229)..(229): n is a, c, g, or t
  misc_feature (265)..(266): n is a, c, g, or t
  misc_feature (366)..(366): n is a, c, g, or t
  misc_feature (406)..(406): n is a, c, g, or t
  misc_feature (609)..(609): n is a, c, g, or t
  misc_feature (675)..(675): n is a, c, g, or t
  misc_feature (872)..(872): n is a, c, g, or t
  misc_feature (1192)..(1192): n is a, c, g, or t
  misc_feature (1466)..(1466): n is a, c, g, or t
  misc_feature (1483)..(1483): n is a, c, g, or t
  Probeset Number=SeqID_14500
ttggtgttngttttgtgtnttttgtgttcttttatccacagcagaagacctgacacacacacacgtgcgcnncacgccngcggactgggggagacctcccccaatccaacccaccgccccacccctacccccaccccgcatcccacacacgccttctctctaacttgccgcgcttgtcggcgcgtgtgggcgcgctacagacgcgcaacacgacgggggggcggagcgngagcagtgcacctgaagagcaccaagcgccatcaannttactctacgacaacacatccactcacacgtctaaaaccgtgactacaatatacgcgcgcggagatacttcacagtatatatgagtctgcaattcgccgncagccacgcacaacaagagaccggcggtcccacacgcgcngccgctaccacggctggttcggcgatgtacctctccctcgtcctctcttttatctccttctcttcccttctcctgggccgcgcgcgtccacgtgccgttgctctcctctagccgcgcgggcgtcgactttgaggcgacccgagaccgatatggcgaacaacctcacgaatggcacaacaaggaggatgaagatacatatgttntaaaccgatgcatatatgatggtgtggacaaatgtgaacaatgcaagcacacaccaagaacaccgngtgatagaatatacaccgccaccacactgtgggcgagaaggagttgagagtagaaggtggagagacaatagcgggcgaagcaacacacatcgcgcgcacatgctctcgcgcgcgcgctgcgtcgttaatcctggcatacaggcgctggggccatcctctggtgatccactcccatattgattatgatgtggttattngtgaacacatgacgctctcctcatcactacgtgtgattctgggttggctatccgctcgcggcggtatcggcggagccacatgggtggtggctgcgtgtggtctcaccatacgaggcggcgtgtatataaatcagcgcgggggtgtttgtgtgaacgaacggcgatggtgtgtacgagtgtcacacgcgccctacgtggggtttagcacggcgccgacgcgcgcaccgaagacgcgggccggaggataccacgccgcgcccgcgcgtgcggactatagacaaacaaccagtcgcggcggccggggctcgcatacgtcggtnctggggcgcgtctcctcgaagatcgctctcaccaggtggcgtacgcgcgctcttctcttctgttgccgcctcgtggtctactgctggtggtgtgaaataatagtgtgctattcgtgctctagtagcacaaggcgcgcaagaatgaaagttgtatgatacagaggaacgatgagcaacacgagggtgagtgtgtgaccgagcaacagacgtctgtctggcaaaacatagatgaggagtgggaggctgtcgcacatactacacatgtgcatagcgnctcgggcggcggcgcan

SEQ ID NO: 4722 - DNA, 340 bp, Glycine max
  Peptide Sequence Number=SeqID_7366
  Probeset Number=SeqID_14501
ggttgacagtgagagccaagccgctgaagcaaattatgtgacagctgtgacaacagagactacaaatgatcatggtgaagaacttataggaaccaccactagtccttatgagcaagctggttgtggttccaagactgattggcgtgtccgagcaatatcagccacaaagagatgccagcgggagaaccatatatatgtgaactctgaggatatagaggaaactggatacacggatataatgccagagagcagtgggaaatagtggatatgcataggagagctggtaacacgaatgagtgggcacatgtgtggcggtgaggcggcggagaatgctgaggtg

SEQ ID NO: 4723 - DNA, 1525 bp, Glycine max
  misc_feature (14)..(14): n is a, c, g, or t
  misc_feature (71)..(71): n is a, c, g, or t
  misc_feature (86)..(86): n is a, c, g, or t
  misc_feature (93)..(93): n is a, c, g, or t
  misc_feature (100)..(100): n is a, c, g, or t
  misc_feature (183)..(183): n is a, c, g, or t
  misc_feature (247)..(247): n is a, c, g, or t
  misc_feature (276)..(276): n is a, c, g, or t
  misc_feature (278)..(278): n is a, c, g, or t
  misc_feature (390)..(390): n is a, c, g, or t
  misc_feature (428)..(428): n is a, c, g, or t
  misc_feature (505)..(505): n is a, c, g, or t
  misc_feature (555)..(555): n is a, c, g, or t
  misc_feature (790)..(790): n is a, c, g, or t
  misc_feature (932)..(932): n is a, c, g, or t
  misc_feature (936)..(936): n is a, c, g, or t
  misc_feature (969)..(969): n is a, c, g, or t
  misc_feature (1074)..(1074): n is a, c, g, or t
  misc_feature (1094)..(1094): n is a, c, g, or t
  misc_feature (1100)..(1100): n is a, c, g, or t
  misc_feature (1264)..(1264): n is a, c, g, or t
  misc_feature (1268)..(1268): n is a, c, g, or t
  misc_feature (1297)..(1297): n is a, c, g, or t
  misc_feature (1303)..(1303): n is a, c, g, or t
  misc_feature (1438)..(1438): n is a, c, g, or t
  misc_feature (1475)..(1475): n is a, c, g, or t
  misc_feature (1480)..(1480): n is a, c, g, or t
  misc_feature (1488)..(1488): n is a, c, g, or t
  misc_feature (1504)..(1504): n is a, c, g, or t
  misc_feature (1506)..(1506): n is a, c, g, or t
  Peptide Sequence Number=SeqID_7367
  Probeset Number=SeqID_14502
cgtgagataggtgngagatagtatgtagtcggtgctgatgtgagatgtttgtgtttattcgttgacgcagncgatgagatctgtcngagtgtntagatgnatatctattatagcgctcttgtcgacgctttacgtatgagcgtgatctagttattagtatgtggtgtctatgtgtttgctacntgtcagctatactgtgtacgaccatgtgtacactataacatatttatgagatctggatatctcntatcactatgtagtctgtacagtattcgnantcaccgtgattatatatggtatgtgagtatgtcatctatttatgtgtttatgttatctatacgctcgcaactataatcgagagtcataagagagctagagtattgatgcgtnatagtactatgtatttggggcgtagcaatctattttancgtgtgatattgtgtagctctgtgcttgtgatcttatacgtgggtgagagtgtgtagtggtctgttactgattgctnatattcgttgtctactgtattattatgtaatgatcttccaccttctgatnggactcattatctctctatacgtcatcatactcacatcccacctcatcgtccacaccactattagatagactctcattatcgtatcgcctagcatgtttatctgatagtgataatatagatatgaatacgattgtatgtagatctgcctctaatttagtatcggcggtgttacgatgctacgagtgtgtagagtaagtgcgatatgtgtatatgatgttcataatggatgtgtgntagaaggaagagagagtgagaggggagagtctttatttagattatggatgtatcttgacacgagatcaccacaacaacagataccgagctgccatcatacagaggccgctcgacgcgtgaataacactgtacacacgagganaagnacagagacgatgagatgtaaacaaatttaaganaagcaggcgggacgatttagcatccagatgcctcatatatcgattgtccagataaacgatgcaccgcggcgcaatcacagagagggaggggcaagaacattaganggagtatgagttattgatcnttaatntcgtcttagctttcctgtgtatgatgaacgacgaagtgattattatctcttctgcatttcaactaatacagtagtcgtggatgcgagctctatacacacgctacgaccgtcacaaaatggtcataccacgatacaatactagtgcatatctactctatcatatncacngcttgtcctgctcctgtgtaattagttancgtcanagccatctcatccactcctacaatatacaatttatatatattcctatactagcatatggacgctatactccacgcgccattgtacgggcgcgcgtggtgcgggggggggggaggaatattgtctatatataacantagtatatgtgttaatatattagtttttgtgatattntcaantatactanttcatcctcctacctntntattattttttttttttta

SEQ ID NO: 4724 - DNA, 712 bp, Glycine max
  Probeset Number=SeqID_14503
gattactcaacttgtttggtcaaataatggaagcggcgacgaagcagagcgttacaaaccgccttctcaccgtcaagtcagcctccggcaagacttacagtcaattagcggcggagacagggctcaccaacgtctacgtggctcagctgctccgtcgccaagcccagctcaaacccgaaacagtccccaagctccgtgaagccttacctgctctgaccgaagaactcatcgccgccatgatgtctccgccgtggagatcgtatgatccaaacctcatccaagaacccaccgtctacaggttgaatgaagcagtgatgcatttcggtgagagtataaaggagatcatcaatgaagatttcggcgatggcatcatgtcggcaatagacttctattgctctgtggacaaagttaaaggagttgacggtaataaccgcgttgtcgtgacacttgatgggaagtatctttctcattccgaacagaggactgagaatatggtctcaaggctaaacctcaagggaagtacaagcgaatgatatgaaaatgtaagaataaaacgattcatatgaatgtaagcagcaatccatgaaggcttttatgtctaaagctgtaaacattgtaatatttatggtgtttgtttattctgtactctatgcaactccagcctcgagctgtttcaagttgaataacagtgaataaaataaaataaacaatg

SEQ ID NO: 4725 - DNA, 1355 bp, Glycine max
  misc_feature (17)..(18): n is a, c, g, or t
  misc_feature (23)..(23): n is a, c, g, or t
  misc_feature (26)..(26): n is a, c, g, or t
  misc_feature (28)..(29): n is a, c, g, or t
  misc_feature (48)..(48): n is a, c, g, or t
  misc_feature (61)..(61): n is a, c, g, or t
  misc_feature (69)..(70): n is a, c, g, or t
  misc_feature (87)..(87): n is a, c, g, or t
  misc_feature (167)..(167): n is a, c, g, or t
  misc_feature (295)..(295): n is a, c, g, or t
  misc_feature (316)..(316): n is a, c, g, or t
  misc_feature (407)..(407): n is a, c, g, or t
  misc_feature (410)..(410): n is a, c, g, or t
  misc_feature (447)..(447): n is a, c, g, or t
  misc_feature (849)..(851): n is a, c, g, or t
  misc_feature (964)..(964): n is a, c, g, or t
  misc_feature (980)..(980): n is a, c, g, or t
  misc_feature (1021)..(1021): n is a, c, g, or t
  misc_feature (1144)..(1144): n is a, c, g, or t
  misc_feature (1259)..(1259): n is a, c, g, or t
  misc_feature (1262)..(1262): n is a, c, g, or t
  misc_feature (1286)..(1286): n is a, c, g, or t
  misc_feature (1343)..(1343): n is a, c, g, or t
  misc_feature (1355)..(1355): n is a, c, g, or t
  Peptide Sequence Number=SeqID_7368
  Probeset Number=SeqID_14504
ttgtgttttgttgtgtnnggggnggngnngggaggggggagggggganggcgcgcgggganagttgggnnatttctttatttatctnctgttgtgtgtactgagtgtgcgttgatgtcgttgtggtgctcttcctcctcaccttaacacaccaccacacacgcgccngagcacagcgctgcgcgaggggctccgcgcggagccgcaatataatgattagcttgcgccgctgatgtgctgtgctgtctgttctacgtgctttattccggacgctgggcgggccgccggtcgcgctncatgcgcggcggagggagcgncgtcatgagggtcgaacatcatgccattctgccgtcgtggcctcgctatgtctctccggacgtgtctcgcgtggactcacagcgctctgcngcngtagctccgctgctcgtcatgcctctgtataaggaanatctcttttatttcactactccctggcgtcctgtacctaggtaccgagtgagctgcgtcgtgtgcgctatgacagtattaaaacacaggcacattatacaatatctgtttacatctattcgatgcgcgtggagttgtatgctgactcctccgccgtgttggcccgcctgtgcggtgttggtggtgtgtgaggtcgtgtgtggtgtgtggatgatgttatgttatagatgatgtgacattacgatcctaacctctccatctcgtattctcatcttgtgtctattcgtcatgccatctcctacactttatacggatccacccgaccatcatacaggagtcggtggaggaaggagcgtggtatagtggttccgctgcggtccgtcctacaccacgacgaagagannntgtgtctccccacctctccgctacgtggtgtcgtccatatactatctgctcatgaactctgttgtccgtgtactgacgcttggcgacttgcgcatccctcgccctcccaccgnagcgcccctcgtcgcnagcctctcacatgccgtcgtcgcgaggagtcgcgctacganctacccctctcctgcctcgtcctcgggcgcgtatgcggctctgcacgctgcgtcggcgcgcgcgtcgtgctcgtggtcgccgatgcgctccgctcgccaatcccctagcgcgtatctcctgantgctcggcgcgtctccctctctcggcgttccgactcgcgtttgcgtgctcgcaaactcgtgttcgtcgtgtgtgttcgctctggtgacgtatgatgtggcttgacagcacgtgtntancagagtctcttctggcgcctcgcncgtcgtttccgcggtgccgtggtcctgtctctctcctctccgcgttcatcgcgctanccactctctgcn

SEQ ID NO: 4726 - DNA, 2275 bp, Glycine max
  misc_feature (55)..(55): n is a, c, g, or t
  misc_feature (106)..(106): n is a, c, g, or t
  misc_feature (239)..(239): n is a, c, g, or t
  misc_feature (274)..(274): n is a, c, g, or t
  misc_feature (305)..(305): n is a, c, g, or t
  misc_feature (310)..(310): n is a, c, g, or t
  misc_feature (568)..(568): n is a, c, g, or t
  misc_feature (682)..(682): n is a, c, g, or t
  misc_feature (690)..(690): n is a, c, g, or t
  misc_feature (777)..(777): n is a, c, g, or t
  misc_feature (782)..(782): n is a, c, g, or t
  misc_feature (809)..(809): n is a, c, g, or t
  misc_feature (811)..(811): n is a, c, g, or t
  misc_feature (842)..(842): n is a, c, g, or t
  misc_feature (861)..(861): n is a, c, g, or t
  misc_feature (874)..(874): n is a, c, g, or t
  misc_feature (979)..(979): n is a, c, g, or t
  misc_feature (1037)..(1037): n is a, c, g, or t
  misc_feature (1041)..(1041): n is a, c, g, or t
  misc_feature (1043)..(1043): n is a, c, g, or t
  misc_feature (1104)..(1104): n is a, c, g, or t
  misc_feature (1121)..(1121): n is a, c, g, or t
  misc_feature (1131)..(1131): n is a, c, g, or t
  misc_feature (1133)..(1133): n is a, c, g, or t
  misc_feature (1139)..(1139): n is a, c, g, or t
  misc_feature (1142)..(1142): n is a, c, g, or t
  misc_feature (1186)..(1186): n is a, c, g, or t
  misc_feature (1197)..(1197): n is a, c, g, or t
  misc_feature (1308)..(1308): n is a, c, g, or t
  misc_feature (1355)..(1355): n is a, c, g, or t
  misc_feature (1357)..(1357): n is a, c, g, or t
  misc_feature (1406)..(1406): n is a, c, g, or t
  misc_feature (1411)..(1411): n is a, c, g, or t
  misc_feature (1455)..(1455): n is a, c, g, or t
  misc_feature (1470)..(1470): n is a, c, g, or t
  misc_feature (1480)..(1480): n is a, c, g, or t
  misc_feature (1488)..(1488): n is a, c, g, or t
  misc_feature (1504)..(1504): n is a, c, g, or t
  misc_feature (1548)..(1548): n is a, c, g, or t
  misc_feature (1555)..(1555): n is a, c, g, or t
  misc_feature (1557)..(1557): n is a, c, g, or t
  misc_feature (1610)..(1610): n is a, c, g, or t
  misc_feature (1619)..(1619): n is a, c, g, or t
  misc_feature (1624)..(1624): n is a, c, g, or t
  misc_feature (1629)..(1629): n is a, c, g, or t
  misc_feature (1655)..(1655): n is a, c, g, or t
  misc_feature (1658)..(1658): n is a, c, g, or t
  misc_feature (1684)..(1684): n is a, c, g, or t
  misc_feature (1702)..(1702): n is a, c, g, or t
  misc_feature (1710)..(1710): n is a, c, g, or t
  misc_feature (1716)..(1716): n is a, c, g, or t
  misc_feature (1752)..(1752): n is a, c, g, or t
  misc_feature (1767)..(1767): n is a, c, g, or t
  misc_feature (1806)..(1806): n is a, c, g, or t
  misc_feature (1835)..(1835): n is a, c, g, or t
  misc_feature (1855)..(1855): n is a, c, g, or t
  misc_feature (1865)..(1865): n is a, c, g, or t
  misc_feature (1897)..(1897): n is a, c, g, or t
  misc_feature (1899)..(1899): n is a, c, g, or t
  misc_feature (1914)..(1914): n is a, c, g, or t
  misc_feature (1917)..(1917): n is a, c, g, or t
  misc_feature (1920)..(1920): n is a, c, g, or t
  misc_feature (1930)..(1930): n is a, c, g, or t
  misc_feature (1941)..(1941): n is a, c, g, or t
  misc_feature (1951)..(1951): n is a, c, g, or t
  misc_feature (1954)..(1954): n is a, c, g, or t
  misc_feature (1980)..(1980): n is a, c, g, or t
  misc_feature (2013)..(2013): n is a, c, g, or t
  misc_feature (2023)..(2023): n is a, c, g, or t
  misc_feature (2031)..(2031): n is a, c, g, or t
  misc_feature (2037)..(2038): n is a, c, g, or t
  misc_feature (2046)..(2046): n is a, c, g, or t
  misc_feature (2114)..(2114): n is a, c, g, or t
  misc_feature (2124)..(2124): n is a, c, g, or t
  misc_feature (2200)..(2200): n is a, c, g, or t
  misc_feature (2215)..(2215): n is a, c, g, or t
  misc_feature (2247)..(2247): n is a, c, g, or t
  misc_feature (2275)..(2275): n is a, c, g, or t
  Probeset Number=SeqID_14505
ctacaacacaccctctccactctgtacacacattaatgatacggtagatattctntcatactgttatcacgtacgtagcctgcaactctcttacgcgtcgcgaagngcgtgctggtgttgctataccatatcgtacaaggaggatgtgtgagagagaattatcgtatccatacagagtgacgcgcattgctgtacacggtgggatctgcctaatttcatctactcaaacgcgaccgatncaccacgagtctgaatatcacaacatcaaccactngacgactcactcgtatcatgacatatatatncacgnacaggaaaggcgacaggattgtagataggcgcaatatatatataaagttaatcatgaccgacttctacacacttcctctcccgtttgttccagcgtcgagtaactatacaatgacatacagcgagattaatgataacagcacgaatattcagattcacgactcacacctcgagtcttattactgtacgacagcgcgtcagtgtaagtagagatatatatacagctcacagagacgcacgagagtacacgcgccgcgtngttgttgcagcgcgggtatagtgttgacgacggggagatgagatgcgtgagcgagagaggcgatcagatcaggatacagtggagacagcacgacgcacgagtgaggtgcgcgcngcgatcgngatgatggattgtctcgttatgtacctggtcttagcagcggccgcgtcctagcccgcgcgagtgtatgcgcacacacgcacgccganagagngcggcggctcctgcgcggcagttgatngntactgtcagatgaacgccgcacgcactccgngcgattgctagtttacgcngcgcacgagagangagagacacgcgtataggtatacattactacttatgatgtctcgaacgcggcggatattgtgtacatatctctcgctctcgcgcgccctacctgttaatagtacnactgcaaccatctattcatatgtgcgacacgacgcggccagtgctatatactagtgtntganancacgcagcgactgtgatatctgagacacctatgagatgaacgcagacactgagtcatgacngatatgctcgagatgantgatgcgcgncncgcgcncgnacacgctgtagtagtgtacgaccgaatgctcagatattacgtcncactcgtacanagatacatgtacacatagcgctccacgacccgcgcacgacgcgccactcactcgtatgtcgtgtgtgctgcatctcaccagatcagcgctggtattatatcgtgtataacntagatctgtatgctggtgaacacgcactgcgacatgagaggagagcngnagacgagatatgtatagtcaatagatatatgagcccacctcacgcaccncagcngtgcacaacgatgatagtagttgacgtacagacgcgggctgagntgtgtgatatgagtncgcgtctctnattatgtngtatgtttcatagcgntgtcgcgagtgtgtctatggtgtcgcgcagcctaaaggctgcantgagtangncatcgagagtatgaagcgtcgcttcgacgacgtaaacatcgcctacgactacnctactgatnaaagnatggntctgcagaccgagatactatctatcntgnttgtgtcgacacggcatccgtgtttngataggtagtattatgancgtgaaantacgtnacgcacgagacgcgattgaggtactggacgatgcgntagcgggactgtacnatcgcgcgatcgtagatgatccactcgtgatcagctacntagtgatgatgacgcatcgagatgaaatnatgcgtataagtacgatgtnactgcagcgntggagcgcagccgcccgacacaaggtcggcgncngaccagtaacgttgngangtntctatagatngatacagtganacacgccgcnccngagacgactgatgggcatcaccagcntgcttgctacgcgcatcgccatacgcgactgantagatgagtncgcatacncgtcgnngttgatantgctagtagagaccggcggcgatgcgatgctgaatgatagctgcagacggagatgacgtgcatactantgagataacnatgcgagtgtcagagaacgctcgtgcgtctggtaagtagcactcgtcagcggaccacgtcgtactgtagtagtagnactgcacagtatgangtgcgcatggacgctgcttagtataatagtgntgtgctatgtgactgcacgctcgactcn

SEQ ID NO: 4727 - DNA, 1443 bp, Glycine max
  misc_feature (9)..(9): n is a, c, g, or t
  misc_feature (135)..(135): n is a, c, g, or t
  misc_feature (171)..(171): n is a, c, g, or t
  misc_feature (461)..(461): n is a, c, g, or t
  misc_feature (464)..(464): n is a, c, g, or t
  misc_feature (493)..(493): n is a, c, g, or t
  misc_feature (516)..(516): n is a, c, g, or t
  misc_feature (776)..(776): n is a, c, g, or t
  misc_feature (1154)..(1154): n is a, c, g, or t
  misc_feature (1224)..(1224): n is a, c, g, or t
  misc_feature (1356)..(1356): n is a, c, g, or t
  misc_feature (1440)..(1440): n is a, c, g, or t
  misc_feature (1443)..(1443): n is a, c, g, or t
  Peptide Sequence Number=SeqID_7369
  Probeset Number=SeqID_14506
tttcttttngcctctttctttttttcttttcttctgcctgggctctccggctgtgggctctctctcttcgttctccgtgttttgctgctctatcgttttgtcgggtgcgttcttgcgcgttttgtggtttgtgtntttggtgtggtgtgtctatggtttttgggggtgggncgtgtcgttagcctgtgcagggtcgtatgatctagcctatactctataatcacacctccaccggagacctcgctggatggtcatgcgtttcatgtgcgatcccatgcgtgctcccgcctcgggtttcgcgcgctgttcgtctgttgttccatatatagtctctggcgtgtgcgttatgcagccgggaccgtgtgacgttgtggctgtcgcggctactcctcttgcatcttgcgtatctctcttagttatagtgatacaaaatataaacaagaacaatataaaataaacanctnccgaccatatccaatataacatcccatcntgactcccctcccccctccaccnctcaccccggcggtgcggctgggagcgcgtcttgtacgtccatctcgccttggtacctagctccaatcacatatatacattttatatgtattaatggtaataagattgtatgaaattaatattatataatctgtgtacgagcacgagagcgaggagtcgaggtgtatttagtgtgttgtaagatgacattaagtggagcgtgctctatatgtatatgttacagctgctcgagtgggatgaatggataagactaacatatnagatgcggcacacgctatccatcatatcactatgacagctgacgtcacatcactaaacactccaccacacacacatcactattatgcaacgtcagtcatccttgtgcctcgatgctactattacgccatcatatcatatgatatgcgtcggtatactaacatccgcattcgtactgcatcgctagtcgattcattcgtctctacgttctatctgcttcatctattagtggtctcctgtctcgtgttgcgtcttactgcctccgtacatgtcacgtgtgtaatactatcgttgtgtcacactatcgtgtgtgggctgttgccactgcgactttctgctcatcggatctctcatgcacgtatctcggccatgactgtgtnctatcatacttcttcataaggtcacgctatagatgatgatgcactataacagttatctgcgatgcgatgntgcatgatcatcttctctatgttcagcgactgctcatctacgtgcgtatggtgtgtgcgtgtagtgtaatgagtgatatcttctgtggttctgtgaggatgttctactcaatactatcactctaccactctntgctctgttttctcatctcactctctcccactctacgtgtttgttcgcctgttactgtcattgatatgatactatgctttgcancgn

SEQ ID NO: 4728 - DNA, 1474 bp, Glycine max
  misc_feature (9)..(9): n is a, c, g, or t
  misc_feature (45)..(45): n is a, c, g, or t
  misc_feature (273)..(273): n is a, c, g, or t
  misc_feature (278)..(278): n is a, c, g, or t
  misc_feature (289)..(289): n is a, c, g, or t
  misc_feature (299)..(299): n is a, c, g, or t
  misc_feature (375)..(375): n is a, c, g, or t
  misc_feature (530)..(530): n is a, c, g, or t
  misc_feature (615)..(615): n is a, c, g, or t
  misc_feature (721)..(721): n is a, c, g, or t
  misc_feature (1050)..(1050): n is a, c, g, or t
  misc_feature (1303)..(1303): n is a, c, g, or t
  misc_feature (1308)..(1308): n is a, c, g, or t
  misc_feature (1311)..(1311): n is a, c, g, or t
  misc_feature (1389)..(1389): n is a, c, g, or t
  misc_feature (1393)..(1393): n is a, c, g, or t
  misc_feature (1396)..(1396): n is a, c, g, or t
  misc_feature (1401)..(1401): n is a, c, g, or t
  misc_feature (1412)..(1413): n is a, c, g, or t
  misc_feature (1420)..(1420): n is a, c, g, or t
  misc_feature (1424)..(1424): n is a, c, g, or t
  misc_feature (1431)..(1431): n is a, c, g, or t
  misc_feature (1436)..(1436): n is a, c, g, or t
  misc_feature (1439)..(1439): n is a, c, g, or t
  misc_feature (1444)..(1445): n is a, c, g, or t
  misc_feature (1454)..(1470): n is a, c, g, or t
  Probeset Number=SeqID_14507
ctacaaganatgcgagacagagcagcacatcacacgatcatggcnaatctatcgcagatcagtgcctagtgacagatatactggagaggtgagagtaatttagtgatgaagtgactccgatgcacactatgtgttctgtgtgcgtctctcgattgtgtcttaatctgttaatatatatttagtacatataagacgaagtaataatcagagagaggagagatgaagtaagagacaagataagagacgagtcgatcaatcatacgatagagaggnatcgncgactcaactnctggtcgtgncgcttgtcgcatctcgtgtcggcgccatctatcttctcaatctatacctccgtctcacacactgtgttcactaatntgttactcgctcatcgtattgttgctaatatgtccgtgtacaagagtattgtttgctgtacgtcgtggctgtgttctaacacagtgtgtcacagacatgagcacatagtgcagacagtatgttgagtggcatgagaggacgatagagactgtagnagacgcagagagtatgtcgcacctcgtcacgtgtgtatgagatattatacagattttagtgtgagtagacacatcttacactctncgctcgatgcacgagatctactgtgtgatactcgacactctcatgtagacatagagacgtgtgaagtgtatatgtagttgtttgtgtatgtagagtgttatagatnccaggacgagtgtctatctatggctaggtctctgctggaggaaataagatatatagtatgagagaaacggatcagtgagcgggtggcgcagtcgataggctcgccatcctcaaggagatacgactatccagatacaacaccaggcgtgatgagcgggacgaatatgcgagagacggacaacgtaggcagatgagatatagcccacgcgagcacactagagcagtggttctctcctctcccagacacctgatctatcatccaatacaattattcgtagaacaatatcatagcctacatgtgacggcgttctttgtgtagcagagcgcgcnccaagccaatcgctgaactagcagggagagttcactgcgacagtgtttatagcgtagtctgagctatgcgtgtagttattattgttattatttaaaggtcgctatatatatgcctccactctagtttctttgtgctgtgtcgatctagtgacatatccatgtctcacttctatctagttatcaactaaggaaagagcttgatccagatgtacgtgtggttggcagatgttcggtggtcatagcgttggcacancgcancantgtacccccagtagtatttgcagttgttgtacttcttcattattctctgtgttgagtgctctaactataagtcgggtntgtncantgatntttgagtggtnngggtttntttnggggtgnatgtnggnccggnnggggggggnnnnnnnnnnnnnnnnntttt

SEQ ID NO: 4729 - DNA, 800 bp, Glycine max
  misc_feature (800)..(800): n is a, c, g, or t
  Peptide Sequence Number=SeqID_7377
  Probeset Number=SeqID_14508
aagacactgaaggagaaatgtccgaaaacctaagttcgcttcttactttcgccgacatggagatttgaagctctgaaatggcttcttcttcttccaactctccgccgctgtctacttccatgtctcagctgatgaaacctgagcaaccgagaaactgggcggagcttccgccggaactgatttcatcgatcctgctccgtcttaactcgattcagatactggagaaagctcagaaagtgtgcagatcttggcgccgcgtctgtaaagacccctcgatgtggaggaagattgacatggacaacgacggagacttgggaagcatggggtacgacccagagatcatgtgtcgtcacgcagttgatcgtagccaaggcggcttgcttgagatcgacttgtggtactttggtactgatgagctactcaattacatagctgacaggtcaagtaacctgaaaagccttagactcataatgtgctacccaatagctgacgagggattcgtcgaagaacctgttaacgaaacctgcccgcttgccttgaataacctccaagggtcacataaccgccgcaatgtctcggagacagctctcgaatactggcacggaaagcccctgcccccaattctgaataaacttgaaggctaaacctcccgaacaccaaccccccattttaacggccaactaacttcactgcaccccaaacccctaccgctttcgctgaaagcatgccctgaactacaccaccctcccagctgtttggccacacctttaccacaaggggcttgaccgtcatttcccacn

SEQ ID NO: 4730 - DNA, 1339 bp, Glycine max
  misc_feature (197)..(197): n is a, c, g, or t
  misc_feature (1233)..(1233): n is a, c, g, or t
  misc_feature (1307)..(1308): n is a, c, g, or t
  misc_feature (1318)..(1321): n is a, c, g, or t
  misc_feature (1339)..(1339): n is a, c, g, or t
  Peptide Sequence Number=SeqID_7378
  Probeset Number=SeqID_14509
ggtgtgacgagtagagtgaagtttgtatacgagtgtagtctatagtgatatggatgatagtagatagtatatatagagtgagttatgcgaatgctagggtcatctgagcggactcagcggagatcggtgtgtgcgagtggagtgattgcgattcggagatacggtggagctgagtgtgaggagagcatgatctcgcncgttatggagtgatagtataggtcgatagtcagtatatagagagagttttgaatatgcaacacgtcgagtatacgtgatcatgaggggaggtcaggagtgggagtatcgctgaagggatacaataacttgttaatctctgatcgtcatgtggtgggaggcgagggagagcattcataagatacattatgggtcgatgaagtgagagacgcgaggagtgacttttgtgtgagagtcgtgtgtactctatcatctcatatatactttggtgctctaatatcaagtaccattatacagatcgttgatggtgtgtgggcagcgtgcggaatgccgtcataagtcaccgttctatcctggatcaattatcatatatacgcatataaggaacgggcgcgtgatgatggtgggtgcagtggagttgttgagatagtacacaagtgagacagaacttaactagataatactatatatgtatgtgaggagatggtatggtgaagcgagcgtggtgcattggtgcgacgggaggtcatcggcgctatccagagagtctacagcgtcaggtcatattagctattgataggcgagtgtcatagtaagcgtggtagagataagagagttcttgcttccgtgatccgatggtggtatgcgttcattctcgcgtttaagtgacaatagtctgtgctgatcatcattatgtcgtcgatgtgtgtcagaagtttcgagtgttggacgtgcggaactagatgatgcttgtgagtgtaagcgcaatgacgtacgtaggatggcggagctcgcattcttagtagatgcagagatgacgatggtggatcagattggacatggcgttcatactactctacattctattcacattttattacataatattaccatgtatatatagtggcgacgggagaccgcagactaagctctgaggtggatggtatatgttaggtgacaggtgtgcgcgaggtaatggccgtggagaagagtggaagtgtagcgcttatgagcgtgaggggggcgagcgttcctccnccggggggaggagtataacatcaaagagcggagaatgaagagagaacacagacgcgaggggaagaagaacaagnnaaagcgaaannnnccacccccgctagggggn

SEQ ID NO: 4731 - DNA, 473 bp, Glycine max
  misc_feature (266)..(266): n is a, c, g, or t
  misc_feature (307)..(307): n is a, c, g, or t
  misc_feature (331)..(331): n is a, c, g, or t
  misc_feature (402)..(402): n is a, c, g, or t
  misc_feature (416)..(416): n is a, c, g, or t
  Probeset Number=SeqID_14510
tcttcactttccaccgttggctttctctcgcgttttccaattcccccccaaatctcacgcctagggtttctatcgcaaaccctccctccctccaaccaggtcgcgtgcaaagggatttcgaagcttcggaagaaaaaaatgaaacctgttttctgtggaaacctggatttcgacgcgcgtcaatctgacgtggagaggctcttcagaagatacggcaaagttggatagagttgacatggaaaatccggggtttgcttttgtctaantgggaagatgaacgtggatgctgagtatgcaatcagaaagnttgatagaacagaattttgggtanaaagggtccggcccggatttcgtggtgagtgggactaaagcaaggaacgtggacagtagaagaatcagggngggggatttcccgnaaaatcttcatctaattcaagaaccatcccaaaaactttggtatccgataccgtccg

SEQ ID NO: 4732 - DNA, 394 bp, Glycine max
  Peptide Sequence Number=SeqID_7379
  Probeset Number=SeqID_14511
atgactatctcactgggataacttaccaactatgaaatggatttataagcttttatgcatgactggctgccgatggaccgattcgcttccggaggacggcatcaggctatatactaattgccttgctcctatatcagatcgagggggagcttcacacgtactacctatgtaactcaatgggctactcatggatcggatacaccttatacctaaggctgcatcttactatccgatgcaatccccactcgtgctaataggtgaggacactctctgttgttactgcagagaactgatgcacatgctgattatacccagctacgtgaattaggtgggaaaaggacttgaactgctctccaatgcgctttaatataaactgggcacaggccacgtctat

SEQ ID NO: 4733 - DNA, 599 bp, Glycine max
  Peptide Sequence Number=SeqID_7380
  Probeset Number=SeqID_14512
tcagctacgtaggccccccccccccaatggaataatgtgtcctcaccataacaccaggttattttaatttcatttttttattatatgttaatttcattttattggacagagcatgtaacccctgaatgttcctttaaaataaactagttttataaactctacaaactaaactatgcttatctttagtgaagagaaaagaaaaatgttatgcacgatgtgatacaattacaaataattatatattataaatttttgtctcttataaaatcacaaattcaaagttgaatgttggatttaaaaaaaataagataaaaaaagttaaataactgaataaaaatacaattttatccttacaattctcttcatgcaagtctgacttctttccacaaatttatgatttatgggggtaaaaatatgaaagtatcattttcataactgtaacaaggaaacaactatgcttaatgggacctacataccccaacttaactctgtcctcaatgtcatgtaccaaacgaagatgtctcgtttctgtcgtcagtaaattaatttcatcacttataataaacacaaccttaaagtcatgtcttgagtaataacat

SEQ ID NO: 4734 - DNA, 1461 bp, Glycine max
  misc_feature (970)..(970): n is a, c, g, or t
  misc_feature (1151)..(1151): n is a, c, g, or t
  misc_feature (1231)..(1231): n is a, c, g, or t
  misc_feature (1275)..(1275): n is a, c, g, or t
  Probeset Number=SeqID_14513
attttgtgcccccccctaccgcccgcgcgtcaccgttgtatgtagcgctgagatcgctgtggtgttgccgcctgtggtgtttcatatcttctcgtcggccgccgcacatatgaccgacttgttgatatgaagctgggtgggcgtgtcgcgcagaggggtttgcgaacgatgagaccgggagagtttgccaccctgctactcaactgagccacagacgagcgaaaaatcagaacatatcactatatatggaagcacccgccaacccaggagaagagtgcgcgagaggcagacactcctgcgggagcgcttaagagggcagaattctcacctgcattcctcgagctcgattacatggagactatcaacatgagcgcggcgggcgattatatggacacccacgagtatgagaaaaaattcgttcggtcacaccagtgcataacaacgcgcttgaatactgtgtgggaggtgtatggtcttgcacagcgatgtgtgcacaatggagtatagaatgtgtagggctgatcacacacccattgagcgccggttgctatatgtgagatgttggagaaaggagcgtagagagcgtggacgccctaccagccgccgacgaaatcattacacgggcgtgctgacgtcgcgggtcgagtgataatgatattatgcgaacttaggatagcgagggtatttcgtctaacggcaattgatgtgatctcgcatgtgtggggtgcggcacacacggtggattgtacacccatctactccggacttctatcgcgttagttgtatgtgcatcacgccgcgctgacacaacacgccgcatctgtgctagagggcgacgacactagtctggtctccagagatggtgcggccgcgcccgtatgtattcctatttttatcatagtagtcgatcggcagactcctccactcgcgtcgtctctatcgccacgccacgcatttcgatgtatagaangtactgaaagagtgaactgattctgatggagtcgtggcgtgattaacactcgcgcatgtgtatgatataacttttctgcttctatgcgccgcctgccccatactactacttatatctattatgcgtgcgatgatataagatgcgacgacagtcctctctcgcgtcgatatactctctagtncgatatataataatatcagacgaatgtatcgccgcgaaacgactcacactgcaccggatgtgtattattataatgtatantgtgagcgtaatactcatctcgagctctcgctcgagcgttgagntacgcgactgacactctatcatctctatatcgtagagaccaccgcatgacgcgagcacgttgtatttatgaacatagtggtgcgcgcatcagcgctgtctctacacgagtgtgcaggcgtggttacacggcgcgagagcttcggtctgtatatcacaactctatacggcgccgcgcgctgcgtgcc

SEQ ID NO: 4735 - DNA, 614 bp, Glycine max
  misc_feature (372)..(372): n is a, c, g, or t
  misc_feature (416)..(416): n is a, c, g, or t
  misc_feature (461)..(461): n is a, c, g, or t
  misc_feature (473)..(473): n is a, c, g, or t
  misc_feature (487)..(487): n is a, c, g, or t
  misc_feature (506)..(506): n is a, c, g, or t
  misc_feature (534)..(534): n is a, c, g, or t
  misc_feature (561)..(561): n is a, c, g, or t
  misc_feature (565)..(565): n is a, c, g, or t
  misc_feature (580)..(580): n is a, c, g, or t
  misc_feature (593)..(593): n is a, c, g, or t
  misc_feature (600)..(600): n is a, c, g, or t
  misc_feature (602)..(602): n is a, c, g, or t
  misc_feature (614)..(614): n is a, c, g, or t
  Peptide Sequence Number=SeqID_7381
  Probeset Number=SeqID_14514
agtatgcggcgtcgccgagaggttcttacttctccttcctgctgattcacctatttttcaagcattagacgggcctggccgtcagtatggggaagttgaatctttttctcatgacatcaaagaggaagaattcgaaagtaaccccatgggaaattgttctaacgatcaacatgaacagcctgtggaaaacgtagggatcaacaccttggcagttcggcaattgcacaccgacatggatgatgaccacctgcacaatctgaaaaaagaaagagcaacagattcctctgttgaagagcatcgtattgctgtaaccaagaatattccaccagaagtcatctatacaatgcgaggggttcgatgccaaatctgttnttatgcgtgtaagggattcgattgtgtcgccaaactcattgctnacacgcaggaatgccatccagggaaggcctcacctcgcttcttgnacgattgcaaangaaaaatacaccanacaaagttgtggcaacggnatgctttactgaaatgtagggtgcactntcatttccatatttggtttgcgaatgnccanccttagttatggcantcttaaaattatntttactncnacttactttgan

SEQ ID NO: 4736 - DNA, 482 bp, Glycine max
  Probeset Number=SeqID_14515
aatcgccacccgatccccacggtctcctactttctcggcgccttcggagccccgaccctccgccatggccacggccgccaccatctccgccacgcccctcgcccccctcccctcctcccggcatgccttcgccagccccaaaatgctgcgctcgctccccttcctccggcgccgcctgccctccctggcggccgccgcggtcaagcaggacgcggcggtctggaacgcggcccccgtcgcctccatcggcgcggccagcgccgacggctcgctcttccacctgcgcgtagacctctccgacgccgccgacctcgcgtcctccttcaccgcgccggggcagtacctcctggtccgcgtccccggggaggacgacctcaagccggccttcatggccatcgcgtcgccgccggggggaggcgccttcgagttcctcgtcaaggccgtgcccggcgccaccgcggagaagctctgcggcctccgcg

SEQ ID NO: 4737 - DNA, 519 bp, Glycine max
  Peptide Sequence Number=SeqID_7382
  Probeset Number=SeqID_14516
aacactgtgaaaaaacctttctaagcttttagcattttcgaatcatcaaaaaaagctttcccttctctctaacacaaatggcgatctcaaaggcttccgtcgttgctctcgtcgcggtgattatctccgtcgtagctaccgtcgcttccgctcaggtcgaggctccagctccgagtcctacgtccggatctgctgctttctcgccgtcgatcgtttcagctggtgttgcagccgtcgcagctcttgttttcggctctgctcttcggatctaagtctttgcgatagagattcgtatttttgaaaaaaaataattgatcgggtatagcagtattattcatggtattcgtgtgtattccggagcgatagatctctttctatttttctattatctaataccttcatatctgtatgagggtactatatttatatctagagtattgtggttttgtgtgtttcttctagactctatggtttttgatatgactcttattctatttatttatggatctgatgtttctc

SEQ ID NO: 4738 - DNA, 574 bp, Glycine max
  Probeset Number=SeqID_14517
tgtcgctaaaattcaacagctcctgaaaatgttcaaaattccctctcttgatatggttctcaatgatgaactttcaagatctacagtctgtatttggtgccattatttttgcaaagaattcgacttgcgcaaaatttaacaaaatatgcatgtaacacctgctgttccatttgagttaatgagattgctcaatgtctatcatgatcttttgcagaggtgtatgaaacagctctgccctgaatgcatatcagttcttgatgaccctgttatgtgcctactgtgtggtaaatggtgctctccatgtaggatattatgctacgaggaaagtggatgccaaactcatgctgtgacctcgcgagctggtactggactgctatttgtgattaagagaacatcagtactactacagagatctgcatgataggagcatttgccatatgcttacttatatgctcaatgataggatgatttttgaatacagcgatgctagccgctttatttggatgaaggacatcttaggatctcagacttaattggcgttcatattgcattgaaccgtattccacggtgcctg

SEQ ID NO: 4739 - DNA, 1525 bp, Glycine max
  misc_feature (5)..(5): n is a, c, g, or t
  misc_feature (16)..(16): n is a, c, g, or t
  misc_feature (20)..(20): n is a, c, g, or t
  misc_feature (30)..(30): n is a, c, g, or t
  misc_feature (68)..(68): n is a, c, g, or t
  misc_feature (85)..(85): n is a, c, g, or t
  misc_feature (105)..(105): n is a, c, g, or t
  misc_feature (109)..(109): n is a, c, g, or t
  misc_feature (120)..(120): n is a, c, g, or t
  misc_feature (180)..(180): n is a, c, g, or t
  misc_feature (199)..(199): n is a, c, g, or t
  misc_feature (219)..(219): n is a, c, g, or t
  misc_feature (247)..(247): n is a, c, g, or t
  misc_feature (280)..(280): n is a, c, g, or t
  misc_feature (292)..(292): n is a, c, g, or t
  misc_feature (311)..(311): n is a, c, g, or t
  misc_feature (332)..(332): n is a, c, g, or t
  misc_feature (350)..(350): n is a, c, g, or t
  misc_feature (366)..(366): n is a, c, g, or t
  misc_feature (391)..(391): n is a, c, g, or t
  misc_feature (396)..(396): n is a, c, g, or t
  misc_feature (415)..(415): n is a, c, g, or t
  misc_feature (452)..(452): n is a, c, g, or t
  misc_feature (485)..(485): n is a, c, g, or t
  misc_feature (503)..(503): n is a, c, g, or t
  misc_feature (526)..(526): n is a, c, g, or t
  misc_feature (549)..(549): n is a, c, g, or t
  misc_feature (560)..(560): n is a, c, g, or t
  misc_feature (644)..(644): n is a, c, g, or t
  misc_feature (658)..(658): n is a, c, g, or t
  misc_feature (782)..(782): n is a, c, g, or t
  misc_feature (785)..(786): n is a, c, g, or t
  misc_feature (902)..(902): n is a, c, g, or t
  misc_feature (908)..(908): n is a, c, g, or t
  misc_feature (928)..(928): n is a, c, g, or t
  misc_feature (1270)..(1270): n is a, c, g, or t
  misc_feature (1457)..(1457): n is a, c, g, or t
  misc_feature (1459)..(1459): n is a, c, g, or t
  misc_feature (1464)..(1467): n is a, c, g, or t
  misc_feature (1469)..(1471): n is a, c, g, or t
  misc_feature (1473)..(1473): n is a, c, g, or t
  misc_feature (1479)..(1479): n is a, c, g, or t
  misc_feature (1481)..(1481): n is a, c, g, or t
  misc_feature (1483)..(1483): n is a, c, g, or t
  misc_feature (1493)..(1493): n is a, c, g, or t
  misc_feature (1495)..(1496): n is a, c, g, or t
  misc_feature (1501)..(1502): n is a, c, g, or t
  misc_feature (1506)..(1508): n is a, c, g, or t
  misc_feature (1516)..(1519): n is a, c, g, or t
  misc_feature (1525)..(1525): n is a, c, g, or t
  Peptide Sequence Number=SeqID_7383
  Probeset Number=SeqID_14518
gatgngcgtcatgtangtgncgttgctgtncgaagacataatcatatcgtcgcctcgtccgcgaatantggggttcgtacggcgnctcgcacacgctagaccacntcgnatcagggaggntggggagtctgcacgtcgacgactgcgacgtgccgacacgcacgctcatcgctaggcagnccgcaagcctgctacaacntactcactagcgtctgtctngtgtcccgatctgcgccacacgcccganacatgtctccgactctctcacccacagacgcancgtagtgcttgncgtcggcgctagtacgtgncgcatatcgtctctcacgatnctctcgcgcacacgtcgnagcatgtctcgctctncatacgagcacgcgtataagtacgngtctnccacacgaaactattgtgngccgcgccccacgcgcgagcggcgattggctcgatgncgcgcatctaccccactgatatgtgcgatctcnccatgactcccggagggngcgatgctgccgcccgcgtctcncttggaggtgatgcgctcgcttnctcgcgcgcancggcctgcctccttcactcggctgtcgcggtgcgtgtgcgcacgcgagcgcacttcaccgactagtggagtggcgtaggcgcangctcatctgtagantagatggaggaacacaaatatcaaacacagaacacgctaacaccatccactcaccaactctatgtgccgccgagcggagggaacgacacgtatagaatcctatctaataaaaacacaacaaacnccnnaggaggtttagaatagctctaatctccacctgcgctctcactcccagcgcagcacgcgcgtcgcaaccacattgtccccggggacaaaaatacttgtgagtaatagtgatacatanagtaangttgcagagcgctgataagngaatatataaacaaccataacattcaaatagctaccacgtaaatagagcatatgtcgaacaccatattagtttcactcttggctgccagagatctagacgatgttaagaaaatgaggaattttttatactatgtacagtcacttctcgcatgtgtgcacacccagaactctattatatccgggatgctatctaatgttagatgcatcacagatatgtctcttaatactagaggctatgccttccatcttatgctacgagaagctatcttgatgctctaatacttagttaagctgaatctgatcagcggccggtggctgatcattcataaggcattttcaagnctctatgacctccgatgcggttactgtgcttatgccatacatgccctgtcctctactattatcagtgtagagatgatagcttacctgctatgtggtgggggagggggcccactacacaactcactaagcttgagctgagggcggcggcgctctctcactcccaactcagatcccgctctccctcgcncntccannnntnnngngggggngntnttgccgcccncnnggggnngggnnngggggggnnnncccccn

SEQ ID NO: 4740 - DNA, 330 bp, Glycine max
  misc_feature (163)..(163): n is a, c, g, or t
  misc_feature (200)..(200): n is a, c, g, or t
  misc_feature (213)..(213): n is a, c, g, or t
  misc_feature (222)..(222): n is a, c, g, or t
  misc_feature (224)..(224): n is a, c, g, or t
  misc_feature (233)..(233): n is a, c, g, or t
  misc_feature (237)..(237): n is a, c, g, or t
  misc_feature (269)..(269): n is a, c, g, or t
  misc_feature (288)..(288): n is a, c, g, or t
  misc_feature (315)..(315): n is a, c, g, or t
  Probeset Number=SeqID_14519
ccccccggttgctaatggtgctattgtacctgctgctcgagcgacaccaccaactgtccccatggactactcctgggctcgggaacttggactcattcgtaaaccagcttcattcatgactagtatttgtgatgaaagaggacaagaacttctgtatgccggnatgcccatcagtgatgttttgaagcagaacatgggtntcggtggtgtggnctccttgtngnggttccagngtancttgcctccatatgtctgcaagttctttgagntgtgccttatggtaactgntgaccatggacctgcagtgtctggtgnccacaataccattgt

SEQ ID NO: 4741 - DNA, 776 bp, Glycine max
  misc_feature (776)..(776): n is a, c, g, or t
  Peptide Sequence Number=SeqID_7384
  Probeset Number=SeqID_14520
gttacggtttgtcttggagcccttttaagaacgggtatcttttgagtggttcgcatgaccataaggtttgcttgtgggatgtgcctgctgctgcctctcaagataaggtgcttgatgcatttcatgtttatgagggtcatgagaatgtggttgaagatgtgtcctggaatttgaaggatgagaatacccgcttttccggcggaaatcactgcaaaccgactattttaaactatcggacaaccaacccccagcaggtcaatcagcaccacatgacaccgaggtgaactttctttctttcaatccatctgacgactggttattgccttcaacctcctgacattcaaagagtggcctctgcgatacacgccagctggccccaccgctacatgtttcaactagccacacagatgaagctgtacataacgagagctatcctaatcatgagaatgtgccactatcttctggtgctgacagacggctgatgggtacgtgaccttaacagagcatgtgcgacccagcagacatcaggagatggggaaggtggcccccctgaactactcttctctcatggaggtcacaaatggaaaatatcagatcgttcatggaacagaaatcagccatgggttatcacaagcgtagctgaggacaattcattccatgtctggcacatggcagacagcatctaccatgatggagatgatgacaacatgtcgactggcaatgattaattaaacaaacacatgatcaaaggcgatggtgctcttactaccattgcn

SEQ ID NO: 4742 - DNA, 1025 bp, Glycine max
  misc_feature (601)..(1025): n is a, c, g, or t
  Peptide Sequence Number=SeqID_7385
  Probeset Number=SeqID_14521
ttcctcttgaggtccactgacaaggttgccttctgcagtgagagatcaatgaaaatctttagtcagaaaggccatatgttgaggatccgttataaggtcagtcacaaagtaatacatgcataggcctaacttaacaagtccttattgtagaagataagatagtaaaataaatcaaacttctctcataagttaaaatcaacttatgcatttcagctttttttagaaaaattctcttatctaacttcttcaaagattgaatgcataatctaattttaacttacagaagatttattcattttacctcctactttctttttcttttaagagttcatggagaaccttatcctagctagcctatcttcatatttttcagtttcttttgatccaagatttattgaagttctgaagtatatttgctcatgtgctcttcatctctcctgagaaggttgccttctgcagtgagagatcaatgaaagtctttactcggacaggccagtacatagggatccgttataaggttgtcattccactgaaaaagatcaagtgtgtgaaccaaagtcaaaatattcagaacccaacacagaagtacatagagattgtnnnnnnnnnnnnnnnnnnnnnnnnnnnnnnnnnnnnnnnnnnnnnnnnnnnnnnnnnnnnnnnnnnnnnnnnnnnnnnnnnnnnnnnnnnnnnnnnnnnnnnnnnnnnnnnnnnnnnnnnnnnnnnnnnnnnnnnnnnnnnnnnnnnnnnnnnnnnnnnnnnnnnnnnnnnnnnnnnnnnnnnnnnnnnnnnnnnnnnnnnnnnnnnnnnnnnnnnnnnnnnnnnnnnnnnnnnnnnnnnnnnnnnnnnnnnnnnnnnnnnnnnnnnnnnnnnnnnnnnnnnnnnnnnnnnnnnnnnnnnnnnnnnnnnnnnnnnnnnnnnnnnnnnnnnnnnnnnnnnnnnnnnnnnnnnnnnnnnnnnnnnnnnnnnnnnnnnnnnnnnnnnnnnnnnnnnnnnnnnnnnnnnnnnnnnnnnnnnnnnnnnnn

SEQ ID NO: 4743 - DNA, 424 bp, Glycine max
  Peptide Sequence Number=SeqID_7386
  Probeset Number=SeqID_14522
tgttgtcatacctgactggaatggccttaatgttttacttttccatgctgcccaggctgctgcccttgaccttggacttgttccacaatctgagaaaagccttgagtatggaaaatttgtatatttgatgggtgcttgatgattgaacttagatcagatcccagatgatgcttttgatgtttatcaaggtcaccatggtgacaagagtgtatatgtagcggattatattttgccaccaaccgcattcagtgagaaggaaggaacctatgcaaataccgacagatgcgcgcgacaaacattaactgcggatccaacaggtggttactcgctacatgataggaagataattctatctctttatgcagcttcagggagtcctgtgtcctatgatactgttgaggcgcgacgtgcgccattgagtact

SEQ ID NO: 4744 - DNA, 656 bp, Glycine max
  misc_feature (1)..(53): n is a, c, g, or t
  misc_feature (445)..(446): n is a, c, g, or t
  misc_feature (448)..(448): n is a, c, g, or t
  misc_feature (654)..(656): n is a, c, g, or t
  Peptide Sequence Number=SeqID_7387
  Probeset Number=SeqID_14523
nnnnnnnnnnnnnnnnnnnnnnnnnnnnnnnnnnnnnnnnnnnnnnnnnnnnncctctttttgagaaaagactccccccccaaaaaagaaaatttctccccccggttgggttttttttttcgcggcggtatttatggggggcccccccccaattttttttttcccccccccccggggaagaaaaaaaaccccctttttttttaaaccccccccaaaccgcccggcggaaaatttttttcccctcccccacgggccccccaaattttttccccccttaaaaaaaaggttcttttggggtcacacccccgggctgggcccctttgggcctttacacgcggtcaaaaattttccccttgaattaaattggggatttgggaaagccattcaacggcaatgggttttcccgaagccaaaggacctgctttcatttctttcaatctcgctnncnacagcaatcaaaatggattcatggtagcgttgattgcccaccgggacaaactaaacattatgaccacctgcgtgcgagagagattgctctgaccaccgcgagcaaggggttgcaagcggaaccagcgtcgagcgagagtgggagagctagggtcgcgggcaagagagtgggagctagggttgccagggagagtggggtcgcagtgnnn

SEQ ID NO: 4745 - DNA, 1172 bp, Glycine max
  Probeset Number=SeqID_14524
aactggttcaacttgagagttaccttctgcactattttcctcatcgctcctgctgttgctattcctcttttggttctttcacatgagtcattggcatcaggcatgattggacttttgatcacatatgttattcaaatcaatgatgatattatgtggactttatggtctgttgctgatttcgaatcgaaattaatttctcttgaaagatgtagagctttcactttaattgaaggagaagccaaagcaaaaactgaaaatcctgctgcaatcacaaatttcagtgaaaattggccaacaagaggagaaattgaatacaaagatttctatctcaagtatcgtcctgctcttcctcatgttctcaaagggctcaatttccgtatcaacagagctgaaaaaattggtgtggtgggaagaactggatcaggaaaatccacacttttcctttcgcttttgagaataatcgagccttctcatggctccatatatattgatggggttgatatttctcagcttggacttgatgatttgagaagacacatcactattatcccacaagatcccatgttatataaaggaacaatcagggaaaatttggatttattgaagcagtatagtgatgaagagttatggcagagtcttgagagagtctgtatgaaggagaaatttgaacaggaaagtggactggatactgaaataaaggaaggaggagagaatctaagtgcaggagaaaagcagttattgtgtataagcagagcgatattagcaaaagtaaagattatattgattgatgaagcaacatcaaatatcgatccgaaaactgagcaaacaatcttggatactatccacaatagttttgaagactgtactgtgatcactgttgctcatagactcaagactattatcaattctgataggatattgatgatgggagatggaaatattttggaatttgatagcccacagacattgattgatgatgataagagtcatttccataaattatggatggagcatgaacatggaagtaaaggcaacttttaatgtctgctatttttagtatttatttttttgtgttgaaaataaaaaacgatgataatatatgttgataattgttagaaagagtattggtgattcttgataatgagcttgttgaaaaaaaattggtgtcgctc

SEQ ID NO: 4746 - DNA, 1457 bp, Glycine max
  misc_feature (21)..(21): n is a, c, g, or t
  misc_feature (36)..(36): n is a, c, g, or t
  misc_feature (42)..(43): n is a, c, g, or t
  misc_feature (56)..(56): n is a, c, g, or t
  misc_feature (59)..(59): n is a, c, g, or t
  misc_feature (82)..(82): n is a, c, g, or t
  misc_feature (86)..(86): n is a, c, g, or t
  misc_feature (88)..(88): n is a, c, g, or t
  misc_feature (90)..(90): n is a, c, g, or t
  misc_feature (92)..(92): n is a, c, g, or t
  misc_feature (94)..(94): n is a, c, g, or t
  misc_feature (97)..(98): n is a, c, g, or t
  misc_feature (135)..(135): n is a, c, g, or t
  misc_feature (204)..(204): n is a, c, g, or t
  misc_feature (231)..(231): n is a, c, g, or t
  misc_feature (276)..(277): n is a, c, g, or t
  misc_feature (373)..(373): n is a, c, g, or t
  misc_feature (433)..(433): n is a, c, g, or t
  misc_feature (465)..(465): n is a, c, g, or t
  misc_feature (514)..(514): n is a, c, g, or t
  misc_feature (525)..(525): n is a, c, g, or t
  misc_feature (538)..(538): n is a, c, g, or t
  misc_feature (542)..(542): n is a, c, g, or t
  misc_feature (581)..(581): n is a, c, g, or t
  misc_feature (687)..(687): n is a, c, g, or t
  misc_feature (826)..(826): n is a, c, g, or t
  misc_feature (835)..(835): n is a, c, g, or t
  misc_feature (840)..(840): n is a, c, g, or t
  misc_feature (888)..(888): n is a, c, g, or t
  misc_feature (913)..(913): n is a, c, g, or t
  misc_feature (1065)..(1065): n is a, c, g, or t
  misc_feature (1198)..(1198): n is a, c, g, or t
  misc_feature (1355)..(1355): n is a, c, g, or t
  misc_feature (1363)..(1363): n is a, c, g, or t
  misc_feature (1381)..(1381): n is a, c, g, or t
  Peptide Sequence Number=SeqID_7388
  Probeset Number=SeqID_14525
gtggttgtgtgttgtggtttnttctttccggcccanccgacnncaacacacacacncancacaacccaatagaagaagaganaaancncncncnccnnacaacgcagaggcctctattatatctgttttcccacncatctccttcgtatagttgagagaagggcagaccgagagcgagcgaggagagagagtagggatgctggntggtatgtgcgccaccaccaccaccantatatcgcactgctagattgatatacacaccacctgtgacccacnncgagacgtgaggatgggatcttacactctataatatatttatacaccaatgtgtgaggcaggcttacgtgtgtatagtaaccacccgactcaccanccttctagacaaaatagatgtctggtcgagagagcacgtctgcacatatcgccgcgcgcnccgaccgactgtttgtgctgccctcgcttatnttcgcccgtaattctcgtctgtgttgctgtgcgtgtggtgactatatcnatcaaacatgngaagatagtaccntatnataaatataagagtagtaatagagagacagagaagacgncgacagaccactcactggtgttgttgtgcgtcgctgtgtcttagattggtactgtagtctgctttctctgtggtgtgtttataataaatataatataatagatatnataaactacatagcgccgaaatagcagaagcgatcactatcactcttacatgagagaaggatggtcaatggcagtcaaatagacacgcgagataatgagatatatgtgactgtcaacagagatgtagtagtttcatgcncgaacaaancccanaagacacagacccacccgaccacgagcagtagtgttattatattaatnataacctacaatctcgattcaatanaaaacaacacccatactcttcacatacagtcccaggcaccgctatgtgtcgtgttcgtggtagtgcaacgaatatactcgccaacgcaacacacacgacaggatcgtccatatatattgtgtgtgtgttatggtgatgagtgatggatcganaccgcacacaaacacggcccggaccaatcacaaaacactatcattatcgccggctggtgatcgatgttagactgtatatcgtgtcgcgtggcgagtcacaggcccactccactaccctctctcatatcttgtnctaggtgtgatgtctgtgcatgaccaacgtcatattacatccatctcgcacaggcacgtgtggcgcgtggctggcctagttctgtgcaccgtgctattcgctagagcaatgagcaggcgtggtctatatgtgcacttccctcgtccatgcgtatgtnatcgcgtnatgtgcataggcctaggncacgagcaggagcgaggtgagtgagaggtgggactcatgacgtgcggccatactatcgcccgtcgacatagtcttg

SEQ ID NO: 4747 - DNA, 1565 bp, Glycine max
  misc_feature (55)..(55): n is a, c, g, or t
  misc_feature (216)..(216): n is a, c, g, or t
  misc_feature (458)..(458): n is a, c, g, or t
  misc_feature (661)..(661): n is a, c, g, or t
  misc_feature (713)..(713): n is a, c, g, or t
  misc_feature (1043)..(1043): n is a, c, g, or t
  misc_feature (1337)..(1337): n is a, c, g, or t
  misc_feature (1514)..(1514): n is a, c, g, or t
  misc_feature (1551)..(1551): n is a, c, g, or t
  misc_feature (1555)..(1555): n is a, c, g, or t
  misc_feature (1565)..(1565): n is a, c, g, or t
  Probeset Number=SeqID_14526
ctaccactgtatgcgcggttgtgttgttgagcgtgcatctgaggcgctgcacagnacactattcaacatatatgttatgtgacagacacccaccatcttatcatacgtcaaacagatagatatattgtcaaacgacatctaacaccacgggcgagtgtaggagggggaggggcgtcgggaaagatggcatgatgtaccgatactaatccacgaggngggtatctgatagtatatcttgagccgctcggtgtttcttcacagcattgtgacagatctattctcatctcgctaacccacatccctcgtctgcccatgctgcctctgcgagcgtcatcgtttatctcctcttgtgttctcgtatgcatcatccgcctgatacgctgcgacgctagttctatacgtgcgtgtagggtgtgatctgatgaggtagggactacgattatactccaactacgagntcacgctcgtctcatcctctcacaccagcacatcgttgagaatacactatcactgttcagataactatcctaccagcgcgtcatacatattatacatgtgatgtcgcgccttgttctctgacgacctacgtgtatatcatgagtaagagttatagacgagaagtggaggaagagatagaactaactatcacatgcgtaacgtntcatattaactgtataattggaaaaaacgaaggagaaagacatagtaataantatatagaacgcgactggttcacatctagtcacaacgacacttagatattattaagtggtagagagtaggtctatatagaacagagagacaggaattagtcataatgatatcatatatgcgttggagacgcgagcgcttcgagcctttgtaacaatgcacatctgggttcttattgctgcatcgaacgcgactcgaacatgcgctgattgtatgtgtgtgtacaggttgtgagagtaagatttgagtagacaacgagcgacgttatccagtgtgcagattacggtgtctgtactgtgtagccgcgcgcgacgtttatttcaatattcatngttgagcgcacgatatacgcaaatgtatacatcgagagcggcagaggatgatatgggagatcgcgctaccggctccgactatgaatgtttgtgtgatgtaggattgatgtggacgacgagatgagacatgtggtacccgatgtcgagaagtcagactgacgatgtaaattgagcagaaacaatatatcatataatcactgtagcaaattactgtcacaatatacaagctacaatctacagcactatgtgatgctagacaactcatagacgtaatatattgtcctattccatagncaacgatcacttcgccaagatcataagatctctatcactcacctcgatatagatgcagtctcacgtgcgactgtccaactcaacgatacgtatgatgctgcgttcggtgtagtgagactagttgccagctatatgtctgcgacagacgtgctgatggtacggcaccgtgtcactatnatgacgatgtcgtcagtctgtcgaccgtgcgacgtgncgantgctactcgn

SEQ ID NO: 4748 - DNA, 731 bp, Glycine max
  misc_feature (705)..(731): n is a, c, g, or t
  Peptide Sequence Number=SeqID_7389
  Probeset Number=SeqID_14527
ttttttttttttttttgacaccaatgccaaacatctttttgtttacatcagaattcctggccaaaatccttggcgaaaagagagtgaaagaagaagaaatcaaggaaagaatgaacacatgtatgtatagaccctccggtgatcggcgacgcgagccaatgcgtcagagagctatgtagtttccggatcagttcgacgccggaggtgtcttgggtgtcttcggcgggcgctcggcgaggccctgctcgacgtcgctgccgccgccgcgcgggctggaggaggacgcgcccaccacggcctgcttgcccctgctcaggagccggcgcagcgagcggagccggacggacatcggggaccgcaggtcgctcgccggcagcggcgtcgcgggggacgacgacgcccgcgcccaccgccatcgcccggtcggcgatgtcaatcaccaggctgtccttcctgccccccgaagccccccagctcgtggaggaatgccggatggcgggcccggggcctctgggcccccggccccccccgccacccccccttgttcccccatagtgggacacccttcccgcgagcgtcgcggggtgaaaacccaaccccggcccgcgtccttccggcgattccccgccgcgcccgcccccccccccccctccgtccgggattccccccccgtaccgcgtcccctcggatctctccccaccccgnnnnnnnnnnnnnnnnnnnnnnnnnnn

SEQ ID NO: 4749 - DNA, 1887 bp, Glycine max
  misc_feature (7)..(9): n is a, c, g, or t
  misc_feature (18)..(30): n is a, c, g, or t
  misc_feature (39)..(40): n is a, c, g, or t
  misc_feature (45)..(46): n is a, c, g, or t
  misc_feature (48)..(48): n is a, c, g, or t
  misc_feature (56)..(56): n is a, c, g, or t
  misc_feature (61)..(61): n is a, c, g, or t
  misc_feature (69)..(69): n is a, c, g, or t
  misc_feature (74)..(74): n is a, c, g, or t
  misc_feature (102)..(102): n is a, c, g, or t
  misc_feature (112)..(112): n is a, c, g, or t
  misc_feature (118)..(118): n is a, c, g, or t
  misc_feature (125)..(125): n is a, c, g, or t
  misc_feature (136)..(136): n is a, c, g, or t
  misc_feature (138)..(138): n is a, c, g, or t
  misc_feature (155)..(155): n is a, c, g, or t
  misc_feature (160)..(160): n is a, c, g, or t
  misc_feature (172)..(172): n is a, c, g, or t
  misc_feature (315)..(315): n is a, c, g, or t
  misc_feature (696)..(696): n is a, c, g, or t
  misc_feature (774)..(774): n is a, c, g, or t
  misc_feature (782)..(782): n is a, c, g, or t
  misc_feature (833)..(833): n is a, c, g, or t
  misc_feature (844)..(844): n is a, c, g, or t
  misc_feature (1228)..(1228): n is a, c, g, or t
  misc_feature (1408)..(1408): n is a, c, g, or t
  misc_feature (1421)..(1421): n is a, c, g, or t
  misc_feature (1423)..(1423): n is a, c, g, or t
  misc_feature (1425)..(1425): n is a, c, g, or t
  misc_feature (1532)..(1532): n is a, c, g, or t
  misc_feature (1601)..(1601): n is a, c, g, or t
  misc_feature (1705)..(1705): n is a, c, g, or t
  misc_feature (1717)..(1717): n is a, c, g, or t
  misc_feature (1725)..(1725): n is a, c, g, or t
  misc_feature (1742)..(1742): n is a, c, g, or t
  misc_feature (1747)..(1747): n is a, c, g, or t
  misc_feature (1750)..(1750): n is a, c, g, or t
  misc_feature (1756)..(1756): n is a, c, g, or t
  misc_feature (1786)..(1786): n is a, c, g, or t
  misc_feature (1803)..(1803): n is a, c, g, or t
  misc_feature (1805)..(1805): n is a, c, g, or t
  misc_feature (1887)..(1887): n is a, c, g, or t
  Probeset Number=SeqID_14528
ttttttnnnttttttttnnnnnnnnnnnnncttgcctgnngttgnngntttactgntaggntttattgnttgtntttaattgttgttatattatttgtacgnacttgaaganaagaanttgtagnacaaattaagncntatgtatgtgttgttantgttnatttattatatnatatttgggagaacaatcttaggtacgcagtacgaatacaacatattataagatacaattatcgagaccacgcacagtaatctactccatcacaacataacatttcgcaggtcgtcacatacggcaactctcacgcgacaccntcctagtctgatatatacacgacgtcactatcgacacataccgccactcgacatgtgcactacggacaatactgacaccgccaaggcacatgcacattcataacatacgcacgacagaatgttgtgctagaacgagaaagactagatgagcatgctataagatagtgcagcaacacagcgcatgagcagcttgcatgctcgtctatgtagcctctgtgccatgatccctcaccgcgccaacttatgcacatggtctcacgttacatcgctgccctctatcgcgcagcgctccgcgtatcgcgtcgagcatcgctggtagcgagctacacctcgcagccccctgtattctgtctcggccgcaggtctttgtcgtacccgtcntatatataatattctttaccgtcgttcttctgtgcgtcctctcgtctcttctctcgcgttcgctcttctctctatgtncgagcctntatgcgctgcttctctacgctcattacgctcgtctcggctactgttcgcanacactcgtctntctcctctacgactcatatggtgtattcatggtacgactaccttgcgtacatgcctgtctgtgcgcttctactctcgttgtatacgtgtgcgtgctctcggtctaccatcgtccatatagatattacgctactaattgcactcgtctctccctcgagacttcttgcggctaccgttagacggtagatagtctcgcctcatctgtctcttgctcgtgctcatctattgtatatatcattatctcctcatgtctcagactgctcactagtatcatctacgctcttatgagtcttatattacacatatagactagactatccgcatcggtatctatatctacgtagataagatagtactagatactatgccaatgagatacatttantgatgctctctgcttcatatgatcgtatatcgtaatgtgttgaccactcactgatctacatcctgatgagagtagtgatacgtcctgatagtgtgtgttcgatgctcgtcgactcctgcctctacctacgcagtccattagctcacgcgtgctctcggctctcaccgactacatcatctnctctctatcacgntncncgctgcatagtccgcactatcgtacacgatgtacgcacgacaacatatctctataccgtcacgactcgctgtcgatcgatctcagagtgcgtatcacagaatgtctncagaaccagccgcatagcgattggatagacagtgagatgagaatgatcgagctagaactagtcgctatnacagtatgtctatagatgttcagatatacgtagattgtagacatcgtaccgtcgcgcgaccaccgaacgtcgcggccggtcacgtaactgcatcgcgactatgngtccgacgttgntcagactnctgcaatacgcaatgangaagnatnatagcntaatgatcacgacatgacgcatacccgcantcgctgcgtcagtcggngnagcgcatcagtgcacgactgcgtaatctccacgactactaaatgtggtatgactagcagagcatagcatccgacatcactgn

SEQ ID NO: 4750 - DNA, 1469 bp, Glycine max
  misc_feature (27)..(27): n is a, c, g, or t
  misc_feature (235)..(235): n is a, c, g, or t
  misc_feature (445)..(445): n is a, c, g, or t
  misc_feature (974)..(974): n is a, c, g, or t
  misc_feature (1223)..(1223): n is a, c, g, or t
  misc_feature (1237)..(1237): n is a, c, g, or t
  misc_feature (1246)..(1246): n is a, c, g, or t
  misc_feature (1356)..(1356): n is a, c, g, or t
  Peptide Sequence Number=SeqID_7390
  Probeset Number=SeqID_14529
ccgcaagagatagaggtgaggaggatnggagacgagtcgagtacgtaagcgtgcgcgatcgtatacatacaacacaactttacagcgctcgcgatagaggcacctagagtggacgacgaggcgaagcgggtagacggagaggagaggagtgaggaggagagccgtatagacagagtgtatatataacgagagcacacgcaattggcttatgcagatatagatatatggtgtggcnatgagtggagtgagtagtaggagtggatatggcgttgtatgattagtcgtattatatgatcaacttaagtgtcgtggagagtaggtagaaatgcagattagattactaatatggcgatgtcccattattaggtatatattatagaggagataggagagagggtcgctgtggtgtggtatcatactagaaagataggtcgcagtgcgcaangtctcgtagtatcgtctcatggaaagatagtcgtgtcgtgattagtgagtcgggaggttagccagatgtaagtgtatagtagagatgggtgtgataatggcagcatagaacgatgatgagaagtgagtggcttgcagaacataatctggttgcgtcgaggtgagaataattgactatggagttgtccgggagccatttgttgtagggcggagtaggggagtagatgatacgaaggcgatctagcgcatgcgagatgcgatagccgatcgctaaggatgagttgagcgtttataaagacagaatcgagcgtggtatgtggggagagtgtcaatatataaagtatcgcgcgatatcgagtggtgatgattggaattacattggagagtagggcatacgtgattgtccatgtgtcttttgtcagattgtctaatcgtgactatgtgtacggatgttctgcgtcggtaggtgaggggtaaggagagagtgaatactagagtgtagaggtatgcgctagtgatcactaacctangatcataaagagcagtatatgataggcgttggctttgctgtagcatatgagtattaagatgctccttatggtgaataatttagcttgcggagtagtggaagactgaatctagagtctgtagtactatgtatcgtgctagcgtttagttgcacaattgatcgttagtgtatgtatctaatattttcacgagatctacgcgatcatcctttcgagttagtttaagtttgccgatttagacatatatagtgnatcgagttcaaggngtgtatgtnttagacatatgctggttgctctccttgaagagatatagtagagtgcggagagggggggccattgattcgtgaattctcttattactgaacgctgtgggagtggggcggcngtcgcccccgcatacctccgagaagggtgctggtgagtagggacttgcaaccagtgagagagagtgtagtggtgtcgagtgcgtagtctgaggtgatctctgttgttgtattg

SEQ ID NO: 4751 - DNA, 592 bp, Glycine max
  Probeset Number=SeqID_14530
aaacacggtgttgtgtagaagacgcgaggctacagtgagagttatgatgattactgtctgatgctcccagaaatcgacggcagatatcccattatgatcaatctaagttattggggagaacgtgcagaaatagcaagatattgttctaagtctgtaagcaaagacacatcgcacataaggctccaagatcttgtaaggctcctccaaggtggcgcatcaagcaagagctcgacgggttcctatctgagattcagccaactgcatcgatcgaggtgaaaatggatctggtccgtgaccgggcgctttagggcggatcgatgctcgcctgtgggattcacacgcatgcaaatcccagctgtccgtggtaatgcagcagcagcagttttgttaataagccagatatattcaggctttctgtaaaacgttagagtatcattcacatgttatccaggtctttagcggcagaagcgtgatcagaggtctctcgtgctcgtatgagtcggagcctgtaaatgcaagaagcgcgcctgaaaagagcacgggcgcgatggaaatttggtccaatgggcggggattgccttcacagggtacc

SEQ ID NO: 4752 - DNA, 2633 bp, Glycine max
  misc_feature (25)..(25): n is a, c, g, or t
  misc_feature (51)..(52): n is a, c, g, or t
  misc_feature (60)..(60): n is a, c, g, or t
  misc_feature (63)..(63): n is a, c, g, or t
  misc_feature (88)..(88): n is a, c, g, or t
  misc_feature (121)..(121): n is a, c, g, or t
  misc_feature (126)..(126): n is a, c, g, or t
  misc_feature (159)..(159): n is a, c, g, or t
  misc_feature (195)..(195): n is a, c, g, or t
  misc_feature (224)..(224): n is a, c, g, or t
  misc_feature (254)..(254): n is a, c, g, or t
  misc_feature (259)..(259): n is a, c, g, or t
  misc_feature (262)..(262): n is a, c, g, or t
  misc_feature (268)..(268): n is a, c, g, or t
  misc_feature (271)..(271): n is a, c, g, or t
  misc_feature (287)..(288): n is a, c, g, or t
  misc_feature (338)..(338): n is a, c, g, or t
  misc_feature (351)..(351): n is a, c, g, or t
  misc_feature (489)..(489): n is a, c, g, or t
  misc_feature (500)..(500): n is a, c, g, or t
  misc_feature (547)..(547): n is a, c, g, or t
  misc_feature (575)..(575): n is a, c, g, or t
  misc_feature (655)..(655): n is a, c, g, or t
  misc_feature (692)..(692): n is a, c, g, or t
  misc_feature (698)..(698): n is a, c, g, or t
  misc_feature (704)..(704): n is a, c, g, or t
  misc_feature (706)..(706): n is a, c, g, or t
  misc_feature (708)..(708): n is a, c, g, or t
  misc_feature (770)..(770): n is a, c, g, or t
  misc_feature (773)..(773): n is a, c, g, or t
  misc_feature (810)..(810): n is a, c, g, or t
  misc_feature (818)..(818): n is a, c, g, or t
  misc_feature (848)..(848): n is a, c, g, or t
  misc_feature (871)..(871): n is a, c, g, or t
  misc_feature (910)..(910): n is a, c, g, or t
  misc_feature (985)..(985): n is a, c, g, or t
  misc_feature (987)..(987): n is a, c, g, or t
  misc_feature (1024)..(1024): n is a, c, g, or t
  misc_feature (1027)..(1027): n is a, c, g, or t
  misc_feature (1053)..(1053): n is a, c, g, or t
  misc_feature (1094)..(1094): n is a, c, g, or t
  misc_feature (1096)..(1096): n is a, c, g, or t
  misc_feature (1153)..(1153): n is a, c, g, or t
  misc_feature (1197)..(1197): n is a, c, g, or t
  misc_feature (1224)..(1224): n is a, c, g, or t
  misc_feature (1256)..(1257): n is a, c, g, or t
  misc_feature (1286)..(1286): n is a, c, g, or t
  misc_feature (1288)..(1288): n is a, c, g, or t
  misc_feature (1332)..(1332): n is a, c, g, or t
  misc_feature (1338)..(1338): n is a, c, g, or t
  misc_feature (1352)..(1352): n is a, c, g, or t
  misc_feature (1356)..(1356): n is a, c, g, or t
  misc_feature (1401)..(1401): n is a, c, g, or t
  misc_feature (1425)..(1425): n is a, c, g, or t
  misc_feature (1440)..(1440): n is a, c, g, or t
  misc_feature (1452)..(1454): n is a, c, g, or t
  misc_feature (1537)..(1538): n is a, c, g, or t
  misc_feature (1549)..(1549): n is a, c, g, or t
  misc_feature (1568)..(1568): n is a, c, g, or t
  misc_feature (1581)..(1581): n is a, c, g, or t
  misc_feature (1583)..(1583): n is a, c, g, or t
  misc_feature (1589)..(1589): n is a, c, g, or t
  misc_feature (1611)..(1611): n is a, c, g, or t
  misc_feature (1632)..(1632): n is a, c, g, or t
  misc_feature (1640)..(1640): n is a, c, g, or t
  misc_feature (1642)..(1642): n is a, c, g, or t
  misc_feature (1648)..(1648): n is a, c, g, or t
  misc_feature (1693)..(1693): n is a, c, g, or t
  misc_feature (1701)..(1701): n is a, c, g, or t
  misc_feature (1713)..(1713): n is a, c, g, or t
  misc_feature (1729)..(1729): n is a, c, g, or t
  misc_feature (1739)..(1739): n is a, c, g, or t
  misc_feature (1747)..(1747): n is a, c, g, or t
  misc_feature (1759)..(1759): n is a, c, g, or t
  misc_feature (1769)..(1769): n is a, c, g, or t
  misc_feature (1773)..(1773): n is a, c, g, or t
  misc_feature (1790)..(1790): n is a, c, g, or t
  misc_feature (1826)..(1826): n is a, c, g, or t
  misc_feature (1828)..(1829): n is a, c, g, or t
  misc_feature (1836)..(1837): n is a, c, g, or t
  misc_feature (1884)..(1884): n is a, c, g, or t
  misc_feature (1887)..(1887): n is a, c, g, or t
  misc_feature (1901)..(1901): n is a, c, g, or t
  misc_feature (1904)..(1905): n is a, c, g, or t
  misc_feature (1910)..(1910): n is a, c, g, or t
  misc_feature (1913)..(1913): n is a, c, g, or t
  misc_feature (1915)..(1915): n is a, c, g, or t
  misc_feature (1917)..(1918): n is a, c, g, or t
  misc_feature (1924)..(1924): n is a, c, g, or t
  misc_feature (1929)..(1929): n is a, c, g, or t
  misc_feature (1942)..(1942): n is a, c, g, or t
  misc_feature (1950)..(1951): n is a, c, g, or t
  misc_feature (1953)..(1954): n is a, c, g, or t
  misc_feature (1980)..(1980): n is a, c, g, or t
  misc_feature (1989)..(1989): n is a, c, g, or t
  misc_feature (1991)..(1991): n is a, c, g, or t
  misc_feature (2027)..(2027): n is a, c, g, or t
  misc_feature (2039)..(2039): n is a, c, g, or t
  misc_feature (2043)..(2043): n is a, c, g, or t
  misc_feature (2045)..(2045): n is a, c, g, or t
  misc_feature (2059)..(2059): n is a, c, g, or t
  misc_feature (2062)..(2062): n is a, c, g, or t
  misc_feature (2083)..(2083): n is a, c, g, or t
  misc_feature (2114)..(2114): n is a, c, g, or t
  misc_feature (2124)..(2124): n is a, c, g, or t
  misc_feature (2126)..(2126): n is a, c, g, or t
  misc_feature (2128)..(2128): n is a, c, g, or t
  misc_feature (2130)..(2130): n is a, c, g, or t
  misc_feature (2133)..(2134): n is a, c, g, or t
  misc_feature (2137)..(2137): n is a, c, g, or t
  misc_feature (2151)..(2151): n is a, c, g, or t
  misc_feature (2183)..(2183): n is a, c, g, or t
  misc_feature (2193)..(2193): n is a, c, g, or t
  misc_feature (2200)..(2200): n is a, c, g, or t
  misc_feature (2226)..(2226): n is a, c, g, or t
  misc_feature (2228)..(2228): n is a, c, g, or t
  misc_feature (2232)..(2232): n is a, c, g, or t
  misc_feature (2250)..(2250): n is a, c, g, or t
  misc_feature (2267)..(2267): n is a, c, g, or t
  misc_feature (2278)..(2278): n is a, c, g, or t
  misc_feature (2313)..(2314): n is a, c, g, or t
  misc_feature (2316)..(2317): n is a, c, g, or t
  misc_feature (2320)..(2320): n is a, c, g, or t
  misc_feature (2322)..(2322): n is a, c, g, or t
  misc_feature (2343)..(2343): n is a, c, g, or t
  misc_feature (2345)..(2345): n is a, c, g, or t
  misc_feature (2349)..(2349): n is a, c, g, or t
  misc_feature (2358)..(2359): n is a, c, g, or t
  misc_feature (2374)..(2374): n is a, c, g, or t
  misc_feature (2378)..(2378): n is a, c, g, or t
  misc_feature (2385)..(2385): n is a, c, g, or t
  misc_feature (2389)..(2389): n is a, c, g, or t
  misc_feature (2394)..(2394): n is a, c, g, or t
  misc_feature (2434)..(2434): n is a, c, g, or t
  misc_feature (2441)..(2441): n is a, c, g, or t
  misc_feature (2447)..(2447): n is a, c, g, or t
  misc_feature (2456)..(2456): n is a, c, g, or t
  misc_feature (2510)..(2510): n is a, c, g, or t
  misc_feature (2525)..(2525): n is a, c, g, or t
  misc_feature (2561)..(2561): n is a, c, g, or t
  misc_feature (2572)..(2572): n is a, c, g, or t
  misc_feature (2576)..(2576): n is a, c, g, or t
  misc_feature (2581)..(2581): n is a, c, g, or t
  misc_feature (2583)..(2583): n is a, c, g, or t
  misc_feature (2585)..(2585): n is a, c, g, or t
  misc_feature (2591)..(2591): n is a, c, g, or t
  misc_feature (2594)..(2594): n is a, c, g, or t
  misc_feature (2597)..(2597): n is a, c, g, or t
  misc_feature (2600)..(2600): n is a, c, g, or t
  misc_feature (2623)..(2623): n is a, c, g, or t
  misc_feature (2633)..(2633): n is a, c, g, or t
  Peptide Sequence Number=SeqID_7391
  Probeset Number=SeqID_14531
gtgacaacgaatcgcacgcgacgcntagtatgatagactgtgaataatatnnatataganagntttatatcatatatagttgcgcgancagtcgagggggagacgtaggcacgtaacgganacacnagtacagacgcgcagctagatgagactatatanagaacgattatgcgcgtatgtagtagtatatgagtncagctagactggatatctcccacctatgnagtattaatcagtgataagcacgcagagancgaantgntacttnttnattattggatatcccnncacaatagtcgcatacagcgaaggccacgactagtgtgacgtagacgctntaactcatatatntgtgctgtctgcgcctcgaggtgcgataggcgcgcggacagcgacgtgtgagattctcattgttacgacagcgcacagaaggacacgcacgagacagactatagattgatattacagagactgtgagtagaatacacncgttatatatnagtgactccaatgtatgcactcgatgtaatcatcatcgtggtagtgntgtcacacatgcatatagcatgatatancatatgtgattattattagtgagtgtcgacgccgagcgagtctatcacgcagcgtgacgtgacgatcggagaaggagatngagtgtgtgtgcgtgtgtcagatgtgccgcgagatgntaacancggagnangngcgcaacgggtgatcgcgcgcgtctgtgtcatgtgcgagccgctcaatatcactatggcatntantactacgccggcacacactcgccgcactctatcgtantatgagcncgcatgtcgtgtgcgttatatcgctggatnagcgcgcgtagtcatatataganaccggtagtatgttgagactatgatcagtctgaagcgangctcactctagatactgactgtcggcgcgtgagcgcccgatatcgtcgtagtatctacgccagcgagacacgacncngagtcgtgtcgacgcgacacacacatctgagcgtctntgncgtcactgtcagcgtctgtgtcgtcnactgacgactcactctgaaacgactatagatgtacgagctncntcatgacgtcatatgtgctacagccgcactccagccagcgccacgccacccgacgtngacgtgctgtcggtccgagtttatgttgctgcgccatgtgtatnagcatgtgatgtgatcgagtcgcgcgntgaatgtagagcgacgtcgagtgcgtgctgtnntgtgtctcgcatagccgacgcgtgtagtntnattttatattgagctgctacgagtctagcagatggagatcgagnacaggntctgatcgaatcgngcangtgacgatgctcgtagcagagcgatgacactcggatgctgactgngtctctagcgactcggtactgagnacgtagtcagcatcngctactcatatnnntatatactagtatgatctacgagtataatcgtatgataaatcagcagacgtgtgactgcatgtgatacgcatgatctgatganngtagatcgcangcacgaggatcgtgatagngaatgtcgtggtnanattgtnatgtaatgactgcatcatgctnaggtcggctgacgcgcagacncacatcantnatatangtcagatggccgtcgtactcgatcgtctgctcgtcatgcagctcngctgcagntgcatcgatgcnagacgctcaggatatnatatgatgcngtcgtctncacgactattcnacgagttatnatcncgtactcctcgtcgtcngcgtgagcgtgcgacacacgcatcgtcgtttgctcntnnctcttgnnaattaatgatcacgcggagactgacagtgctactagacgctattacngtntcgtcgcatgcgtngannatatnatntnannatattntgtantcagtgactggtnatatgtanncnntgacacgttatcagcatacgacgagnagtcgtgangntagtacgggatgtagtcatgggcgatcgcgacgagnagcgtatactgncatngnctgcaagaagtatngancgtgatgatcgatagttttgntgtagtcggcatagcacgtcaccatactacngaccacaatncncntnatnnttngtgaccatgacttnaacgtatgatacgcagctcacccaagcacgtnctgcagtcancagcacngcattcgatcatgccgtaaggttcanantgantatgacgcgacgctagtncatcggtcgctagctgncacgtactttntagttgcttgtcagcaccaagacacagccagcaanncnnaanantcagagacagtgtccgtcatngntatngattgagtnnaagcgactgctgggntagntcacatnagantgtangatatactgcgtacgtatgtcatgacgtagtcatacagcntgtttgntatgtnatgtgcaantcgacatgttgattgcgcgtactgcgcgatattgacgtggcgagaccgcaacgnagagctacgtatgcntttactgatgtttcaggtagctagtcagtccgtacntgcactagcangccngacgncngnatccantantantantgtggatatacgaggagactacngcgacgagan

SEQ ID NO: 4753 - DNA, 1489 bp, Glycine max
  misc_feature (16)..(16): n is a, c, g, or t
  misc_feature (84)..(84): n is a, c, g, or t
  misc_feature (101)..(101): n is a, c, g, or t
  misc_feature (130)..(130): n is a, c, g, or t
  misc_feature (200)..(200): n is a, c, g, or t
  misc_feature (218)..(218): n is a, c, g, or t
  misc_feature (268)..(268): n is a, c, g, or t
  misc_feature (290)..(290): n is a, c, g, or t
  misc_feature (295)..(295): n is a, c, g, or t
  misc_feature (306)..(306): n is a, c, g, or t
  misc_feature (443)..(443): n is a, c, g, or t
  misc_feature (481)..(481): n is a, c, g, or t
  misc_feature (633)..(633): n is a, c, g, or t
  misc_feature (742)..(743): n is a, c, g, or t
  misc_feature (745)..(745): n is a, c, g, or t
  misc_feature (807)..(807): n is a, c, g, or t
  misc_feature (945)..(945): n is a, c, g, or t
  misc_feature (1087)..(1087): n is a, c, g, or t
  misc_feature (1117)..(1117): n is a, c, g, or t
  misc_feature (1167)..(1167): n is a, c, g, or t
  misc_feature (1202)..(1203): n is a, c, g, or t
  misc_feature (1217)..(1217): n is a, c, g, or t
  misc_feature (1220)..(1220): n is a, c, g, or t
  misc_feature (1305)..(1305): n is a, c, g, or t
  misc_feature (1361)..(1361): n is a, c, g, or t
  misc_feature (1406)..(1408): n is a, c, g, or t
  misc_feature (1422)..(1423): n is a, c, g, or t
  misc_feature (1428)..(1428): n is a, c, g, or t
  misc_feature (1432)..(1432): n is a, c, g, or t
  misc_feature (1444)..(1444): n is a, c, g, or t
  misc_feature (1472)..(1473): n is a, c, g, or t
  misc_feature (1483)..(1483): n is a, c, g, or t
  Peptide Sequence Number=SeqID_7392
  Probeset Number=SeqID_14532
tcagcgcacgtacgcnagacgcagagcgaacgaagcacacaagaacgagagagtcaagctagcggtagagtgtaggagatagtngtactcactctcatcanaagtgataacagacacacgcagaatcagngacataagaggcaaagcagcattcgcacgcgagcgaagaacacagagagagatgcggaacacaatatgtngagtttctcgagttgtcnttactgatatgtgtgagtattattatgagtctttatagtacatgttcttncgtcgtatcttcataagtgttngttgntgtgtctgtgntagccttgaggtggcgcgttccgcgagtggacctgtgctgtgcgatgcgtgagtagatgggttgagagcatgagtgagtatagtatccacagcgccggcatacagcagcgctacacgaacctacactattcgtctangctgtttgaggcgaagctacaactaactaaacatcgancgcgtcgatgtgtgcggtgtcggctgtgtgtcagtgtgaggtatatcacagagaccacgacgcagtatgagtagtattagtgtggatacgtagagacaggagagtgggtgtgggtgggtatagtactcacatacgtctgggaatcgatgacnagacactggacgccggagatgataaactacattcgacacatcaatcatagcgtaaacaggaggtactcatatgacgtgcgattcatgtgatctgcgagtgtcttttgtnntntgttgtctttattttcttgttatataaaattagttgagtataatatatatgctcaatatagntattgtcgttgtgtttgttgtcttcacgactcactgtcaagagagatcagcacaatataatacacaaggagaagtaagagcggagaagagaggagtatcagagtgatagcgaaacaatacggagaagagaagaataangacatcacgtaaatgaaggattaatattaaggtagtgcgtcgttcatgttatactacgttttatgtcgatgcgtctgcgctcactactgtttacctatcacattatatctatatcatcattctcgtgtgttgtgcggcacangcagacaaacacaccacgaaacagtaaccncgagaacagcggagtagtaagatgagatggagcaccacgcacgcatcgcnccacgtcgctcgctgctcggcggtccagcgcccanngaccaccaggaganagnacaaagaataaaaaaaaagaagaaacagggacgcagtggttcgtctgtgcggtcgaagagaagaggaagagagagacaagacgcngctctccccgccccgccccccgcggggggtaccccacctgactttgctagggaganacgcgcgtccacacaccggtggggggagtcacacacgaggtggtnnnggagagaggggagnngaagntagngaaccgccccgngccacacacacaacaaaaacaacaaaannaccacccccncccccc

SEQ ID NO: 4754 - DNA, 1388 bp, Glycine max
  misc_feature (19)..(19): n is a, c, g, or t
  misc_feature (28)..(28): n is a, c, g, or t
  misc_feature (108)..(108): n is a, c, g, or t
  misc_feature (215)..(215): n is a, c, g, or t
  misc_feature (351)..(352): n is a, c, g, or t
  misc_feature (452)..(452): n is a, c, g, or t
  misc_feature (638)..(639): n is a, c, g, or t
  misc_feature (642)..(642): n is a, c, g, or t
  misc_feature (701)..(701): n is a, c, g, or t
  misc_feature (755)..(756): n is a, c, g, or t
  misc_feature (768)..(768): n is a, c, g, or t
  misc_feature (881)..(882): n is a, c, g, or t
  misc_feature (907)..(907): n is a, c, g, or t
  misc_feature (957)..(957): n is a, c, g, or t
  misc_feature (960)..(960): n is a, c, g, or t
  misc_feature (962)..(962): n is a, c, g, or t
  misc_feature (1020)..(1020): n is a, c, g, or t
  misc_feature (1027)..(1027): n is a, c, g, or t
  misc_feature (1031)..(1031): n is a, c, g, or t
  misc_feature (1073)..(1073): n is a, c, g, or t
  misc_feature (1078)..(1078): n is a, c, g, or t
  misc_feature (1096)..(1096): n is a, c, g, or t
  misc_feature (1137)..(1137): n is a, c, g, or t
  misc_feature (1141)..(1141): n is a, c, g, or t
  misc_feature (1144)..(1145): n is a, c, g, or t
  misc_feature (1148)..(1150): n is a, c, g, or t
  misc_feature (1197)..(1197): n is a, c, g, or t
  misc_feature (1201)..(1201): n is a, c, g, or t
  misc_feature (1237)..(1237): n is a, c, g, or t
  misc_feature (1280)..(1280): n is a, c, g, or t
  misc_feature (1291)..(1292): n is a, c, g, or t
  misc_feature (1298)..(1298): n is a, c, g, or t
  misc_feature (1350)..(1350): n is a, c, g, or t
  Probeset Number=SeqID_14533
ttgttattctcttcttaantattaatcnacgaaaaaatatgtctgtgtttcttctcttttgttgtaaatttagagagatgagaggccgtagtatgctgacagacgagncgagcgataaatgatcaatacgagattatatatacaacaacaaccccgctcaccgacatccgctccaccacacgccaccaatcactttatatatacatgaataaatnctcctcatgcacattctcacgaatatgaaatacataatattgtaaatcactcgcaaatagcccaccaaccctttctcaaacactttctttatcttcgtcccccagcacacacccgctcactccgcgcatatacgcnncccacccctgcctgctcgggaccttatctcagacttactggctcactccttatatacaaccatccatatgactcaagacaccgccgatcctaccatcccnccgcgctctagatccgtgcagcagacgtggtctgtctgctgcgtttctcatccaccgtacaactcaagaagacccgctacaatatcacgtcatcgtcatagtatacatgtgccggcgacgctgccacccgaacactaagcattcccgcagcatgtagatgaggacacagatatgacatgaaaccgnnggngttggaggcatgtctctcacgtccgcgcgagcactcagctacggatcgcaccaccgatntcggctcatgaaccctattctaagatctatagtgatggagtactaacacgtgannccaccagcttgnataatgaatgctatattgaatttgtgaagaactgagaggagtcgcacgtcgctggtgctgtacgccacactgctacgatttagtatcatgtatcataatcgctcatgtccctnnccgcggtcgccgtatcactgatgtnccggttcaactgatttactacgacgccgaatacctcgcgactatccaccnctntntcgcgctctcgatcgtcgcgagtctgcggttgcgtctgctgtgacggtggggagaccnaccgccnctcngtctccgctcgtgtgagcgctcggcatgagaggtggcgcttntgtgncactacatgcgtatttcnaaggaaatgaactacgctgacggtccgagcgtcagcgcagnacgncannccnnncatcacgtattacgactggagtgatcagcaatatcgctgtgtgtgtntcgncctactatcgtctgctatcgagatgatgtttacgcnattgatatgatactcctggtgcttgtgtgtgatctgcgctacntcattagattnntaattntctgtatggagcgacgacatgatatagtatacatcttatcagtgagctagtnctatcgaggaactggatagcgacctcgcgcacgacact

SEQ ID NO: 4755 - DNA, 1427 bp, Glycine max
  misc_feature (572)..(572): n is a, c, g, or t
  misc_feature (592)..(592): n is a, c, g, or t
  misc_feature (632)..(632): n is a, c, g, or t
  misc_feature (644)..(645): n is a, c, g, or t
  misc_feature (656)..(656): n is a, c, g, or t
  misc_feature (660)..(660): n is a, c, g, or t
  misc_feature (699)..(699): n is a, c, g, or t
  misc_feature (702)..(702): n is a, c, g, or t
  misc_feature (707)..(707): n is a, c, g, or t
  misc_feature (737)..(737): n is a, c, g, or t
  misc_feature (741)..(741): n is a, c, g, or t
  misc_feature (804)..(804): n is a, c, g, or t
  misc_feature (826)..(828): n is a, c, g, or t
  misc_feature (830)..(830): n is a, c, g, or t
  misc_feature (832)..(833): n is a, c, g, or t
  misc_feature (835)..(835): n is a, c, g, or t
  misc_feature (839)..(840): n is a, c, g, or t
  misc_feature (851)..(851): n is a, c, g, or t
  misc_feature (858)..(858): n is a, c, g, or t
  misc_feature (860)..(860): n is a, c, g, or t
  misc_feature (864)..(871): n is a, c, g, or t
  misc_feature (873)..(874): n is a, c, g, or t
  misc_feature (876)..(879): n is a, c, g, or t
  misc_feature (881)..(882): n is a, c, g, or t
  misc_feature (885)..(885): n is a, c, g, or t
  misc_feature (889)..(890): n is a, c, g, or t
  misc_feature (892)..(893): n is a, c, g, or t
  misc_feature (905)..(905): n is a, c, g, or t
  misc_feature (917)..(925): n is a, c, g, or t
  misc_feature (932)..(933): n is a, c, g, or t
  misc_feature (937)..(937): n is a, c, g, or t
  misc_feature (940)..(942): n is a, c, g, or t
  misc_feature (944)..(951): n is a, c, g, or t
  misc_feature (958)..(959): n is a, c, g, or t
  misc_feature (970)..(970): n is a, c, g, or t
  misc_feature (983)..(987): n is a, c, g, or t
  misc_feature (989)..(993): n is a, c, g, or t
  misc_feature (996)..(996): n is a, c, g, or t
  misc_feature (1006)..(1006): n is a, c, g, or t
  misc_feature (1009)..(1009): n is a, c, g, or t
  misc_feature (1022)..(1023): n is a, c, g, or t
  misc_feature (1025)..(1028): n is a, c, g, or t
  misc_feature (1030)..(1030): n is a, c, g, or t
  misc_feature (1033)..(1034): n is a, c, g, or t
  misc_feature (1037)..(1040): n is a, c, g, or t
  misc_feature (1048)..(1051): n is a, c, g, or t
  misc_feature (1060)..(1063): n is a, c, g, or t
  misc_feature (1065)..(1069): n is a, c, g, or t
  misc_feature (1071)..(1075): n is a, c, g, or t
  misc_feature (1087)..(1088): n is a, c, g, or t
  misc_feature (1096)..(1096): n is a, c, g, or t
  misc_feature (1098)..(1100): n is a, c, g, or t
  misc_feature (1109)..(1109): n is a, c, g, or t
  misc_feature (1113)..(1116): n is a, c, g, or t
  misc_feature (1136)..(1137): n is a, c, g, or t
  misc_feature (1139)..(1141): n is a, c, g, or t
  misc_feature (1161)..(1169): n is a, c, g, or t
  misc_feature (1186)..(1186): n is a, c, g, or t
  misc_feature (1219)..(1219): n is a, c, g, or t
  misc_feature (1232)..(1241): n is a, c, g, or t
  misc_feature (1248)..(1248): n is a, c, g, or t
  misc_feature (1250)..(1255): n is a, c, g, or t
  misc_feature (1258)..(1258): n is a, c, g, or t
  misc_feature (1295)..(1295): n is a, c, g, or t
  misc_feature (1297)..(1297): n is a, c, g, or t
  misc_feature (1310)..(1316): n is a, c, g, or t
  misc_feature (1318)..(1322): n is a, c, g, or t
  misc_feature (1324)..(1328): n is a, c, g, or t
  misc_feature (1330)..(1330): n is a, c, g, or t
  misc_feature (1347)..(1348): n is a, c, g, or t
  misc_feature (1357)..(1357): n is a, c, g, or t
  misc_feature (1361)..(1361): n is a, c, g, or t
  misc_feature (1363)..(1363): n is a, c, g, or t
  misc_feature (1366)..(1367): n is a, c, g, or t
  misc_feature (1408)..(1408): n is a, c, g, or t
  Peptide Sequence Number=SeqID_7393
  Probeset Number=SeqID_14534
gtggtgtgtggcgctcgtccccatttctcctctattcaaccgcgcctaccgttaatcccattaaattattacaaccatattaaccccgcggccgaggggggaggcgcgcggggcgatcccacccccttatgaaggtccatccctatagttggcgagccgctctccctcacgcgcgtggggttatcgcggcagagtagtaatgtaagagtgcatcaccgttgattataacgatgtttacatctacccaccataatataaaatattctcgctatctatccgatacataccgtgacatactaatatataatagaataagtcgacataacagaaggtagaacaccatatatgtctaattcgctagcttgccgcctcagcggcagagatatgtcacgtttcttacgccaccatatattatgtttcgtaagctagttgcaccggaacagccctcaccccttcttttatatttattattcgacatgctcatgtgaagggacttgatgtgatatgccctcctgaaatcgccgcttaacgcactatatcatttataatttcgtcgcgatctcgtggcatgntgcgtcacccgccgcgcatnctctttcttatctcctgttctaccgcctgccaatcacgcntatagttaatgnnggcaggagagngctngactgacctctggtacattcgctcgcccgggcgccccgncgncgccngtcgcctcgccgccgctgcgcccctctgangtgncgcgcggggtgcctttaatagaagggcagagccggcccccctcggcccgcgcagcacttgttnattctgtgaggccccgcaccannngntnnangcgnnccccgcggtcncgccccncnaccnnnnnnnntnntnnnntnnctntccnngnncaaaagtgccgnggcccgaacgcnnnnnnnnnagcccgnngcantgnnngnnnnnnnncgagaannggcacggaacncccccgtccccannnnnannnnngtnccagccagtnctnacccgctttttcnnannnnantanncgnnnnataggaannnnaatttaagnnnngnnnnngnnnnngttatatagtgnncaacgggncnnncaggcgggngtgnnnnatgattgataccggcgaagnnannngatgtatatattgtacaccnnnnnnnnncctattaacactgttanagcttccgaatttatcactctccccgcgatgcngccggtagcagcnnnnnnnnnntttttangnnnnnntantattgatgatgcatgactatagtagtcatcagtaggngnctctcaacttttnnnnnnncnnnnncnnnnncntcccccccgcgcgtgcnncgccgtgcntgcncnccnncgcgcccgcggcaaaaagattctacattatcagacagctgntatgactctcttgactgac

SEQ ID NO: 4756 - DNA, 1590 bp, Glycine max
  misc_feature (17)..(17): n is a, c, g, or t
  misc_feature (29)..(29): n is a, c, g, or t
  misc_feature (63)..(63): n is a, c, g, or t
  misc_feature (71)..(71): n is a, c, g, or t
  misc_feature (80)..(80): n is a, c, g, or t
  misc_feature (114)..(114): n is a, c, g, or t
  misc_feature (124)..(124): n is a, c, g, or t
  misc_feature (150)..(150): n is a, c, g, or t
  misc_feature (153)..(154): n is a, c, g, or t
  misc_feature (169)..(169): n is a, c, g, or t
  misc_feature (184)..(184): n is a, c, g, or t
  misc_feature (191)..(192): n is a, c, g, or t
  misc_feature (194)..(194): n is a, c, g, or t
  misc_feature (275)..(275): n is a, c, g, or t
  misc_feature (372)..(372): n is a, c, g, or t
  misc_feature (375)..(375): n is a, c, g, or t
  misc_feature (394)..(394): n is a, c, g, or t
  misc_feature (414)..(414): n is a, c, g, or t
  misc_feature (522)..(522): n is a, c, g, or t
  misc_feature (586)..(586): n is a, c, g, or t
  misc_feature (686)..(686): n is a, c, g, or t
  misc_feature (812)..(812): n is a, c, g, or t
  misc_feature (962)..(962): n is a, c, g, or t
  misc_feature (990)..(990): n is a, c, g, or t
  misc_feature (1025)..(1025): n is a, c, g, or t
  misc_feature (1252)..(1252): n is a, c, g, or t
  misc_feature (1256)..(1256): n is a, c, g, or t
  misc_feature (1285)..(1285): n is a, c, g, or t
  misc_feature (1287)..(1287): n is a, c, g, or t
  misc_feature (1333)..(1333): n is a, c, g, or t
  misc_feature (1389)..(1389): n is a, c, g, or t
  misc_feature (1448)..(1448): n is a, c, g, or t
  misc_feature (1461)..(1461): n is a, c, g, or t
  misc_feature (1479)..(1479): n is a, c, g, or t
  misc_feature (1544)..(1544): n is a, c, g, or t
  misc_feature (1556)..(1556): n is a, c, g, or t
  misc_feature (1590)..(1590): n is a, c, g, or t
  Probeset Number=SeqID_14535
gaggagggagtggggtnagggataatttnatgggattgtatacggtgtcgcacacaattatanacataccntcatctctntatgctattgttctcatgttgtatagtattattntccttttccntcacccccccgcgccccggccaggcnacnnggagcgctggcaccnctatttcactatatntcctaanncntcatctctggccgtctaccctgcttgcgtctcgattgtgtatggcgcgacgacgacgagaggcgacgatgtagggatgatnacaatacagagcactacgcacacgcggcgagtattcttcgcagtgggtagagtggagagatggtgtgtgtgccgctcactaccctcttgctcactgnttnagtgtgtgtgtcgcacgcngtctgcgcgtctctgtgctngcgcctctgtctctctccgctcgatctcgacctcctatctgtagttttgtggctctcacgtccttgactcgacggcacattcgttactatacactcccccacgactcnttgatatacaccgtctcgcatgagtacacggatgagcacggctgtgcgtacgcgcaatttgtgntgctgtcttacatcgaccagaagtatagaagcacaccactacaaaatggagcgacagacgaggagcagtaaacaacgcagtcgagatatgacgacatganagaacctacgtaagatcattaacgccaatatgatcatcaatgtgtaaagagaatgatgatgcaacgtcgagagatgcgccgagctcactgcatgtctcgtctaataatcgacgtggggatggaccnactccccatacttccacccactcatctactctcatgatcgtctccgtcacacgcatatcatgtgtgcgcacgacgacgacatgtctccatcttgtcgtgatgtagtgggtcgcgctagcagattaacgcacactactgtcacatcttcanagtaagaggtggatgggccgattgtgangaattcaccacaccccacctgtgtgttatatcacnacacaccaggtagatgcactcctgacagtcatgatgcgactgtgtctcgcgcactgagttgcatatgtgtaggtgctatacacatgtgacgcgcactcatctattcggatgattgatactcgcatcatacccatgctcgaccgacactgaccactctcactatgccgacgcaacgtcgtcagtgacctgtgactgctcattatgttagtcgtctagtcggacacacntatnaccctcatacacgctcctgtgtgccgtcngngtactcatgtgcgtcatctccatgtcatgctgtgcgtgagcatctncgtctcgtgtcctgtgtgatgatgcctgtgcgcgcctgtctctcctcgctcgcacncacgcgacatcgacgagacatggcgagtaggatgtacgtagacactgcaggtggctcgnaggtctgacgtcntatgacacattatgaggngtgagtgcaccgaacgcatcgctacatcgttatacgtattagtacggtagcgaacgggatagaangatcactcatcnagctaccacgggcgctcgcgacgcgtggcaccgn

SEQ ID NO: 4757 - DNA, 1616 bp, Glycine max
  misc_feature (35)..(35): n is a, c, g, or t
  misc_feature (114)..(114): n is a, c, g, or t
  misc_feature (192)..(192): n is a, c, g, or t
  misc_feature (249)..(249): n is a, c, g, or t
  misc_feature (550)..(550): n is a, c, g, or t
  misc_feature (1071)..(1071): n is a, c, g, or t
  misc_feature (1084)..(1084): n is a, c, g, or t
  misc_feature (1141)..(1141): n is a, c, g, or t
  misc_feature (1166)..(1166): n is a, c, g, or t
  misc_feature (1216)..(1216): n is a, c, g, or t
  misc_feature (1446)..(1446): n is a, c, g, or t
  misc_feature (1495)..(1495): n is a, c, g, or t
  Peptide Sequence Number=SeqID_7394
  Probeset Number=SeqID_14536
agccgctccctcctgctctccctctcgtcttgtanttaccgtcatatttacttaacatcttgctagactacgatatttggtaggaatcgtggtgtgccacccgcactcgaagantgcgcacagtgttacttcggattacagcacttctatatcttctctctgtagtgtgtgttgcgacacacagcaagacanacggcagtcgtatcatcaccatatgttgcaactatccctgtactcttcgtattctgnccgactctcgatataaaccacagtctctcaccgcgagacgagcgagcctcgctgctcctcatccatagcataggtctgtcgtctcacgtaatctcatagagactaggcactagatacaatcgcactacaatgactgtatcccacgctcgcttgtctgctctctatatctatatgtacggaatatacaagttatccagtacgcaaataagcgaactgcctaagctcgaccacatggccgactatatctactagactgatatacacctgatgatcaacaataacgtgccgaagaccattcagncgtatgtcgtcttttataatgtaatgctctatattattactctgtcgcaagcacgactagtcaggatggagatcacatcgcagtgtacatcgacctccccccaccatctcctcctcatttctatatgtatagcatatgcgcgagtaccacctactaacacacattatatgctcgcacgccctactacgaacgacgacgcgcgctgtacacacgaactgactactcacttccagagaggagtagactagactttgtagttatctatatacttactacaacgagacaactcatcacaatgagccacttatacgtgacgaacagtcctctgctcataatcgtcgtagcagaatcaacatatgatctctcttatactgtggcagcactctcaggttgtcagcagaccacaccactagagaaatgatctcctattatgatgatgggtacagacgcgcgccttcatattgcgacacatacgcgacacgtcgtgtgtgctcgctcgtcagtgcatactctatattagntgcgcgctacgtngtacatctgtacatcatattgcgatactctacacgtagcggtgtgtcatggtacgtngctcagtcgcgtatgtacatatgtncgactctccgcgccgagtatcgctgtatacgacaattcgtcgatgcggcntgcattgctacacggagactgtcgacgtggagtgagtctatctatcttgtgcgatctatacctaggaactcatcgtgcatagtacaaacatcgcttctactggatcgtctcgatactcgctctacatctgtatcactcatcgagtgacgcgcgtctgcacagggagtgtagatctcgcatacatcgtatcgctcaccatggccatacttctccactagtcgtcatcatcncagacacggcagtcttgtagcacacatcagtatacagaacgctacattntcagatacgctcactcacacatacggcagtcactagcgctgtcatctatacctctcacgatcatatctacttctacttctacgactcactctcgatgtactatcgctcactgcctcgcgcg

SEQ ID NO: 4758 - DNA, 1758 bp, Glycine max
  misc_feature (11)..(13): n is a, c, g, or t
  misc_feature (35)..(38): n is a, c, g, or t
  misc_feature (40)..(41): n is a, c, g, or t
  misc_feature (44)..(44): n is a, c, g, or t
  misc_feature (50)..(52): n is a, c, g, or t
  misc_feature (54)..(54): n is a, c, g, or t
  misc_feature (56)..(57): n is a, c, g, or t
  misc_feature (69)..(69): n is a, c, g, or t
  misc_feature (73)..(73): n is a, c, g, or t
  misc_feature (84)..(84): n is a, c, g, or t
  misc_feature (87)..(87): n is a, c, g, or t
  misc_feature (89)..(89): n is a, c, g, or t
  misc_feature (99)..(99): n is a, c, g, or t
  misc_feature (111)..(112): n is a, c, g, or t
  misc_feature (128)..(129): n is a, c, g, or t
  misc_feature (148)..(148): n is a, c, g, or t
  misc_feature (181)..(181): n is a, c, g, or t
  misc_feature (184)..(184): n is a, c, g, or t
  misc_feature (186)..(186): n is a, c, g, or t
  misc_feature (205)..(205): n is a, c, g, or t
  misc_feature (218)..(219): n is a, c, g, or t
  misc_feature (232)..(232): n is a, c, g, or t
  misc_feature (234)..(236): n is a, c, g, or t
  misc_feature (245)..(245): n is a, c, g, or t
  misc_feature (247)..(247): n is a, c, g, or t
  misc_feature (249)..(249): n is a, c, g, or t
  misc_feature (295)..(295): n is a, c, g, or t
  misc_feature (357)..(357): n is a, c, g, or t
  misc_feature (371)..(371): n is a, c, g, or t
  misc_feature (392)..(392): n is a, c, g, or t
  misc_feature (406)..(406): n is a, c, g, or t
  misc_feature (410)..(410): n is a, c, g, or t
  misc_feature (498)..(498): n is a, c, g, or t
  misc_feature (564)..(564): n is a, c, g, or t
  misc_feature (624)..(624): n is a, c, g, or t
  misc_feature (662)..(664): n is a, c, g, or t
  misc_feature (670)..(671): n is a, c, g, or t
  misc_feature (767)..(767): n is a, c, g, or t
  misc_feature (798)..(798): n is a, c, g, or t
  misc_feature (803)..(803): n is a, c, g, or t
  misc_feature (834)..(834): n is a, c, g, or t
  misc_feature (849)..(849): n is a, c, g, or t
  misc_feature (854)..(854): n is a, c, g, or t
  misc_feature (947)..(947): n is a, c, g, or t
  misc_feature (960)..(960): n is a, c, g, or t
  misc_feature (975)..(975): n is a, c, g, or t
  misc_feature (993)..(993): n is a, c, g, or t
  misc_feature (1010)..(1010): n is a, c, g, or t
  misc_feature (1069)..(1069): n is a, c, g, or t
  misc_feature (1111)..(1111): n is a, c, g, or t
  misc_feature (1149)..(1149): n is a, c, g, or t
  misc_feature (1157)..(1157): n is a, c, g, or t
  misc_feature (1207)..(1207): n is a, c, g, or t
  misc_feature (1243)..(1243): n is a, c, g, or t
  misc_feature (1246)..(1246): n is a, c, g, or t
  misc_feature (1322)..(1322): n is a, c, g, or t
  misc_feature (1458)..(1458): n is a, c, g, or t
  misc_feature (1562)..(1562): n is a, c, g, or t
  misc_feature (1575)..(1575): n is a, c, g, or t
  misc_feature (1602)..(1602): n is a, c, g, or t
  misc_feature (1663)..(1663): n is a, c, g, or t
  misc_feature (1707)..(1707): n is a, c, g, or t
  misc_feature (1755)..(1755): n is a, c, g, or t
  misc_feature (1758)..(1758): n is a, c, g, or t
  Probeset Number=SeqID_14537
tggggtggtgnnnttgggtgccctcctccctcctnnnngnngtnagaacnnnananncagcagggaagnacanacataagaaanaancncaccacactngccacagccgcnngcccgccatatatatnnttattattaggttctctcntctactccccaccggaaggatgcactctatatngancnagagaagctgcgcgctccncatcactcacaannaaaacaaagaaanannnagaaagggncnanttctctccatgtttgttgtgtaccacataatattattaataaaaanaaagacaacacgacttgtatctcttacacaaaccgagaaagtaggtagagatctatgtatantctagctacactanagccaccgacaacattaattncttatctcaaatanaganagagtgaacttatatctattgcactatacactgtgctatacttatcttcatacgaattatgcgcattcacaatctcctcttccaaatncatacaatttacgctctctctactgttatcattgttaagcgcgcccgcagctcgccgcgtgtcgcngctgtctcttttcttctatcccgccttgtggatagagctcgaacacgacatacacagagncgactcaccgtatcataatgttgtaatatgagtagatnnngtaagnntgaagaatatgagtggatatgtggcgtcgtcttcttgtcgcgaatctcatctctctctatactcctctacatcacactcactcacacaccacaggnttcatggcacgtgtctgtgtgagagatgatngttangataatcgacatagatagagcctggtggagnaacacatctcttganataantcgtatatcgcacacgcacacatcaccaacacgtgtgcacggccataccgcagcgccgactgccacatctgagagagagagcggcgggagtgncgtcatgctgtcnagttacagtgatgangttatgagttattataancccaccaagtagaatanagcagaagaagaggattatcattgatctataccatagtcatagtgtatgtatgagttgntagtgcatgtatacaccactgatgatgtggaccatcacacgncgccgctgctatgatctattatgtgatctcgtatgacngtctgtantacatgatatatagtactatagtacttgtcaactgcacgagtctatatcntgacgcacactcactactctcctcaccaactccacnacncacactcatacatccataacaatatatataccaacacgcgcactctactacgtctctcagaccatgtcgtaagtcnagcattacgccgcacacatcttgtagtgtatgtacataggtccgcatctcagttacgacatcggatgcgcattgtagtatgatatgaacttcatacgaatcgtgccgatgtctcttgtatagtcttacctacgacnctgtcatccgtagcgcatgttctcatgatatattatgtcggtgccgtgttgacatgcaactgtaggactggtagatatgtgtatgaggcgcaagtcgctccgcncgctatgtactantgctacactgccatgtgatgactcatnatatatagcagtcagtatatgtgctgtgtggtctatatcactatgtgaacgtgactgcgangtactgcactacgtatcacacatgtagatgatccctccctcttnctatgccattgaccatgtagaccacggatgcctccccctccagctcanctn

SEQ ID NO: 4759 - DNA, 554 bp, Glycine max
  Peptide Sequence Number=SeqID_7395
  Probeset Number=SeqID_14538
acacaaacacaaaacccacaagaccagaaaaaaaaaaacagagagtaaacatgagatctctcttcttactagccttgttcctagttcttgcttttcaccatggtgaagcagccgtgacttgcaacaacgtggttggtgatctttacccttgcctctcctacgtgatgcaaggcggaaacgctccatcaactaactgctgcaacggtgtcagaacgctcaacagtcaggctcaaaccactgcggatcgtcagagtgtttgtcgttgcatcaaaaatgctattggaggagcctcttactcttcaagcaaccttaacaatgctctgtctttgcctgctaagtgtggtgttaatctccctttcagtatcagcccttccaccaactgcaacagtatccactgaaataagcagaagatcctgaaggaagctactactactactacactactacaagaacttaggacatggcctggtagtagtaactacgttgttcagtgatgtatcttcatctctatgttcttcaaggttctaataaaaattacaacatgctatgagatc

SEQ ID NO: 4760 - DNA, 879 bp, Glycine max
  misc_feature (865)..(865): n is a, c, g, or t
  Peptide Sequence Number=SeqID_7396
  Probeset Number=SeqID_14539
agagaaactgcgaacaaatttatagaaatggtgaggaatctaaattaatgacagtcacataaatacaagttataagttatctagaaagagtaataatagggaacacacttagcagacaaggatgggaagacaaaagcactacctattatctggagctacaacgggtgcagctgcaaccatgaaagcagtaagcttagcaacaataagagagaaaaggattaaagacttggaagaataagaatatgaagatggggttaataggccatcccctagtcccagctaacggagtggcagaatacaagctaacacaaatgggaaaacacgaatgacaatcattcaatcatatatgcttttacagaaggtgtggtgtcttggagtagcattggagggggtccttttttgtatcttatttttttaattttaaaaaggttctcgaatgagatatacttgtctatttagtatgattggctttcattttctttctcttgttttcgttaattaattcatatttattttgctaccatgataaacccctacttttgtttaagtctcagcctctgaatagcgatgttatgccattatgtgtatggtgagggactgagaatgatcaaattgttttttaaaatacattctcttttatattgcataaaaaaaaaagtgacagagacgttcggcatcaagattgagagttgatttcctgaattcaagctcactcaacttggtgttaggcaatggcccaaatggggttgtcctccaagcaaattcccgtggacatatgaatctaaagagacctgctatctcttgggaggaaaaagtgaaggttacccctagtggggcaaatgagtcagtagaaattgctgctggngattttgttgagtt

SEQ ID NO: 4761 - DNA, 668 bp, Glycine max
  Peptide Sequence Number=SeqID_7397
  Probeset Number=SeqID_14540
aaatctaagcaagctgtccaaaataaaaaccctgttggaaagactgttcaatacgaaaaagctgaacctgtaaatagacccaatcctttcactaaacctacctctggtccaagtggagattatcctgtgtctaacttgagagaaccagttcaacaacaagctcaaccttatgtcttttatcaacctaaatatactcaagctcctgtctttgaaaaagagcaagattatagcgatttccatgatgaacgtgtgaatcaaactgagcaaaatcttcttcataatgatcaaaatttgcttaataataatcaaaataatcaagacttgatgaataatgatgcctatcaagcagaagaagacactggaagaaagaatatctatccaagattggatacattaaatgcaggaacttatccttcatataacccttatagagttgacgctaagccaactgatgatgcttttgctcgtattcgtggtgaaagaactgaacatcacgaatatagccattctgattattaatccaagaataaagatttctgtattatctgattaaatattgattgatgtgtattaatttgttatatcctatgtttataattttagtatttattggtagtttggtttattatataaatctaccaatcgtagtttactttgacttattcaat

SEQ ID NO: 4762 - DNA, 3638 bp, Glycine max
  misc_feature (1)..(244): n is a, c, g, or t
  misc_feature (3609)..(3638): n is a, c, g, or t
  Probeset Number=SeqID_14541
nnnnnnnnnnnnnnnnnnnnnnnnnnnnnnnnnnnnnnnnnnnnnnnnnnnnnnnnnnnnnnnnnnnnnnnnnnnnnnnnnnnnnnnnnnnnnnnnnnnnnnnnnnnnnnnnnnnnnnnnnnnnnnnnnnnnnnnnnnnnnnnnnnnnnnnnnnnnnnnnnnnnnnnnnnnnnnnnnnnnnnnnnnnnnnnnnnnnnnnnnnnnnnnnnnnnnnnnnnnnnnnnnnnnnnnnnnnnnnnnnnnnggctgtgcctactgtggtgacctacaatacgattatgtatggcctttgcaagtgggggagagtgagtgatgctaggaagttgcttgatgttatggtgaataagaatctgatgccggatttggtttcgtataacactctgatttatggttacaccagattgggaaacataggggaggcttttctcttgtttgccgagttaagatacagaagtcttgctcccagtgttgtgacctataatacacttatcgacggtctttgcagattgggggacttggatgttgccatgcggctaaaagatgaaatgatcaaacatgggcctgatcctgatgtatttacttttacgacttttgttagaggattttgcaagatggggaacttgccaatggctaaggaattatttgatgagatgcttaatagaggattgcagccagatcgttttgcgtacataacccgaatagtaggtgagctgaagcttggcgacccatctaaggcttttggtatgcaagaagaaatgctagccagaggctttcctcctgatttgatcacttataatgtcttcattgatggtctccacaagttgggcaatttgaaagaagcaagtgaacttgtgaagaaaatgctctacgatggacttgttccagatcatgtaacatatactagcatcatccatgctcacttgatggctgggcatcttaggaaggctagagcattgttccttgagatgttgagcaaagggatatttccttcagttgtcacttacactgttcttattcattcatatgcagttaggggaaggctgaaacttgctattttgcacttttttgagatgcatgagaagggtgtacatccaaatgtgatcacctacaatgctttaatcaatggactttgcaaggtgagaaagatggatcaggcatacaatttttttgcagaaatgcaagcaaagggcatttctccaaataagtatacttacactattttaataaatgagaactgcaacctgggccattggcaggaagctttgaggttgtataaggatatgctagatagagaaattcagcctgattcatgcacacatcgttctctattgaagcatctaaacaaagactataaattgcatgtagttcggcatcttgagaatgttattgcagctggtgaataaatttatgatgtaaggatgaagaatggttatttattattatcattttggctttctcacatggctgatgagtaaaagaaaaccctatatttgaatgggttttgccttttgaggtgtaaattcccccagacagaatcttgtatatttttctgactgtcacggttgaagatgcctgtggtgttcttgatgattaagatggacagacttcaactattaacaagttttcactcgttatatccctagactagtcaggggaaccaatttgctttgtggctatttaagcagtgtgtaactgctaatttttcttcagctgttatttgacttctgacatagatactggacctgcatagttggtggtcaattcaaatacagaagccaaacaatcagaaaagatttaatcataattgattcctgatgcattgaagtatatagattctgatgatatgaaaaagatcaaaaatcagttcccaccattcgttaaattcaaaatggtcctttaataatgttatggacaggtcaaagtaggcagatttgatgttccatgatcatgaggtcaattatgggaacctcatgtatggactgatgaaggagtatatccaacataactgaaaggtcctgtctgagttaatctccgatgcaaaccaggaggaagtaaccctggaatgcttctctggtaatcgcggaatctgagcgattaaatactcaaattctgtgatatagtcctctaccgatccctcctgtttcaactctgtgagctgttcgtacacgtctccgtcgccatgaccaccgtatctctcgagtaacgctattttcaacgattcccaagtcagatcttcatcttctccgatgagggagttgaagaaatgtatggtgggtccgtccatacaaagttgggccaagctcaccttcacttctggcgtggtgttctgtactcggaagtaaacttcagctcgcgaaatccagccggcggggtcttctccttcaaacgaaggtaactccaccttcttcgccgattgatgaaattcattcatcttatcagcgtgtgacccttttggagtttccgtcttcttttctggtgtctccttgttcttgcttaccgcacttccagtcccttcatcatccagcgattttccgggatgtttcgccaacaccgcgggcggattcgcgtgcttctccttttttcgaattattaaacatttgaagaatttgagaaataagaaggaatccagttttatcacggatgtcaaaagcatgattatttaatagggatccaaatcataattggaagggctattttatgaatcatgaattgaattgtattggcatatcattccgggcctataattaacaatagcataaaatatattctcacctaatgaagcaaatcacttgcatgctatcagtgtataaagagagctttattatttgataatggttgaaggttacagataaggaaatatattcctcagatgtgacacaggcctagcccttatagaaggttgatacaacataacagccaattaactcgactggtacagaagtacgaaagtacagttgagtacggtggaattttgtccatataattgttgattttttctgattgcgcagccttaatgatactttaaaaacttttttcactgccgccgagaaaagacctttttcagtgttggaaacatttaaaatacgaactctaacgcctacaaaagtcgtgtcggacactgctcactgagacctgtaatatcaacttgggcacttagccaacaccaaaatttggcttgacacttaataggacacaactcattcaaaaaattgatttcttgaaattcaatttatgaaaaagatttaaaatacaaaatgatcatcatattaataatttttttgaaaatacacttggcttttgatgtttaaagacaacttacaggaatggttcaaataccaatataaatttgtttaacctgtgatgttgctaatctatatttcatttgacttactctactcgtgtccatgttacatagcctaaaaaaccaattatacaactaaactaggcaacttaccttatatatttgtatcctatttccagtacaccaagtactgagttatatataataatatctgatttttgctgtgcaaaaaaaaaaaaaaacaggaatctaacagcttgtatgatagattcataaggattggctagtagagccgccacttcaagttnnnnnnnnnnnnnnnnnnnnnnnnnnnnnn

SEQ ID NO: 4763 - DNA, 411 bp, Glycine max
  misc_feature (364)..(364): n is a, c, g, or t
  misc_feature (373)..(373): n is a, c, g, or t
  misc_feature (375)..(375): n is a, c, g, or t
  Peptide Sequence Number=SeqID_7398
  Probeset Number=SeqID_14542
aaataaagtcgactatttctcccctaagaacaagatccggcagagaaagttcttggtggcaaagaagaagaaagagaaaaaggcagaagaagagggttcaggtgctgctgctgactcttgcaagtgcaaagcaagtggtgcaaatgcaaacgagaacaacaagtgtgtgtgtgtggcttacaacaacctaaggaagtcccaggaagagtttttcaagaacaatgatgatggtgttgttgatgatggtgaagaagagggttttgagagtgtggttgttgaagaagaaaaaggagaatcgttattggggaatggtgaagtgagtggtttggttgtgaagcgtaagagggagaggttgatggaagangcgaggaanantgttcttcctcaagtgggtctgggaaagttatgcat

SEQ ID NO: 4764 - DNA, 1082 bp, Glycine max
  misc_feature (1025)..(1082): n is a, c, g, or t
  Probeset Number=SeqID_14543
aataagcgcagttcgttccacgttgttgtccgctctgtggctctctacatttcatcattcatcggaaaaatggctctcgaggttgctgttaaggctgctgttggtgctccaaatgttctcggagattgtccattttcccaaagggtcctcttaactttagaggagaagaaaatcccttacaaactccacctcatcgatctcagtagtaaacccgaatggtttttgggtgtgaatcccgaagggaaggtgccagtggttctttttgatggcaaatgggtggctgattctgatgtgattgtggggatactcgaggaaaagtacccagaaccctctctcgtcactcctcctgaatttgcctccgtgggatcaaagatatttgggtcttttgtgagttttttgaagagcaaggatacaaacgatggaactgagcaaacgttggttgctgaattgagtgccttggatgaacatctcaaggcccatggtccatacattgctggggagaaagtcactgctgttgatctgagtttggcacccaaactgtaccatcttgtggtagcactgagtcacttcaagaattggaatattccagaaagtttgacacatgtccacaactacactaagctgctcttctcccgggagtcatttgagaaaacaaagcctccaaaggtagaatatgttattagtggatgggcgcctaaggtgaatgcttgaagtaattctaaattatgagatatctgaacatcagatatgtaatgtactgtgactgaaccttgttaagaataggatggcgaactcatgatgtttttcaagagtattgttccccttttaataataaacatgtagtttgttggtgtgtttcctaaaaaaaaaagcgtgcaatcaaagtgatgaggggcttaattgagtaatctgtgtagcaaggattgaaacgattgaattttgcgtgcaggtgcttgacaccagaaatttgtggctgtactcttagacacccatcatttattttacttttcctagcactgtcccannnnnnnnnnnnnnnnnnnnnnnnnnnnnnnnnnnnnnnnnnnnnnnnnnnnnnnnnn

SEQ ID NO: 4765 - DNA, 1341 bp, Glycine max
  misc_feature (1)..(1): n is a, c, g, or t
  misc_feature (126)..(126): n is a, c, g, or t
  misc_feature (950)..(950): n is a, c, g, or t
  misc_feature (1319)..(1319): n is a, c, g, or t
  misc_feature (1321)..(1324): n is a, c, g, or t
  misc_feature (1326)..(1327): n is a, c, g, or t
  Peptide Sequence Number=SeqID_7399
  Probeset Number=SeqID_14544
ngtggcgtgtgtgcgggcgggcgcgacgcgtcgctgtggactgatagagagcaacatcgacgaggagtattagtcctcacatttcgcctcgtcgatgtttgcccgacgagttatccgcgaggtgtntagcggatccgacgattcgccggtctcagaggtttgcttcgtagtgtgttgtggattcgtgtatgatttttcttatacgtgtgatgttgactggatgtttcttgtctttacgtgctacatcttggcatatgattgttttgagattacagtggttgtagagggttggggcgtggttgggcgcatcagatctgcgacgcgcatcgagcggacgtacgtctacgcggtgccggctcgatcacaggatgcaaggtcgtcgtgtggaacgcccgcacgcgcatggtgcgtccgggtcggaggctggtacatggagcgcgtcgtagtttttttgccgcctcgtgacggtgcggtgggttgataagatagtgagaggtgtttgggtcgggctgcttctagtcatcgtcgatatggttgtgattcgtgtagtcccgcttctcacaggcggctctctagtaaaggaggcagagcagcggcttgagcatatgtgcagaagtgactggcagggatatcgcttggatctatcgttcatcgttgccaatgccgggcgttgtgagcaccggagcgctgttatccactcattcacgtgtgccggagttatattagttctcggtagagtacggagagtggccagaaggattcctcggtagtttaaatttacttacatcctcaacgaacatattaataacggtacgagaagtcgagagatagctacatagcagtttttgatagaagataaaaatgaaatttgagttggataaaaatttcagctatgcgttaacacatgctgagttgggtggtgggtgatgcatcatgtgttaagaggtttnttggtgcggctgcggggtcgacaatccctcgttttcgttcaatatgccgcttcctatcttattccctcgccgccccgagaggtctaccctactccccctcctcccgcccgccgcgccgcacatgcgccccgcgcggcgtccgtgtgttgtttttagttattgaaggatagagtgatgtcgttcgccgatggttgctttcatacatgtagaggatcagaagacggccttcgccccctccatcatcacaatatgtataagagattcttctgtctgtcccgtagcaatgcacttcttttacgacgcttctctcctcccgcgggggagtggcaactttaggaaagagggcgcaaacaccattttgtatatatntnnnntnngggggggggggcac

SEQ ID NO: 4766 - DNA, 567 bp, Glycine max
  misc_feature (475)..(475): n is a, c, g, or t
  misc_feature (562)..(562): n is a, c, g, or t
  Probeset Number=SeqID_14545
gaggacattgaaggcggcgaacttttccgggttcacgccctggataccaaggatctggatcgctgcgcgtgagaagccacactgcggtgtttcgggggttcccttcatgaagaggacgacgggagccgaggcgacggccttgtcgatggctgagcgggtctggtcagacaacagacgtgcttgctggagaagagctggagctcggatcggttggatgggagtccgagcggcagggcgcgcaacctgccgaagcagggtctgtgaagtcgcacgttagcgaagaataatgcttataggataagaggggcttcacgtaccgatgtgaacgatcttgagagcattttggtggtggttgtgtcttgctaagctcacgggagatctggaccggggtcggcaaacactttctgtcgtgatgcaatcgaatcacgtgcagccttttactcatccaagggaccgtgcccaaccaccacacctnacatattgcacgccacaggatggcacatcatccagacttgctggggacgcactgcacgaagacagaaattctcacaggtcataccanagacg

SEQ ID NO: 4767 - DNA, 1424 bp, Glycine max
  misc_feature (16)..(18): n is a, c, g, or t
  misc_feature (249)..(249): n is a, c, g, or t
  misc_feature (712)..(712): n is a, c, g, or t
  misc_feature (733)..(733): n is a, c, g, or t
  misc_feature (845)..(845): n is a, c, g, or t
  misc_feature (982)..(982): n is a, c, g, or t
  misc_feature (1212)..(1212): n is a, c, g, or t
  misc_feature (1219)..(1220): n is a, c, g, or t
  misc_feature (1315)..(1315): n is a, c, g, or t
  misc_feature (1344)..(1344): n is a, c, g, or t
  misc_feature (1364)..(1364): n is a, c, g, or t
  misc_feature (1399)..(1399): n is a, c, g, or t
  misc_feature (1424)..(1424): n is a, c, g, or t
  Peptide Sequence Number=SeqID_7400
  Probeset Number=SeqID_14546
cgtcgcggacttcccnnntaacacttcctcatccaacgcgcgcgatctgacttgcggtgcgacacaaccacatctcacctcctcctatacgactaccgcgcgtaccccaccctccgtaagttatgggttacgagcaagggacacccccactacacaaatcaacccacttcacggtctcgttcgccataactacgggtagcgctgcctcacccccaccatggtgtctccacatttgatccatcacccgcngacaagagatggggtccagcgcacaccgatgggttgacaagaactataacctatatactcatatcactacctcggtacctccgaacgctcgatactccaccacgtttatttcatttgcacacccccaccccatgtggcatcccagggcgggtcgcttgcgttcacgctccgccggccatcctgtacctcctttccgtctcgcccctactcacatatatcccacacacatattatgactcccactacctgttgtaatgcttgctgctatcgcttgcatctttcatctctacttattctccacattatccacactacttttcttctcatcctctctcctcctcatcgccaccgctctctttgtccttgtcgctcctcgcgctcgggtacgtgtgtctcctctactcatattattatctgcaacacctataattgtttgtgttagtaaaaatgatatctatcaagnatgacgacaactaccctgtangtgttctctgctttctatatttatacactcgacgcaaggagcacatctatcgcgtgctccctcgtctgttgctcttgtgtctatgttacaacatctgcccacccacctcttncttgtttgtgtgttcttggttgcgtccgcaacctcgcaccacgttagcgcttcatcgtatagcgtagagcattgcgcgtgcatgtagaagtgtttgtatcgtatattacgtgtccatcagcaccgcttacacatctntatatcatacgtttgttcacgctcacttgacacttcctcttatcagtattgtcccctcttattcttcgtgcttcacacacccaccactatctcgccctctctcttctcaccacttacatctcttcacccatgcatctctcttcctcctcacatacctgtactttatttctggtatatgcgcacatccacactgtctcgcggtccactcgactctatctcgccacgcacanacacggnngactgtcgagcacacataccgcgacggctgcgtcctacacatctactcctaggctcgactaagctcactgtccgtcacgcacacacgctacacgnctgcgtgtagccgcggaatccactcgatntccgtctctcgctcacatcnttcttaccgtagctgtgcatcgaccactcactcancggcatcttccgtcgcccagctcgn

SEQ ID NO: 4768 - DNA, 1535 bp, Glycine max
  misc_feature (25)..(25): n is a, c, g, or t
  misc_feature (37)..(37): n is a, c, g, or t
  misc_feature (54)..(55): n is a, c, g, or t
  misc_feature (57)..(57): n is a, c, g, or t
  misc_feature (70)..(71): n is a, c, g, or t
  misc_feature (77)..(77): n is a, c, g, or t
  misc_feature (81)..(81): n is a, c, g, or t
  misc_feature (94)..(94): n is a, c, g, or t
  misc_feature (113)..(113): n is a, c, g, or t
  misc_feature (123)..(123): n is a, c, g, or t
  misc_feature (129)..(131): n is a, c, g, or t
  misc_feature (158)..(159): n is a, c, g, or t
  misc_feature (162)..(162): n is a, c, g, or t
  misc_feature (208)..(209): n is a, c, g, or t
  misc_feature (218)..(220): n is a, c, g, or t
  misc_feature (563)..(563): n is a, c, g, or t
  misc_feature (695)..(695): n is a, c, g, or t
  misc_feature (736)..(736): n is a, c, g, or t
  misc_feature (920)..(920): n is a, c, g, or t
  misc_feature (977)..(977): n is a, c, g, or t
  misc_feature (989)..(989): n is a, c, g, or t
  misc_feature (1154)..(1154): n is a, c, g, or t
  misc_feature (1506)..(1506): n is a, c, g, or t
  Probeset Number=SeqID_14547
gtgtggtttttgtgttttgtgtttnggtttttttttngactttttgggcggggnngngggggtgggttcnntttttntttnttcatttcttttngttggtttttattttgggncaggaggatnggggcnnngcgggggggggcttgggggccccgtgnncgncgcggggtggccggtcgttgttgttcgttctcctttccttcctctnngtttttgtnnnatgccctcgtatcgagtgccgttggtaggagagactgctcgttgagtcgaattggtgcggtcgcgctcgggctactatctgggctcactgtgtcgcggctcctctcaagtcatgtaagaggtgacgtgagcctggcgagtagcgcagggagcggcagcgtgtggaggatgcggcaccgcatgctcgaacgcacgctgtggtgggctagggcgacggagagtacacatcaacatatatgtcgtgtaagactcctcacatctcctctacactataacatatataagcgttcgcacatctaagccaccatataatctgatatacatctacacaacaccatacaaanagcaacacaaataaacatatatgtatgattgtatgtgtaatgtgtagaagtaatatatttgattgtgttcaaactatctctttatggttagatagttaatcttgttagagatgcatgtgatattgtacggangcgtcacggtgtatcgctgctgcgcgcgccggctcaacacnagtaaaggagaggatctcagagtagcgcgatggcggttgatgggtgacgatcagatagtctgtgggtgagtgtggttgtgtaagttcatagagagatgtgtcattagctatgcgtgcatgaattaccacacttctcgaggatctttactactgtagatatcaacacatgtgcggatcttgtganacatcgatatatgatgcgcgctataatgtgtaaaattataccacagcacataacccntcaaccacccancacaccacgacagcatgacgaagacacaacaacctagataaagtataaaatacatgcatacacctaacagtcgacacaagaacgcacaacgctaacaacagaatacaagactagcatacaaacgcgagcaccgcacgggtataatatacacgtgatctctcatcncgcctcttcctaatcgagctctttagtggttgctgtatgcattatatgtcgtgggtatctcattgatatccatcttttatcgcggtccgtgtggacaatggatactaatagcaatatttctttgatgatacgttgagactgcaatcctctcaccgtgtggcgcgcgccacctcgactcgcgcgcgaggaagctagcggacagtacaatgacgcttcgcatagatgtgatagctccacaccggactatcgagtgagtaagcgatatcaatatatgtgtgtggtgcgcaataaatgccgctaatacacggaagaaggaatgatgttggagacttacacacaccacaacacaaanctatcgccggtcgcgagcaatcaacgaat

SEQ ID NO: 4769 - DNA, 1826 bp, Glycine max
  misc_feature (44)..(44): n is a, c, g, or t
  misc_feature (53)..(53): n is a, c, g, or t
  misc_feature (131)..(131): n is a, c, g, or t
  misc_feature (214)..(214): n is a, c, g, or t
  misc_feature (239)..(239): n is a, c, g, or t
  misc_feature (262)..(262): n is a, c, g, or t
  misc_feature (314)..(314): n is a, c, g, or t
  misc_feature (342)..(342): n is a, c, g, or t
  misc_feature (374)..(374): n is a, c, g, or t
  misc_feature (379)..(379): n is a, c, g, or t
  misc_feature (458)..(458): n is a, c, g, or t
  misc_feature (463)..(463): n is a, c, g, or t
  misc_feature (475)..(475): n is a, c, g, or t
  misc_feature (546)..(546): n is a, c, g, or t
  misc_feature (649)..(649): n is a, c, g, or t
  misc_feature (703)..(703): n is a, c, g, or t
  misc_feature (758)..(758): n is a, c, g, or t
  misc_feature (836)..(836): n is a, c, g, or t
  misc_feature (858)..(858): n is a, c, g, or t
  misc_feature (864)..(864): n is a, c, g, or t
  misc_feature (1052)..(1052): n is a, c, g, or t
  misc_feature (1075)..(1075): n is a, c, g, or t
  misc_feature (1094)..(1094): n is a, c, g, or t
  misc_feature (1147)..(1147): n is a, c, g, or t
  misc_feature (1382)..(1382): n is a, c, g, or t
  misc_feature (1384)..(1384): n is a, c, g, or t
  misc_feature (1433)..(1433): n is a, c, g, or t
  misc_feature (1454)..(1454): n is a, c, g, or t
  misc_feature (1510)..(1510): n is a, c, g, or t
  misc_feature (1516)..(1516): n is a, c, g, or t
  misc_feature (1568)..(1568): n is a, c, g, or t
  misc_feature (1585)..(1585): n is a, c, g, or t
  misc_feature (1589)..(1589): n is a, c, g, or t
  misc_feature (1600)..(1600): n is a, c, g, or t
  misc_feature (1626)..(1626): n is a, c, g, or t
  misc_feature (1628)..(1628): n is a, c, g, or t
  misc_feature (1634)..(1634): n is a, c, g, or t
  misc_feature (1645)..(1645): n is a, c, g, or t
  misc_feature (1658)..(1658): n is a, c, g, or t
  misc_feature (1680)..(1680): n is a, c, g, or t
  misc_feature (1752)..(1752): n is a, c, g, or t
  misc_feature (1761)..(1761): n is a, c, g, or t
  misc_feature (1773)..(1773): n is a, c, g, or t
  misc_feature (1778)..(1778): n is a, c, g, or t
  misc_feature (1780)..(1781): n is a, c, g, or t
  misc_feature (1803)..(1803): n is a, c, g, or t
  misc_feature (1812)..(1814): n is a, c, g, or t
  Peptide Sequence Number=SeqID_7401
  Probeset Number=SeqID_14548
taagatcgctatgatgctatatcgtcgtgtatcgcagtggcgcnacactatancggacatcgagccgtgcgaagtattagggttagcacgtctcgcatatagcgatagatgcgatcatcgtttactatgtnagatagatactcagtagcagtataaggtacagagatagaacgagtctcttgacggtcgagtagtggtacggtagctgtacgtngagcgtgtgtgtgcgaacgatgcantacggtgatgagtgctgagtaanatagagggagtgcatgacgatagtctgtattaagactatcgcaaaagacganagatgagagacgcgctacgctaatagantataatcgatgaagagatatagtcttgctatngtggntagtcgagtagtgatagactatcgtcatagtgatgatctcgtgttagtcgatagttgcgtgtgagagacggtacagatnttgtnaataagtcctgntgttttatatatatcataggtacacggtatagtagtatcgagattatatggtatggagtggtagaatgtgncgatgatctcatatatactacaagtggctatctgaggagagcgctcgtatacgtcggtgatcggtcatgtgggcatgatttaatagatctcacatacatagantgttagcgtggggtcggaggcagacctgagaggagcgtgattccccgtggaagnagagtctgctgttgtgagttatgttcgtgcgtgtgtggagagatcgagacggcgngtctgccgtctagtgtagtcgcatattatgacacgggagtagtcgtggtcaagtcgatggtggtatgtattcccgcanggaagtaacaagatgagtgagntcatgntcagttggctccgctgacggaacagagagaagacatgaacgatggacgcgggagtgtggtcgaggtggcacgacaatagaccaatgcggcgactctacgacatatacgttacacatatgtactcttctcacctggcgtgtacgcgtgtcgcagcttatgatctgagctctcatatggatacacacagnttgatttatggtagggtatgacngctaaagaggaagtcgtancgtgagatgtagcggcgtgcgtaagagcgatactgtaggtatagtgtgacganttagtattcccattagcactgcatgatgtgtgagtcatgtagtattgttgctctgtcatatgtaaattgtgcggctataagcagggtattagcgctgcgtatgtatagatatgagtcagagtgcaggaggtgcaagatgacgtagagtgtgtgtctcactgatgtaattcacgagatgagggtctgtagcagatgtgtcgtttgtgtcgtggtgtgttataatcggacgagaganangatatgatgacgactggttgctgatgttcgttgtcagagtagctagatntggttagtagctttgcgtatnggtggctctgcgattgttggtcgtctatgagtagtctgatagatgagatagagcangtatantttactggccgatatagtcacggtgagtatagagagagtatcagatttgcgngcagaactcgtctcacntgtngtgttcgcgangaagtacacacagacagagagtatangnagagangaggccgtgtnagtgtcagtattnatctccgttgctgtatctctgntcgaatgggcggcggagagcacgctcctgagtactcacacgatgatagtgcggatagtatgtcgtgtgctgngagtcggangttgagtgagtnatatntnngtatatagttcaatctgtagtngaagcttannngggggttttggg

SEQ ID NO: 4770 - DNA, 2079 bp, Glycine max
  misc_feature (16)..(16): n is a, c, g, or t
  misc_feature (24)..(24): n is a, c, g, or t
  misc_feature (37)..(38): n is a, c, g, or t
  misc_feature (41)..(41): n is a, c, g, or t
  misc_feature (60)..(60): n is a, c, g, or t
  misc_feature (64)..(64): n is a, c, g, or t
  misc_feature (78)..(79): n is a, c, g, or t
  misc_feature (99)..(99): n is a, c, g, or t
  misc_feature (101)..(101): n is a, c, g, or t
  misc_feature (112)..(112): n is a, c, g, or t
  misc_feature (129)..(129): n is a, c, g, or t
  misc_feature (142)..(142): n is a, c, g, or t
  misc_feature (147)..(147): n is a, c, g, or t
  misc_feature (149)..(149): n is a, c, g, or t
  misc_feature (175)..(175): n is a, c, g, or t
  misc_feature (197)..(197): n is a, c, g, or t
  misc_feature (216)..(216): n is a, c, g, or t
  misc_feature (243)..(243): n is a, c, g, or t
  misc_feature (286)..(286): n is a, c, g, or t
  misc_feature (315)..(315): n is a, c, g, or t
  misc_feature (357)..(357): n is a, c, g, or t
  misc_feature (367)..(367): n is a, c, g, or t
  misc_feature (371)..(371): n is a, c, g, or t
  misc_feature (375)..(375): n is a, c, g, or t
  misc_feature (402)..(402): n is a, c, g, or t
  misc_feature (427)..(427): n is a, c, g, or t
  misc_feature (433)..(433): n is a, c, g, or t
  misc_feature (529)..(529): n is a, c, g, or t
  misc_feature (595)..(595): n is a, c, g, or t
  misc_feature (599)..(599): n is a, c, g, or t
  misc_feature (692)..(692): n is a, c, g, or t
  misc_feature (709)..(709): n is a, c, g, or t
  misc_feature (717)..(717): n is a, c, g, or t
  misc_feature (741)..(741): n is a, c, g, or t
  misc_feature (760)..(760): n is a, c, g, or t
  misc_feature (841)..(841): n is a, c, g, or t
  misc_feature (891)..(891): n is a, c, g, or t
  misc_feature (965)..(965): n is a, c, g, or t
  misc_feature (1113)..(1113): n is a, c, g, or t
  misc_feature (1194)..(1194): n is a, c, g, or t
  misc_feature (1208)..(1208): n is a, c, g, or t
  misc_feature (1303)..(1303): n is a, c, g, or t
  misc_feature (1349)..(1349): n is a, c, g, or t
  misc_feature (1355)..(1355): n is a, c, g, or t
  misc_feature (1570)..(1570): n is a, c, g, or t
  misc_feature (1582)..(1582): n is a, c, g, or t
  misc_feature (1661)..(1661): n is a, c, g, or t
  misc_feature (1682)..(1682): n is a, c, g, or t
  misc_feature (1724)..(1724): n is a, c, g, or t
  misc_feature (1768)..(1768): n is a, c, g, or t
  misc_feature (1812)..(1812): n is a, c, g, or t
  misc_feature (1918)..(1918): n is a, c, g, or t
  Probeset Number=SeqID_14549
ctagcgctcatatgancatagagnctttgccgtgcgnngcngacgaatatacagcgtaangtgncgttacggtacttnnagcgactcgatactatgctnanacagacatacntgctagatgacgcaagnatcgacgaggaantcagnangtgcagatgtacgtagcgacgatgcngatgacataccaagatgcgtgncgtgctgtggagagtactnagaagatactgcgcggagggacagcanagatgccgatgaatgtctgtagatgtagaggtcgatgtatatnatcactgtgctgcgcgtgtgttgattcancatcgtatagcgcgtctatcgaatcgtgagagggtcatttcntgtcaacganagtnatanatatcgtcgcgaagacagacgctgtcnggcgctacaggcgactcgtcgacgncgctgngagccatagataagtatatagtcatatacagcagactacttcaatcaagagttatcaccagagtgtgatcgacgacgataaagtgatcgagtgtcntcggaccggtgcgagttcgcggagatcggactcgcacactcatagcacgatcgatcgatatcatancatngatcatcgatatagtcggcgagacggttatataatcgtagtcatagccgcatcagttctatatgaagtacgacgcacagcgagagaatctgtnagcgatagcgagacgtnggatgtcnacacgcgcacacgtagctgatcanatatagactcgtgacatcnagtatctacgcgagttcgagaccgctcacgtatcgtccgtagctcgagctcgccagtgctgctcgacgtacgagaggtagntagtagtgaagagagtgcgagaagagacacgattagacgggcacatatcngatatgcgcagtagccacacgcgaggtagagagatgtattgatgccggtgatagactcagagtggactattgangcgacttataatatagtagaatatctagcgactacacgatcactataatcgaacgcgcagtcggctgacgttattatatgttacatagttatggtcatacggcccgcacacattatgaggcgctatggagcgatagaacacgcaagtnagatacgactactagtagtaggagacggtgacgcggggagtcaaacacaaggagcgggtggagagaagaataactatagtngcaggcgtcggacnctagatagcgcccgcgaacgactaagatacaacacatacgacaccggttgagttatagatctgtcggtggactctgcgagtattaaataagagantgaagatacagagttatcggccatgtgcccgatatatgctgcacangagganacaaagtagtgtcagagcgtagtgggtatgagacggttgtcatacagcacgacgcgtggcacaccgcgccgagccgcacatgggcgctgttgcgtgtaccagtccaccggcggagcagcagagagggcacacgtacgtatacttatcaagcctctaatctcaattctaccgttaagcgcatattacaacatatagaatgtagttcgatggcctcnatacaacttctngttattagcacagcctatggacgacctcatatctacatcccagtgtcgagatatgtgactgtctcttgcatacgagcgngcgagagctgagtagttagtnggagaatcacgagcgtcgcatcggaacagcccgcaagacacngtaacgtaagagagccacatcaaatttattagaaaactactaanatattactagactagaagaatgaacgcctatgcagcgcgcatgnatcgcagtccttaccaccactgctccgcttctccgactacacaccaaactccacgataatgatgcagcggagagatacctacaagaacacgacactcacgccacanaatacaagaaacagagagagggcattgattctcgcttacccctgcgcgacctctccgaagggtgtgtggacctctcgttcccacctaatttatgggaagagaaagatatcagagctctagcaacgtgcggattgttttctcccacaatcaaagaaaaacaa

SEQ ID NO: 4771 - DNA, 651 bp, Glycine max
  misc_feature (1)..(50): n is a, c, g, or t
  misc_feature (651)..(651): n is a, c, g, or t
  Peptide Sequence Number=SeqID_7402
  Probeset Number=SeqID_14550
nnnnnnnnnnnnnnnnnnnnnnnnnnnnnnnnnnnnnnnnnnnnnnnnnncgctgtcggaacaagccaaaagcaaaggataaaaaaaaaacaatggagtccagcagaggtcaaggtggtatccagcagttgcttgctgctgaacaggaagctcaacacattgtcaatgctgccaggaccgcaaagatggcaaggctgaagcaggccaaggaggaggctgagaaggagattgctgaatacaaagctaaaacagagcaagacttccagaggaaacttgaggagacaagtggagactcgggtgcgaatgtgaagaggctggagcaggagactgatgccaaaatcgaacagctgaagaacgaagcttccaggatctccaatgatgttgtggagatgctcctcaaacatgtcaccactgtcaagaactgagagagattcgattccattcctctgtaataatcaaaagccatttatgagtttatttctttctttatctcatttcacgcgtgtggtgttgttactggattgaatctcagagactcaaatctcatatgaaatgtgtttcttgtaatttattcttctttttcttcttgtttgttgtattcatcatttccttttgaggattgtaataaaattgagagctggattatccttn

SEQ ID NO: 4772 - DNA, 725 bp, Glycine max
  misc_feature (238)..(238): n is a, c, g, or t
  misc_feature (270)..(270): n is a, c, g, or t
  Peptide Sequence Number=SeqID_7403
  Probeset Number=SeqID_14551
ttgacaagccctgactaatgggaggcaccctatcctaaatatgaatttgggtggtggaaacccttcttgccccccgcccagacagaggtgcagtcttaagatattatttatccacactgacctagcgcttgggatcccttaattttcttttcccatggccattgttcaagcgcaacctggctcggcgccaaagcctgcctagatttgtatcccttcctctgcctactctgcccccccngcatgaattattcaacccccccgggagccggncctgagggatctcatacgaaagggaaggggcacccaataggtccccccccccacgtcgtgagcggcttgcacattcggcacaccgaacaaaacaacaacaaaaaaccaacttccccgcaccgccctccatccttataacacgtttcggaaggttccgggagaccgaacagaccccaccccctggaaaaggtgggagggggccccccccccccccccaccccgacaagggaacggccccggcccctccccacgccccgccacccgctgggggttaaatactccctgcgcgcggtttctgcgaaatattaaaaagaggcgttaggaaagaagaacacccccccctctttcggcgcagcctgcccccgcaacaaccccccactccgtcaccgccaacccacacccgcccccccctcgaatatcagctggcgccatctccccagtacacccacacaacc

SEQ ID NO: 4773 - DNA, 1351 bp, Glycine max
  misc_feature (25)..(25): n is a, c, g, or t
  misc_feature (28)..(28): n is a, c, g, or t
  misc_feature (684)..(684): n is a, c, g, or t
  misc_feature (1173)..(1173): n is a, c, g, or t
  misc_feature (1351)..(1351): n is a, c, g, or t
  Probeset Number=SeqID_14552
tcctttttttttgatacggttggtnttnaaaagtgttagtctctcgcttatacgtggagtacgtaattttgggtgttttatacctccccctcccgcctccttcgcgcgcctcggttctttcgcgctcttctttcattaccgtacttctctgcgcgcgtcctggccccacacgcttaggctgggtatgggtaggtttgaaatgttttgttgtttgcgtcgttgaatttgtcttgtcgatcgacttgttgcgtcgcgcccgggcgggttggggagagaggatgttgtctctcctctcccatctcatgaactctacgccgcatcgacaggggtttgcgtctgaccttgcgggtgtctgagcgaacatatgcgcataattctctcgtctttttcctctcttttcttatgcaacacccatatatctcctcccaacccaactacctcgctacaccttggatatttaaatacttaaatagatccgtatatgcgtcggtgcgtcgtggtccccaccgcctctcgctcattattgccactcagcttatcttatagccttttcaccgcggactctcaataccaaccctccaccatcaccacccgcacgccgtacccgcccatctatatattcgaccgtcggagcgaacgcgtcccacaagcgacaacatcatcctgtacatgtcccatcatctnttatgtgcgcgcttacaatcgtccgcattattattatatcacctatacatcagagactaggtggataaatagaaccgatctgactacggagtctagtaacattgcacagcagcagctaagctctacttcgctggcgatgtaggaaagaaggtatgatgatcgaaatcaatatacgcaggatgacgacgcctaatgcgccgcgtctctagtccactcttctctactcgtctactgtctaacatccccaccacgtctcaatcgtactaggccttcgtagtagacacactccacgtgcatctctcacacacacctcgattggatacacacgacgtatccatctctacccaactgcggatctctcgcgacgcgcgatggtagcactccaagttgacataagcgtctctctgtaacacaatgtacatactagatattatacaatgtactccttcttctccgcactctgtttagcttccctgcagtgtgcacagncagtacaggagactgcgccgacgcgcttatcacttggagtgcacgatcctcttatcgcaggacgcgcctctgatgcacgactgtgagctcgatcagcacgcgctcgtcgcgcgaccgagtgtgcgcgcgaggcaagccatatctgtcgcgcagatacagctgacgcgtggcaccgcgn

SEQ ID NO: 4774 - DNA, 1662 bp, Glycine max
  misc_feature (16)..(17): n is a, c, g, or t
  misc_feature (22)..(22): n is a, c, g, or t
  misc_feature (29)..(29): n is a, c, g, or t
  misc_feature (31)..(31): n is a, c, g, or t
  misc_feature (33)..(33): n is a, c, g, or t
  misc_feature (35)..(38): n is a, c, g, or t
  misc_feature (40)..(40): n is a, c, g, or t
  misc_feature (42)..(52): n is a, c, g, or t
  misc_feature (76)..(76): n is a, c, g, or t
  misc_feature (81)..(81): n is a, c, g, or t
  misc_feature (91)..(92): n is a, c, g, or t
  misc_feature (106)..(106): n is a, c, g, or t
  misc_feature (125)..(125): n is a, c, g, or t
  misc_feature (129)..(129): n is a, c, g, or t
  misc_feature (155)..(156): n is a, c, g, or t
  misc_feature (162)..(162): n is a, c, g, or t
  misc_feature (168)..(168): n is a, c, g, or t
  misc_feature (218)..(218): n is a, c, g, or t
  misc_feature (310)..(310): n is a, c, g, or t
  misc_feature (421)..(421): n is a, c, g, or t
  misc_feature (445)..(446): n is a, c, g, or t
  misc_feature (448)..(448): n is a, c, g, or t
  misc_feature (451)..(452): n is a, c, g, or t
  misc_feature (480)..(480): n is a, c, g, or t
  misc_feature (514)..(514): n is a, c, g, or t
  misc_feature (535)..(535): n is a, c, g, or t
  misc_feature (561)..(561): n is a, c, g, or t
  misc_feature (599)..(599): n is a, c, g, or t
  misc_feature (615)..(615): n is a, c, g, or t
  misc_feature (626)..(626): n is a, c, g, or t
  misc_feature (763)..(763): n is a, c, g, or t
  misc_feature (828)..(828): n is a, c, g, or t
  misc_feature (830)..(830): n is a, c, g, or t
  misc_feature (907)..(907): n is a, c, g, or t
  misc_feature (999)..(999): n is a, c, g, or t
  misc_feature (1025)..(1025): n is a, c, g, or t
  misc_feature (1062)..(1062): n is a, c, g, or t
  misc_feature (1066)..(1066): n is a, c, g, or t
  misc_feature (1136)..(1136): n is a, c, g, or t
  misc_feature (1244)..(1244): n is a, c, g, or t
  misc_feature (1268)..(1268): n is a, c, g, or t
  misc_feature (1290)..(1290): n is a, c, g, or t
  misc_feature (1295)..(1295): n is a, c, g, or t
  misc_feature (1368)..(1368): n is a, c, g, or t
  misc_feature (1441)..(1441): n is a, c, g, or t
  misc_feature (1478)..(1478): n is a, c, g, or t
  misc_feature (1482)..(1482): n is a, c, g, or t
  misc_feature (1605)..(1605): n is a, c, g, or t
  misc_feature (1618)..(1618): n is a, c, g, or t
  misc_feature (1623)..(1623): n is a, c, g, or t
  misc_feature (1639)..(1639): n is a, c, g, or t
  misc_feature (1662)..(1662): n is a, c, g, or t
  Peptide Sequence Number=SeqID_7404
  Probeset Number=SeqID_14553
ggggttttgggggggnngtggnggggggngngngnnnntngnnnnnnnnnnnctaagaacgtacgagggatatatntagtntgtttatttnntttatgtgtatganatatatggaaataaggcgngaangcagtacatatatagtcaggtatctnnatatancgtacntgcacacgcacatcctcctacactcatatgtgtattgaagatgcgaggtnattagtgtaatcttcactcgagtatatccaacatgcaagattatatatatatatatcacgcagtaagcagaaaaccaggaccgacgagaccnacactcgaacagaacaaaagtatacataaatactctcgtgagacgagcatacgattgtgtcgggtgtgtcttcttgttcttattattatgtctatggtatatgttgtgttnatctgtgtgatgtctgtcatattnncntgnnctcttctttaaaatatcatatatgtacnattgttgaaataagatatatattatattattatngtttagataaatataactagnatatatacttataatataatgacatncatacaattaatagcaatgataatacacaaacataatngacagaagaagacganacataacaagngaagaatatattacataattattcattaatatataatcatatgtatgatgagttatactgcattaagagagatagtagaatgaatatactaggatgtaagtgtgaaataatatatgtaatatattattatgacaaantactatatggagttgagatcacacatattataacatgtgactattaacgcaatactatatatagnanacgtatcatgatatattctctatagatattacatctgtattactctctctctactcatctgtctcttatatattatnatatattgaagtgtcacccacaaccacacatactatctcacactcactctatgtaggtatatacaccactacactctgattaagtatctgcntagaggaggatcatagacgtacatgnactcacacactcaacccgtcctagcatgcgcagtcanatantatcttatacgtataacaatatatatagcatacaccagcacatcagaaactgctgcgcgcgacgcttatnctactatcactagcacacatcaatcgctacatatatctactacattgatgacatacaactacaacagataatcaacatacgatcatctactactacatgcatctatcntaatatcttatcacgatacggcanagtctactatactacgcactantctangtgctgctcgtctatgtatatcgagtgcgacagcgtcggtgctactacacagagaagaagattgcgaagatangtgatgtgattatatataactactgattgctagggatgcgacagtgtcgcgctcacacagctccctagagatntatggtgctcgtctgtcacgctgttgtgttgattatngatnatgtatgtagtatctgattgtgagctattcgtatgctcgtgtgtgagtctatgatacgatgtgtactgcttgttgataattatcaagaatagactctcgatcatatgtccacgtacagatgtntgtcatacaacangtgcntatagaactatacacntatattattatatgatactgctn

SEQ ID NO: 4775 - DNA, 486 bp, Glycine max
  misc_feature (450)..(450): n is a, c, g, or t
  misc_feature (480)..(480): n is a, c, g, or t
  Probeset Number=SeqID_14554
aattggagagatcatgaggcgatagagagagagagagagagagacgctgcctaatctcatcccgttatcttcttccttgtgcgagcttcctccagcgacaatggctttatcggtttcaaacctcgcttcttctctctcgtccctctctttctcttcccaagtttctcagggaccaaacacactttccttctcctggacgaactcgttgttctcattaccggccaaatccgctcgtcgcgcttctctctctgtaaccgccacggtagctgctcccgcggaggtagcggaggatgatacgatggagctaaagaagtacgtgaaatctaggcttccgggaggtttcgcagcacagaaaatcataggcacgggacggcgtatgtgcgccatcgctcgagttgtgctccaagaaggaaccgggaaggttattattaactatcgcgatgcaaaggngtaccttcagggcaacccattgtggcttcnatacgt

SEQ ID NO: 4776 - DNA, 1368 bp, Glycine max
  misc_feature (70)..(77): n is a, c, g, or t
  misc_feature (92)..(93): n is a, c, g, or t
  misc_feature (115)..(115): n is a, c, g, or t
  misc_feature (117)..(117): n is a, c, g, or t
  misc_feature (165)..(165): n is a, c, g, or t
  misc_feature (413)..(413): n is a, c, g, or t
  misc_feature (478)..(478): n is a, c, g, or t
  misc_feature (584)..(584): n is a, c, g, or t
  misc_feature (642)..(642): n is a, c, g, or t
  misc_feature (645)..(645): n is a, c, g, or t
  misc_feature (716)..(716): n is a, c, g, or t
  misc_feature (872)..(872): n is a, c, g, or t
  misc_feature (1001)..(1001): n is a, c, g, or t
  misc_feature (1255)..(1255): n is a, c, g, or t
  misc_feature (1271)..(1271): n is a, c, g, or t
  misc_feature (1294)..(1294): n is a, c, g, or t
  Peptide Sequence Number=SeqID_7405
  Probeset Number=SeqID_14555
tggaggccccgccggggagtggggtagaggggtgtgatcccccaccccccaccccccctccctgtggggnnnnnnnnccctcatattgttannaaaaatacgataatacttaggnanaaagtacgtctcacataataattttgttgatgttgttcgatagatcgnaagaaataatataacatctatttattggttgtgtgtgcacgcgcctctggggatctcgtgttgtggggagcgctgttctctcccgccctgccaccacccgctgaaacatccacctttctgatctttccttctattacactcccctgtgtcttagtatggagaggacgtggggtgttttttgcgggccagtcgagttcacactatggtggtgtggggcaaaaaacacaagacagagatttagaataganaaatatagtgttttagcgtagcattttttgttgttagacacgttagagaggttgtatggtatatntgttagatctgtatgaggagtagtgtgtttgatatgattgtctctatggtttgttctgtgtggttgtgtggtgtgtttctgctcgctcgcctacaattttttattngtgaggagatggttgctgtgattgtgttgttatataaaaactcggagcaatattaganaanattgaaattggtttccctaccctagcaccccccaccccgctcccacccaaaaattatgtgtatctaacacnacaaatatgatatatattatatagtgttatgttgtgtttatttatcttcaccccaaaaaaaaaacaccaccctaatggatggtggaggaagacaagtacccacacaccgccacacccccccaacatagccgtacgccctgtctcttcccctcatancatcatatttctccttgttctgattgcttaatgtagttttgagttgattaaggacaacagttgtctgtatcggtccgcgcgctcgtccctggactccggtccgtcctcacccggaccttaagcgattantcatgctgttgcttgggcgttacttgcacatacaaagcatactgctagtatatacactatcaaacttgtcgtggcgtgttgtgtgtactgcttgtttcgtctatacttcttcaactacttcagatctgtgctgtttattctgcttctcttcattggctggtcacccgcctgccgcccatatccattcgcgctctgtcgcgcgagcgaatacttgttctgtgggctttggtctgtcctcttctctctcctgtcgncttgtggcgccgtgcnctgccactgtgcatacttctgcntgccgcgacccatgcctctcgtgctgtgctggctcgttcgtctgtgtgtgtggtggtgtgaggtcggcgcgctg

SEQ ID NO: 4777 - DNA, 394 bp, Glycine max
  Peptide Sequence Number=SeqID_7081
  Probeset Number=SeqID_14556
cgctagagatcatgcactcatctatatcagtcatagaaataattcaatgaagaaggtccaagtatagatgcaattagaagacaatcactgcattgcttattcttctcaatatggaagattctcggatgtcattgctctgaagacacccaaaccttaaggacatgcgtgtgtctagctcaatgaaggcactgcagcatgcaatgcagtgcgacaaatgcaaaactatcctttctatgacaaacctatgagaattcactgtgcaaatacaaaatcagactgtattgctaaagaagaaggtacttatgtgccaaaggaaaacaagaataatcactaggataatgctgaaagaaagcggcttgttgaagaagcacaacaatctagggtggccaatggt

SEQ ID NO: 4778 - DNA, 914 bp, Glycine max
  misc_feature (1)..(1): n is a, c, g, or t
  misc_feature (26)..(26): n is a, c, g, or t
  misc_feature (32)..(33): n is a, c, g, or t
  Peptide Sequence Number=SeqID_7082
  Probeset Number=SeqID_14557
nttttttttttttttttttttttccntctctnncccttatcctccccgcccgcgacactgggtaccgggccccccctcgaatacaacttacccacgggacgctatatgccaacgctttctggagtttacgtctcttgggccgattaccggacgcctggcgggtaagctctccggtggcatgaaacaaaaactcggtctggcctgtaccctggtgggcgaaccgaaagtgttgctgctcgatgaacccggcgtcggcgttgaccctatctcacggcgcgaactgcggcagatggcgcatgagctggcgcgagaagggatgttaatcctctggagtacctcgtatctcgacgaagccgagcagtgccgtgacgtgttactgatgaacgaaggcgagttgctgtatcagggagaaccataagccctgacacaaatcatggccggacgcagctttcctgatgaccagtccacacgagggcaaccgcaaactgttgcaacgcgccttgaaactgccgcaggtcagcgacggcatgattcacgggaaaccggcacgtctgatcctcacaaaagaggccacactcacacgatattcccccacgccaacggtatgccgcgaaatccaacatcatctaaactactccccgctctctgaacatgccttccattgaattctgctgggcgggtgccaggaaccctcggaatcatcccttgggccgcaatatttaccttatcgtaataagagccccccccggcggacaccgttgaatctgacactgaaaagaacctgtaccaagtaaaatctcgcgaaattttgccccgcccatcccaattatcgtctaactctcttgccgactataaaacatcccttgcgcgccccgatcgcggcacatcccctatactttccctaaactgcgggc

SEQ ID NO: 4779 - DNA, 1344 bp, Glycine max
  misc_feature (1)..(1): n is a, c, g, or t
  misc_feature (5)..(5): n is a, c, g, or t
  misc_feature (54)..(54): n is a, c, g, or t
  misc_feature (62)..(62): n is a, c, g, or t
  misc_feature (71)..(71): n is a, c, g, or t
  misc_feature (141)..(141): n is a, c, g, or t
  misc_feature (155)..(155): n is a, c, g, or t
  misc_feature (253)..(253): n is a, c, g, or t
  misc_feature (263)..(263): n is a, c, g, or t
  misc_feature (416)..(416): n is a, c, g, or t
  misc_feature (956)..(956): n is a, c, g, or t
  misc_feature (1069)..(1069): n is a, c, g, or t
  misc_feature (1129)..(1129): n is a, c, g, or t
  misc_feature (1135)..(1135): n is a, c, g, or t
  misc_feature (1141)..(1141): n is a, c, g, or t
  misc_feature (1143)..(1143): n is a, c, g, or t
  misc_feature (1183)..(1183): n is a, c, g, or t
  misc_feature (1208)..(1208): n is a, c, g, or t
  misc_feature (1214)..(1214): n is a, c, g, or t
  misc_feature (1216)..(1216): n is a, c, g, or t
  misc_feature (1240)..(1240): n is a, c, g, or t
  misc_feature (1266)..(1267): n is a, c, g, or t
  misc_feature (1291)..(1291): n is a, c, g, or t
  misc_feature (1293)..(1293): n is a, c, g, or t
  misc_feature (1297)..(1297): n is a, c, g, or t
  misc_feature (1299)..(1299): n is a, c, g, or t
  misc_feature (1304)..(1305): n is a, c, g, or t
  misc_feature (1307)..(1307): n is a, c, g, or t
  misc_feature (1311)..(1312): n is a, c, g, or t
  misc_feature (1315)..(1316): n is a, c, g, or t
  misc_feature (1318)..(1320): n is a, c, g, or t
  misc_feature (1323)..(1324): n is a, c, g, or t
  misc_feature (1326)..(1326): n is a, c, g, or t
  Peptide Sequence Number=SeqID_7083
  Probeset Number=SeqID_14558
nctgnttcgacgtgctgttctaggactgtcactctgtatcggcggtggccatcncagatagntagatgcgncatcctacgcgcactcctacctacggagccatcacaggacgctagacagaggggcgagcgcgcggctacnacctctgtgtcacnctctcctctgcatctccattcactcaccgatcttgtcgtggccgcgtgtgtgacgcattcgtttgtcacgctgatggccgaggagtgtgccttgcgcnctcaccgagntagtctctagtgttcacgacaggtggaggatacacgatatgatggagggcgatgagtacgtccagtctcctctcgtcgtagcgcgggccgacacgtcctctctggtatgcggtgacggctcgacgtgtgctgtcctgcacgacagtatcatcnctgcatgtgtgtaatcagtacgaccgatagttggcgaagcctaagtactcactctacatgcaatggtgggcgtactacgcgacagctagcgtcctgacgggtgcgtaggtgcactgccagccggcgtgtcatctcttggcgcgtcgcgcgcgcattgccatcgtgggtgagaatcaatatcccacccactaatgaccaaatgacttagtacattctgtaatgcacctcatgcatgtggacgcgtgcagatagcgctccgccacgctcgcgccagcgggcactgcttgtgtggactattgtaatattaaccgtatggacgtccccatctgcgcaccactatcctccgccaatcaccagcggcgcggcgagcggcgatcgcgcgttcggatgagcgaaccactccctcggaacccgactattcgtacacatactctactctctcagcagcacgttcatcatagaagtgtctgctcctcccgtgtctgcgccgtccggccatccatcatcaccctagaacgactgatatattccgctacgcancactccggtctgtcgtgttatttatatcttgttgtagtgacgcatgcactcatgcgtctcgccggtcgtctctctggcggcgcgtgccggttgtgccgcccttcgcgccgatnggaccttattgtgttgtgtgtgagtgggagatgtactctattagagtattatacagccancagtancgaatnanacctaccatctaaatctcactcatgaggagtatacactcntaattctgtatattgagacgttaanatatcncntctcgtcaagtgagagggagagcntagtatctatacaacacacaacaatnnaccacacacccaaaagaaggagantntaancnaaacnnanaaannaannannnaannangcacccacacccacacca

SEQ ID NO: 4780 - DNA, 599 bp, Glycine max
  Probeset Number=SeqID_14559
ttttttttttttttttttcttttttaaattgttaaaccttttttattataattttatttaaaagaattgagcaccttggttcatatccattccgctatattgttgaggcatttgttgttgttgaggaattgtagatccataaggcatgtaacccattggagcaacaattgtttgtgcaggcatataagtagatggtacataagtgtatgcacctgcatccataccatagttatcaacactttccatttgcttcttcttagcttcttcaagtgccttttgttgttcttgtaactctttttgtgcttgatatagttcatcaactttgctagtgtactcacgtactacttgaatcatgtatggcatgctcatgtcttgaatcttgtgacgccatgccaattccatagcaacatcagctctaatcaaattgtaacaattgtacaagcatgcagcaaagcagtcttttagacccttttcaacaaagaatgtgagtaaatcctcagcaacactttgtttcttgctttgtgcagcagtttccattgcatccaagtataatgaatccttcttgctcaaactaatagaattttcccattgtttattta

SEQ ID NO: 4781 - DNA, 1484 bp, Glycine max
  misc_feature (1)..(1): n is a, c, g, or t
  misc_feature (89)..(89): n is a, c, g, or t
  misc_feature (213)..(213): n is a, c, g, or t
  misc_feature (265)..(265): n is a, c, g, or t
  misc_feature (288)..(288): n is a, c, g, or t
  misc_feature (481)..(481): n is a, c, g, or t
  misc_feature (640)..(640): n is a, c, g, or t
  misc_feature (788)..(788): n is a, c, g, or t
  misc_feature (861)..(861): n is a, c, g, or t
  misc_feature (868)..(868): n is a, c, g, or t
  misc_feature (870)..(870): n is a, c, g, or t
  misc_feature (872)..(872): n is a, c, g, or t
  misc_feature (877)..(877): n is a, c, g, or t
  misc_feature (1045)..(1045): n is a, c, g, or t
  misc_feature (1075)..(1075): n is a, c, g, or t
  misc_feature (1077)..(1077): n is a, c, g, or t
  misc_feature (1095)..(1095): n is a, c, g, or t
  misc_feature (1196)..(1196): n is a, c, g, or t
  misc_feature (1203)..(1203): n is a, c, g, or t
  misc_feature (1207)..(1207): n is a, c, g, or t
  misc_feature (1265)..(1265): n is a, c, g, or t
  misc_feature (1277)..(1277): n is a, c, g, or t
  misc_feature (1363)..(1369): n is a, c, g, or t
  misc_feature (1386)..(1386): n is a, c, g, or t
  misc_feature (1428)..(1428): n is a, c, g, or t
  misc_feature (1432)..(1432): n is a, c, g, or t
  misc_feature (1484)..(1484): n is a, c, g, or t
  Peptide Sequence Number=SeqID_7084
  Probeset Number=SeqID_14560
nttgactcgatatgatctgttcttctcgtgcgcagatactctacgtgacgagacgtatagaagcgatctctcatatacctactcgcgtnagtacgtagaatgatatacacatactatagtcacgctctctatcggcgatgtctggtagaatcagtcaacaatagttaactcttatatatcatatcgatgatcataggtttatgagcatctcancttctaattcctcaaatgtgaccactctctattaaaatcactatgctggatncgtgaatcagatataaaattagntcgaggtttatcgcactcacaagtctgtagtcacgcacgacgagggcaagccactactctcaactgcctcgtctgtgcttacatacgacattcctctaccatctcgcactccctcatcagatcggtgatccgtcattcccatcaaaacactcacaccatacagacatctatgtggactagtcacaagcagcancacaaatcctcacactacacacatacatcagcccacctcctcacagcatctcaccccgtctgactagacaagccgcgcgtcaatgagatgtacactcacacactcacacacaccgcatccacactattgatgctctctctatattatatctctcattcnccatcctcgtcacgctcatcttaccacgccaactcacggtcgctttcactatacaacggatcgagtagcattataataataccatgctcagtgagcttttgtcattatattataaggctaccttattactctctattgtttccatttnatgccctcataactatatataaataatgaaatcactattcctctcaccatattactcgcagctcctgagttgnagctaancnanattancatctctaccactgacctgaagatatcacaacatcttcccaggcctacatatctaatctgctatcaccatatctctatctttctgtctctcgctgtctagtgatacagagtgtgaggcccgcttacatgacacatacgcaggtgcaatgccatagcgtactcggagancgaatccccggtccacgacgtttgagtgtngnagtagctgtgtttgtgcntgctctgctgctcagcagctgtgcctgagagatgacgaggaggtgatagaccgactgcaactctctcctctgcgttcgccgcgtcctgtctggacgagcanggagggngtanagcagacgccgcctctcggcacagcgcagaggcagagaaaggaacgagagcggctgcnccgcgtggagcnccggccgcgccctgctgcgcgatgagtaggagaccggcgcgcagtctcgcaccaataatatgctgtgcaaacagaagataaggggnnnnnnntatatacacaaatttcnttctaatctcaccagtgtattttacgttctgctgtgttagtntttnttgttactgataactcacacaccaccataattactataaaaaataatgtttn

SEQ ID NO: 4782 - DNA, 2219 bp, Glycine max
  misc_feature (13)..(13): n is a, c, g, or t
  misc_feature (21)..(21): n is a, c, g, or t
  misc_feature (84)..(84): n is a, c, g, or t
  misc_feature (193)..(193): n is a, c, g, or t
  misc_feature (276)..(276): n is a, c, g, or t
  misc_feature (558)..(558): n is a, c, g, or t
  misc_feature (583)..(583): n is a, c, g, or t
  misc_feature (623)..(623): n is a, c, g, or t
  misc_feature (1124)..(1124): n is a, c, g, or t
  misc_feature (1147)..(1147): n is a, c, g, or t
  misc_feature (1186)..(1186): n is a, c, g, or t
  misc_feature (1268)..(1268): n is a, c, g, or t
  misc_feature (1270)..(1270): n is a, c, g, or t
  misc_feature (1272)..(1272): n is a, c, g, or t
  misc_feature (1305)..(1305): n is a, c, g, or t
  misc_feature (1316)..(1316): n is a, c, g, or t
  misc_feature (1333)..(1333): n is a, c, g, or t
  misc_feature (1340)..(1340): n is a, c, g, or t
  misc_feature (1344)..(1344): n is a, c, g, or t
  misc_feature (1364)..(1364): n is a, c, g, or t
  misc_feature (1434)..(1434): n is a, c, g, or t
  misc_feature (1444)..(1444): n is a, c, g, or t
  misc_feature (1453)..(1453): n is a, c, g, or t
  misc_feature (1456)..(1456): n is a, c, g, or t
  misc_feature (1494)..(1494): n is a, c, g, or t
  misc_feature (1533)..(1533): n is a, c, g, or t
  misc_feature (1586)..(1586): n is a, c, g, or t
  misc_feature (1624)..(1624): n is a, c, g, or t
  misc_feature (1631)..(1631): n is a, c, g, or t
  misc_feature (1633)..(1633): n is a, c, g, or t
  misc_feature (1663)..(1663): n is a, c, g, or t
  misc_feature (1665)..(1665): n is a, c, g, or t
  misc_feature (1675)..(1675): n is a, c, g, or t
  misc_feature (1679)..(1679): n is a, c, g, or t
  misc_feature (1690)..(1690): n is a, c, g, or t
  misc_feature (1707)..(1707): n is a, c, g, or t
  misc_feature (1722)..(1722): n is a, c, g, or t
  misc_feature (1742)..(1742): n is a, c, g, or t
  misc_feature (1748)..(1748): n is a, c, g, or t
  misc_feature (1751)..(1751): n is a, c, g, or t
  misc_feature (1754)..(1754): n is a, c, g, or t
  misc_feature (1812)..(1812): n is a, c, g, or t
  misc_feature (1818)..(1818): n is a, c, g, or t
  misc_feature (1837)..(1837): n is a, c, g, or t
  misc_feature (1868)..(1868): n is a, c, g, or t
  misc_feature (1873)..(1873): n is a, c, g, or t
  misc_feature (1883)..(1883): n is a, c, g, or t
  misc_feature (1919)..(1919): n is a, c, g, or t
  misc_feature (1924)..(1924): n is a, c, g, or t
  misc_feature (1927)..(1927): n is a, c, g, or t
  misc_feature (1945)..(1945): n is a, c, g, or t
  misc_feature (1959)..(1959): n is a, c, g, or t
  misc_feature (1986)..(1986): n is a, c, g, or t
  misc_feature (2028)..(2028): n is a, c, g, or t
  misc_feature (2063)..(2063): n is a, c, g, or t
  misc_feature (2069)..(2069): n is a, c, g, or t
  misc_feature (2215)..(2215): n is a, c, g, or t
  misc_feature (2219)..(2219): n is a, c, g, or t
  Probeset Number=SeqID_14561
ggttttttggttnactctttntgttgttgttgttctgctgtagggtgacgcggcgggaacctcaccacacatcaatatcgaccntacaagagtatgtcttctcactcatccaagacctgctagagagagtacataggttaaacacgcatatatcatactcagctagaaagcggcggcgccacaggcgaggccnactacactatatatgcacaaccacgatatatacacttcactcgaatgtatgtgtgttctggtttctggcctccgtccacgcgncggtctaaggcgtgccgccgggtggtctcgtttcgagctaggatgagtattcctcacgtgtactcaatgtttgcttttcacatttattcctactctgcagagttatcagaacctcacctacatctgtccgttgtctcgccgacgtccgtttggcgtggcgagcgagatcgccgtgctcggtggtttcacgtcactatacaagtatctcttcaccagcgtgcgcgtagcacgctcgctctttgtatattattataaccgacgtagatctatctcgaggagatnatataaatcgttacggcgctgatanccggcggccgacgtgcccataggacgcgcgcgtgagtgtnagagacgggcacgcggatggacgacaacacacgatacaccagatctacacagtacgacaacagataagacaggtgagcgactaccagcgacacatgtggagacagagcgtatcgtctgaggacgagtgcgacacgatgacacgctgtgttacaccatcgctacgcagttacgtaccagcatgagtattacatggagcattatgatgtgtgagtgtatgtgtgctctctgatcacgcgagagcgagtgtcgtgcaattatgaatatgagtgtatgacatcagtggatgtgaattgagtggatgtgagcgtgctcatactcacgtctgcgcagccgagctcacattgctgagtgcggcgccgacgcgcgcatgatctatcatagatgcaccgtatatcacttgcgagagatgctacgcatctacaagatctgatcgtgctgcagtggtgtagcgttgacgtgtgtacgtgtgcgcgacagcgtatgtgtcgcgacgacacgcnctgtgtctgaacgatactatgancgtataagcgtcatcagcgtagtgcgagtagcagtgatncgagtatatgtgctgaatctgcgtcacttcagtcttctcgtcatctgctgtgctagtcatgatatgctatgtacgtgacttncngntgctcgtcgtctggcgacgcggtcgacgagtgnagtgaagagtntgtcttatgtcatatgngtttaantgangtacgagcgtgaatcactanacgggatggctcgacgtatactgactgtcgcgcgggacacccgacatcgacgtattatactagtttttgnatgaactatntgatcgatnganggctcatgtcaaatatgtatgctacgtatgatctcatntagtgattatgctgtatactgtctgtgctgtctgggtgntagatcatactgagcgatgcgcacttcatgaatgaggctgatcgcggccttcntgcatgcgcgtctgcgagcgttcgggaagtggcgtgcntgtactnangatggtcgacccgtatgccacgatgctgcngntgactgactnccgntacctgacgtncgcgcacacttcgtgcngagtatatgactagncgactatgacgtgtgttgtnatgcgntgnatncgttagtgtgtagcgttcggtacattagaagctgagcatcagcgagacagcagtactntagacntctgacgctacgacatatncatccatcatgtctgctatcgaagtgatcgnatganatgatatacngtaagatatgacatgcgattacgaggcacacactgntcctnctnaactacgatgctacattnactaacgatctatnctgtaatcggaggcgatagagtcatgnctgaccgtaccgtgagcgacacgagcctagttggcagtatangagcgcggtacagtgcgacctagagtggtgagtantgtgcntttgacgcacgtgtacgagtcggcgtatgagtctacgtgtagactacgacagttgacgtatcgcagtgcgcgaacgtgtgatagagcactgatacgctacacactctctacgcgtatatgttcagctatcgcgtacgagtctgcgntcan

SEQ ID NO: 4783 - DNA, 570 bp, Glycine max
  misc_feature (406)..(406): n is a, c, g, or t
  Peptide Sequence Number=SeqID_7085
  Probeset Number=SeqID_14562
aaagaagggtagagagagagagagattgagcgcccgtcggacgtcgtgcgcggcgcagggttttgccgagattttcctaaaaaagggccatcgccaccgtaccgagaaaagaaaaggggaatacgaggcgaaaaaacacacaaactcctcctcctcatcgcctctcctcgccccctctgccctccctcatcttcctcccgttcggttgtggctccttgttccctcacgattggtgcccgggccgcgccgccatcgccatggacggcctgcacggcgcggacgcctgcttctcccccgggagggccatgtcgccgcaggtccggccccccgccggcccgccggacgtaggcagccactacttgacggagctgttgcaggagcaccagaagctcgtcccgttcacgcnggtgctaccaatctgcagcaagctgttgggccacgagataatgcgggtgtcgtccttgcttaagcaccagcatggtggggactttgagaggttgccgccgatggcgagtccaaaccagatgcatcatcatcagtcgccccaatgcctaatttctgtggaaatgg

SEQ ID NO: 4784 - DNA, 605 bp, Glycine max
  misc_feature (601)..(605): n is a, c, g, or t
  Peptide Sequence Number=SeqID_7086
  Probeset Number=SeqID_14563
ttttttttttttttttttatattgtgtctctgtaaataattgctcatcattgccttcatttcctcccataaattcattcacatctatccctgtttgatatatcattttcaatacattcttcactgctccttctcttcttttcaatacatccaactctttctgttgcttcactactaactcctttaaaccttgactaccatcttgtccccaaccagaattctttaattccataaaaaacgctctgagtttctcattttcttctcttactgcttcagcatattcttctaattctctcttttcttggacaactctttcataatcttctctctttacaaactcttcacttcctaatgcatctctcaatctttccaacattgtttcttgtgcatgtttcacattatttgctgcttccggtgcttttctttccttttcttcttcatcaaatgccagattattggtccaatttttaatctcatttattgatcctcctttgccttttaaatcttttgcatctctttgttccatacttaatgtcccttcatctgttagcaagacctctgtatcatgtgattcttcttgtacaatcccattatgattcaannnnn

SEQ ID NO: 4785 - DNA, 595 bp, Glycine max
  Probeset Number=SeqID_14564
actacaaccaaatctcacaatcaaatctcacattcacattaaccatctgatttcgttatggctcgtaccaagcaaaccgccaggaaatcaaccggaggcaaagccccgaggaagcagctcgcgaccaaagcggcgaggaaatcagctccggccaccggaggagtgaagaagccgcacaggttccgtcccggaacggtggcgttgagggagatccggaagtaccagaagagcaccgagcttctcatccgcaagctccccttccagcgtctggtccgcgagatcgctcaggatttcaagacggatctgaggttccagagcagcgctgtggctgctttacaagaggctgcagaggcttacctcgttgggttgtttgaagacacgaatctctgcgcgattcacgctaagagggttacgatcatgccgaaggatatccagctcgcgaggagaatccgtggcgaaagagcttgattggttcttcaatgagcaatctacttggtttgattaggtgtagttgctttgttaagttagtacttaaggtgttcgacgaaatatcccaagaaaagtttctcttgtttaatataagtaattttcccaa

SEQ ID NO: 4786 - DNA, 753 bp, Glycine max
  Peptide Sequence Number=SeqID_7087
  Probeset Number=SeqID_14565
ccccccaccttttgtagggttttttgggggcccttgaaaggtgttcccccgggggtaaaatttttaatatccccccggaaattttcccccgggtataccaaggcgcccctttataggaaaacccttttgggggagaggcttttctcaatcccttttaggacagggttttttttggagaggaacaagaataaatccctctgcggttttgaagggattttcccaagaaggccaggcgattgtcggtccaagaaatttttcaaacgcgcaagatttgttaaaattcccgcatttttaatttgtccccttaaaaaggggatcccttttttaatgggtaaaaccaaggctccccaaagtcttttttttttttttggggaagaatttccaaaggtccaaagggggtttttttttccggccggggttttttcccccgttgaccccttcaggaaagttttaaggggttttacccttgccaaatttgggaaattaaagcccaaaaagtttcaacccgtagaggccctccttgggtttgaaatccccgagcttttgaaaaaattcagaaatccttccggttaaaaaaaaaaaaggggccctttttttaagtaggtttccccaagttggggattttaaagtttaagtccctttttaaagggttggggggggtttccaaaaaaaaaaaaaaaaaaaaaaaaaaaaaaaaaaaaaaaaaaaaaaaaaaaaaaaaaaaaaaaaaaaaagaaaaaaaaaaaaaaaaaa

SEQ ID NO: 4787 - DNA, 2264 bp, Glycine max
  misc_feature (1)..(1): n is a, c, g, or t
  misc_feature (6)..(6): n is a, c, g, or t
  misc_feature (9)..(9): n is a, c, g, or t
  misc_feature (14)..(14): n is a, c, g, or t
  misc_feature (28)..(28): n is a, c, g, or t
  misc_feature (34)..(34): n is a, c, g, or t
  misc_feature (45)..(45): n is a, c, g, or t
  misc_feature (105)..(105): n is a, c, g, or t
  misc_feature (107)..(107): n is a, c, g, or t
  misc_feature (110)..(110): n is a, c, g, or t
  misc_feature (114)..(114): n is a, c, g, or t
  misc_feature (123)..(123): n is a, c, g, or t
  misc_feature (126)..(127): n is a, c, g, or t
  misc_feature (161)..(161): n is a, c, g, or t
  misc_feature (189)..(189): n is a, c, g, or t
  misc_feature (192)..(192): n is a, c, g, or t
  misc_feature (263)..(263): n is a, c, g, or t
  misc_feature (277)..(277): n is a, c, g, or t
  misc_feature (296)..(296): n is a, c, g, or t
  misc_feature (323)..(323): n is a, c, g, or t
  misc_feature (354)..(354): n is a, c, g, or t
  misc_feature (382)..(382): n is a, c, g, or t
  misc_feature (385)..(385): n is a, c, g, or t
  misc_feature (397)..(397): n is a, c, g, or t
  misc_feature (471)..(471): n is a, c, g, or t
  misc_feature (473)..(473): n is a, c, g, or t
  misc_feature (482)..(482): n is a, c, g, or t
  misc_feature (544)..(544): n is a, c, g, or t
  misc_feature (632)..(632): n is a, c, g, or t
  misc_feature (645)..(645): n is a, c, g, or t
  misc_feature (674)..(674): n is a, c, g, or t
  misc_feature (759)..(759): n is a, c, g, or t
  misc_feature (778)..(778): n is a, c, g, or t
  misc_feature (789)..(789): n is a, c, g, or t
  misc_feature (807)..(807): n is a, c, g, or t
  misc_feature (809)..(809): n is a, c, g, or t
  misc_feature (895)..(895): n is a, c, g, or t
  misc_feature (1009)..(1009): n is a, c, g, or t
  misc_feature (1027)..(1027): n is a, c, g, or t
  misc_feature (1066)..(1066): n is a, c, g, or t
  misc_feature (1073)..(1073): n is a, c, g, or t
  misc_feature (1081)..(1081): n is a, c, g, or t
  misc_feature (1152)..(1152): n is a, c, g, or t
  misc_feature (1228)..(1228): n is a, c, g, or t
  misc_feature (1242)..(1242): n is a, c, g, or t
  misc_feature (1284)..(1284): n is a, c, g, or t
  misc_feature (1287)..(1287): n is a, c, g, or t
  misc_feature (1349)..(1349): n is a, c, g, or t
  misc_feature (1357)..(1357): n is a, c, g, or t
  misc_feature (1366)..(1366): n is a, c, g, or t
  misc_feature (1417)..(1417): n is a, c, g, or t
  misc_feature (1430)..(1430): n is a, c, g, or t
  misc_feature (1446)..(1446): n is a, c, g, or t
  misc_feature (1465)..(1465): n is a, c, g, or t
  misc_feature (1586)..(1587): n is a, c, g, or t
  misc_feature (1619)..(1619): n is a, c, g, or t
  misc_feature (1670)..(1670): n is a, c, g, or t
  misc_feature (1674)..(1674): n is a, c, g, or t
  misc_feature (1689)..(1689): n is a, c, g, or t
  misc_feature (1691)..(1691): n is a, c, g, or t
  misc_feature (1693)..(1693): n is a, c, g, or t
  misc_feature (1710)..(1710): n is a, c, g, or t
  misc_feature (1722)..(1722): n is a, c, g, or t
  misc_feature (1724)..(1724): n is a, c, g, or t
  misc_feature (1747)..(1747): n is a, c, g, or t
  misc_feature (1767)..(1767): n is a, c, g, or t
  misc_feature (1802)..(1802): n is a, c, g, or t
  misc_feature (1809)..(1809): n is a, c, g, or t
  misc_feature (1821)..(1821): n is a, c, g, or t
  misc_feature (1829)..(1829): n is a, c, g, or t
  misc_feature (1945)..(1945): n is a, c, g, or t
  misc_feature (1947)..(1947): n is a, c, g, or t
  misc_feature (1972)..(1972): n is a, c, g, or t
  misc_feature (2021)..(2021): n is a, c, g, or t
  misc_feature (2033)..(2033): n is a, c, g, or t
  misc_feature (2036)..(2036): n is a, c, g, or t
  misc_feature (2043)..(2043): n is a, c, g, or t
  misc_feature (2062)..(2062): n is a, c, g, or t
  misc_feature (2103)..(2103): n is a, c, g, or t
  misc_feature (2122)..(2122): n is a, c, g, or t
  misc_feature (2124)..(2124): n is a, c, g, or t
  misc_feature (2150)..(2150): n is a, c, g, or t
  misc_feature (2164)..(2165): n is a, c, g, or t
  misc_feature (2167)..(2167): n is a, c, g, or t
  misc_feature (2175)..(2175): n is a, c, g, or t
  misc_feature (2212)..(2212): n is a, c, g, or t
  misc_feature (2226)..(2226): n is a, c, g, or t
  misc_feature (2228)..(2228): n is a, c, g, or t
  misc_feature (2232)..(2233): n is a, c, g, or t
  misc_feature (2235)..(2235): n is a, c, g, or t
  misc_feature (2241)..(2241): n is a, c, g, or t
  misc_feature (2255)..(2255): n is a, c, g, or t
  Peptide Sequence Number=SeqID_7088
  Probeset Number=SeqID_14566
ngtctntangtcgntcgatgctactagncgcatnacttacttcgntcgcgtcgtcatcacaggttcatctatcatgcagtcgtgatcagatagttatgcgcagtncncgntatnatacagtantanncatcccacgactgcgtcgtcacgtcgcgatgcgnctatcgtgcgcgtttatcatatagcaanccnttagcgttacccatctagtcggcagtagcaggacacggttgttgagacgtacggcggtaggactgggtcangatctcgtcgtatntaatcgcacgtggtcacgntgtgtcctatcatgcgatcatacatantatctgtctgtatcatcatctcatcacttcncgacgtcgctcgatgtgctccgcctacnacncatgtttcgctntcacatgatgattacatgactagctgcgtgatgtattactcgcgcgctgtgctcacgtactagtgtctgtgctncnccgatccantcattcactacacttattcgtcgttcgtgtcccgtatcgttcatctagtctctgttcgttcntcatctcactcttctactatacatgactgcgtatgtagatatatacacgtatagtcgtgcgttgtatgtgttgctcacgcgtgcatantgtatacattatntatcacgcagccacgctgaccatattcgnaccacgtcatctcgcagcgagcttggtcggagcatggcagcatacatacgatacacacgtggctcacacgcgccgccctacgcgntctctgctgctgtgtagtntacgcccgcancagctcgctatccttaantngctactcatacgtactcgcaatcaatctcgtgcgtgctcactgctctatcgtgcgccctacacatcgcgtcacatcttctcttganctgtcagtcgtacatctacgcgatcatcagtataatgcaggtagtcgctcgctctctctatcatcttcatacacatcgagctgcggtctacttgtatgcgttgcagcgagtcgntcatcgttatcaggtctnttgctgattagctgcactgatctcatgaatagactacgnatgaatncctatacntattctgagtcggagtgtgtcacatatcatgcttcagtctgttcgtgtactctacgacttacgtgcgcttncgcatagatcagatggctgagtgtgatgtcgtacgctgcgtcgcgtctatagtctttgtctctcatcgcatcatgncatgcgactatttntcatagtcagtgatattcatattatactctatcagtatgcgncgncagatctatatcgtactacggtacgcggcatctcgtcgctgcgctctctctatatgtcatcngcctcgtntccgtcatntctctctcgacttcgtcgcgtgtcgcgtcgtcgtcgtccctccgacgtcgncgctcggcatatncgtgatctatgcactntttatgacgcgacagtatnattcgattggatgtgtcaggacatacgcgacagccgagagcgtccagacatgtctcatatactgctagtatactcgtaccatgacattaggtatcgtcgctcgttggtggcgagatgtcgnngcgccgttgctatcgatccgctatctctcgantatgctgtcgtgctactcgtcgctgcgcagctgttgtatagtcatgatgtncatntcatcgactacgtcnancntctccgctctgctcgcntcacacatctgntncgcacgtgcacgcctgctcttcnctcgcagcgtcatcgtatcncgactgtggtgacggtgcgtgcggctacactatantataacncgacaaagtagntcacgtgnctgcaggcgtcgcgcgcgcgtgcgtcgcggcagcgctgtggcgtaactaacacagcggtcatgcgcgtgtgtctacgaccctagtatctgtcgtatcgtgcgatctactcattagntnagtgactgcagagtcgctatacgcnctgtgtcgtcgcgtgcgtctgtctgtgagagtataatataagtcgtcgntgtgtcgccctnctncacactncgtcgctcctcatctctgntgtgttggtgacctgtatctctactttctgtctgttgttcncgcgtgctcgctgggcgtngngcccgcagtcgtcgcgttgccgcggnggcatgcatactanncntacagagnagcgcacacagcgctgcgccatgctgctgagcgcgcngtgagcagcgatgntnccgnntncgtatntcgtacagagtcangcagggcgt

SEQ ID NO: 4788 - DNA, 592 bp, Glycine max
  misc_feature (181)..(181): n is a, c, g, or t
  misc_feature (254)..(254): n is a, c, g, or t
  misc_feature (274)..(274): n is a, c, g, or t
  misc_feature (282)..(282): n is a, c, g, or t
  misc_feature (288)..(288): n is a, c, g, or t
  misc_feature (319)..(321): n is a, c, g, or t
  misc_feature (325)..(325): n is a, c, g, or t
  misc_feature (327)..(327): n is a, c, g, or t
  misc_feature (331)..(331): n is a, c, g, or t
  misc_feature (335)..(335): n is a, c, g, or t
  misc_feature (341)..(341): n is a, c, g, or t
  misc_feature (348)..(349): n is a, c, g, or t
  misc_feature (353)..(353): n is a, c, g, or t
  misc_feature (355)..(356): n is a, c, g, or t
  misc_feature (361)..(362): n is a, c, g, or t
  misc_feature (365)..(365): n is a, c, g, or t
  misc_feature (368)..(368): n is a, c, g, or t
  misc_feature (371)..(373): n is a, c, g, or t
  misc_feature (376)..(376): n is a, c, g, or t
  misc_feature (378)..(379): n is a, c, g, or t
  misc_feature (385)..(385): n is a, c, g, or t
  misc_feature (387)..(387): n is a, c, g, or t
  misc_feature (393)..(393): n is a, c, g, or t
  misc_feature (399)..(400): n is a, c, g, or t
  misc_feature (403)..(403): n is a, c, g, or t
  misc_feature (410)..(410): n is a, c, g, or t
  misc_feature (414)..(415): n is a, c, g, or t
  misc_feature (418)..(419): n is a, c, g, or t
  misc_feature (422)..(422): n is a, c, g, or t
  misc_feature (425)..(426): n is a, c, g, or t
  misc_feature (428)..(428): n is a, c, g, or t
  misc_feature (435)..(435): n is a, c, g, or t
  misc_feature (441)..(441): n is a, c, g, or t
  misc_feature (450)..(450): n is a, c, g, or t
  misc_feature (454)..(454): n is a, c, g, or t
  misc_feature (456)..(456): n is a, c, g, or t
  misc_feature (462)..(463): n is a, c, g, or t
  misc_feature (481)..(481): n is a, c, g, or t
  misc_feature (484)..(484): n is a, c, g, or t
  misc_feature (492)..(492): n is a, c, g, or t
  misc_feature (498)..(498): n is a, c, g, or t
  misc_feature (502)..(502): n is a, c, g, or t
  misc_feature (507)..(507): n is a, c, g, or t
  misc_feature (510)..(511): n is a, c, g, or t
  misc_feature (518)..(518): n is a, c, g, or t
  misc_feature (523)..(523): n is a, c, g, or t
  misc_feature (526)..(526): n is a, c, g, or t
  misc_feature (530)..(531): n is a, c, g, or t
  misc_feature (534)..(534): n is a, c, g, or t
  misc_feature (541)..(542): n is a, c, g, or t
  misc_feature (545)..(545): n is a, c, g, or t
  misc_feature (547)..(547): n is a, c, g, or t
  misc_feature (551)..(553): n is a, c, g, or t
  misc_feature (557)..(557): n is a, c, g, or t
  misc_feature (561)..(561): n is a, c, g, or t
  misc_feature (563)..(566): n is a, c, g, or t
  misc_feature (572)..(572): n is a, c, g, or t
  misc_feature (577)..(577): n is a, c, g, or t
  misc_feature (580)..(580): n is a, c, g, or t
  misc_feature (582)..(583): n is a, c, g, or t
  misc_feature (587)..(587): n is a, c, g, or t
  misc_feature (590)..(590): n is a, c, g, or t
  misc_feature (592)..(592): n is a, c, g, or t
  Probeset Number=SeqID_14567
gttggtggatattacaatttggatttatctaaaaagctcacactgctgaattttctttgagatgaagctttaattactgacaaactgaggagttgtattgaagatcaaaattcaaggcatgcataaaaagtgaaggaagcaaaatacaagattgctgcagctaaggaaaaggaaaagggtnttaggcagaagttgcagaatgagatggttaaagcctgttttgtcaaaggcggttcctctacgaatggagaagnttgatgctcttcttaaaatnataaaaantgaagngggtcaagctcatgctgtggtgcttaagctnnnaggncncaantccnaaaggnaaacatnnttcntnntgctnnganaanctnnnctngnntgtatngncatcantgttcnnggngtatcgntaanntgnnttnatnntntatattnttgtgnccttatggnttantnatgtannaattatgagtttatcctngtnttgttctncgaganaatngttgntgnngctctanaaagnacntgtnntgnttactgnntcngntcgnnngatntgantnnnngccagnttganatnannatcnttngn

SEQ ID NO: 4789 - DNA, 416 bp, Glycine max
  misc_feature (170)..(170): n is a, c, g, or t
  misc_feature (183)..(183): n is a, c, g, or t
  Peptide Sequence Number=SeqID_7089
  Probeset Number=SeqID_14568
ttttttttttttttttttttttttttttttttttagtgacaaagatcacacaaaaataataataaaaaaactcttacagtagtgcgtaggtacatagtaacctaaaacattacacaccaaacaacaacctttgctggattggatccctcgttttttttatttattttaanagcctacccccanagtggtgggattggattgttcttcaagagtccttgagaaggcgctcttgatcgagacttgcgcgcgcgtgtggtggagagagagagagggttcacgaacggtgcaaatgttatagctgagagtgtagaagttggcctcacagccttcagcacaaacgcaaatcctttgaacgccagaggcgaagcacaacgaagtaagggacagctcagccgggatcctagtttagacgccgc

SEQ ID NO: 4790 - DNA, 1714 bp, Glycine max
  misc_feature (20)..(34): n is a, c, g, or t
  misc_feature (38)..(38): n is a, c, g, or t
  misc_feature (41)..(41): n is a, c, g, or t
  misc_feature (46)..(46): n is a, c, g, or t
  misc_feature (48)..(48): n is a, c, g, or t
  misc_feature (50)..(50): n is a, c, g, or t
  misc_feature (54)..(56): n is a, c, g, or t
  misc_feature (67)..(68): n is a, c, g, or t
  misc_feature (70)..(73): n is a, c, g, or t
  misc_feature (75)..(77): n is a, c, g, or t
  misc_feature (79)..(79): n is a, c, g, or t
  misc_feature (309)..(309): n is a, c, g, or t
  misc_feature (342)..(342): n is a, c, g, or t
  misc_feature (418)..(418): n is a, c, g, or t
  misc_feature (489)..(489): n is a, c, g, or t
  misc_feature (493)..(493): n is a, c, g, or t
  misc_feature (498)..(498): n is a, c, g, or t
  misc_feature (512)..(512): n is a, c, g, or t
  misc_feature (518)..(518): n is a, c, g, or t
  misc_feature (670)..(670): n is a, c, g, or t
  misc_feature (724)..(724): n is a, c, g, or t
  misc_feature (993)..(993): n is a, c, g, or t
  misc_feature (1024)..(1024): n is a, c, g, or t
  misc_feature (1124)..(1124): n is a, c, g, or t
  misc_feature (1223)..(1223): n is a, c, g, or t
  misc_feature (1251)..(1251): n is a, c, g, or t
  misc_feature (1354)..(1354): n is a, c, g, or t
  misc_feature (1485)..(1485): n is a, c, g, or t
  misc_feature (1607)..(1607): n is a, c, g, or t
  misc_feature (1657)..(1657): n is a, c, g, or t
  misc_feature (1662)..(1662): n is a, c, g, or t
  Probeset Number=SeqID_14569
cccccccacccccccccccnnnnnnnnnnnnnnnaaanaanacaanananaaannnaaacaaaaaanncnnnngnnncncctgctcctacacaaacctcacactccacaggctcctgtttttgtttccacatagtagtgtgtttttgtgttgatcatgtcctctcttacttctcgccttcaacatctacatacatcaagctaatacctagtcacatcaacgcgccacgacgcgcgccacgacttctcgctcacgcgtgactgtgtgagccacagagaagagagcagacgacaacgtccaccacactccnacttgtctaatgtgtaatcatatctattattanctcatattatattatgtgtgccttgtcttgtgtcttgttacgtatagacatcactatcatatataacctccctacncgcgtcccaactcagctcaccgcgtacagcatcagactaccacacacacatcgaagatcgcaacacagctntctntgatntcttaccctccctntacaancacctcacgcgccgataatatataatgtagatgtaagatatataactacctactactgccactcatatctatattatgcgaatatataacataccgcgcagcgcgtatccgctgcttcctccgcctcacttcactcacaccgtttgacgcangcccgcgaaacgcacacggcatgagtagctgagcatcaagcgaggaggcgattntgagatactattgtaacacatgtaactctcacacctcactctcgcgcgacacgatactacacattcatcttactatagatcaaatttgtacattctacactcgacaaccgacacctaatgatagacgcgagcgaccgtacttcggaccacgcgtctcaccctatctcctcgacctacatctacactagaatacaggtacagaaccagcactcaatcatcaggactacgatcgggatactgcagccagatagttagttttatctttgatnaacgtatcatggcagtatgtagataacatgnagatagtacaaagcacgacgacatcattatcgcatctactataacctcgtaggagtactgcgtggtgagtggagtgtgtaatatggatcagcgactgcgnatgagacacgactgagaagagaatgagatgagcaacacgatcatactcctctgacgctgagacagaagtacatcattgatccagcaccaccaccaccantcatctacacaccgatactacaggcgtntaatagatgctactgataatatctaccgtgtactataaacactacataacaagcgatagcaacactcattttggataactatctgatacatctcgctcacacntcactcactgcaccagcaaatctgaatacgacacacgacacactctacacgcaaccacatactccactctctatatcagcctcaaatacaagacatgacggatatatatgattgtcatcatgtatacgccncacatctctcactctaatgtacttccagcatctgagtctacgacatactactgtctctactgcgcgcactcactcgcacactcccgactacgctcacaacaccgcgacgcacaataaccaancactcattatatatcataccacctgcttataagcatgcgagtcacgtacncatanacccgccaactacacttctacgactcttacaccatgtatctaaatattctcg

SEQ ID NO: 4791 - DNA, 420 bp, Glycine max
  Peptide Sequence Number=SeqID_7090
  Probeset Number=SeqID_14570
gcaaaggtatttgtgagaggtcgtgtaacaagataagcctcatgaaagcctcatactccgtaaggaggttctacagtatgaacctgttcttcaatgcaacttgactttaacaaggtaggcaccagtaatttcctggtttcgattgctggcccgataatgcccgccatccctttttaggcgtcatttctactaggagccagtgagacccatgctgtattcatagtattgaggacaggaacaattatcatttagcaacaggatcatttcgtaccctagaagtcccatgtatagacaagggttatattaacttccccatctagctcatatagattgggcggtaggtctgcggggataaataatacacaccttaccacagtcagttagagcagaattcacttatttactactgcaggcatgcaa

SEQ ID NO: 4792 - DNA, 600 bp, Glycine max
  Peptide Sequence Number=SeqID_7091
  Probeset Number=SeqID_14571
atgatcaagtacccccttttcacatagtgccttttgaaggtttgtttccaagggcggaagtctttctagaagcaggagcgagtgttttatttaaggacagagggggaaatacacctcttcatgaagctcataccggtggggatagaaatatgatcaaaatgcttgaagtggcaaaagcttctcagtgggtggagttgtccaataatattcatgaaactcaagcaaccccaccagatgaaattccgaaaaagagatgtatagtttttcctttccccccatgggatgttcagaaagcggatagaaaagagggagtggtcctaacggttccccaaagcattgaagagtttataaagggggggacaaaccatttggaaattccaaacgcttcctgtattttgtcagaacaatgtggcaaaattgtttatgtgggccggtttaccaatgatgggaagctttttttagtgagtgaagcccagaatgaatgaggtgaaatgttcagcagtcccaaccccactagcgggttaatatactttttctttcctccccaaaaaaaaaaaaaaaaaaaaaaaaaaaaaaaaaaaaaaaaaaaaaaaaaaaaaa

SEQ ID NO: 4793 - DNA, 1605 bp, Glycine max
  misc_feature (7)..(18): n is a, c, g, or t
  misc_feature (21)..(35): n is a, c, g, or t
  misc_feature (61)..(61): n is a, c, g, or t
  misc_feature (76)..(76): n is a, c, g, or t
  misc_feature (88)..(89): n is a, c, g, or t
  misc_feature (148)..(148): n is a, c, g, or t
  misc_feature (174)..(174): n is a, c, g, or t
  misc_feature (217)..(219): n is a, c, g, or t
  misc_feature (221)..(222): n is a, c, g, or t
  misc_feature (232)..(232): n is a, c, g, or t
  misc_feature (252)..(252): n is a, c, g, or t
  misc_feature (278)..(278): n is a, c, g, or t
  misc_feature (390)..(390): n is a, c, g, or t
  misc_feature (492)..(492): n is a, c, g, or t
  misc_feature (505)..(505): n is a, c, g, or t
  misc_feature (573)..(573): n is a, c, g, or t
  misc_feature (627)..(627): n is a, c, g, or t
  misc_feature (729)..(729): n is a, c, g, or t
  misc_feature (740)..(740): n is a, c, g, or t
  misc_feature (878)..(878): n is a, c, g, or t
  misc_feature (908)..(908): n is a, c, g, or t
  misc_feature (1015)..(1015): n is a, c, g, or t
  misc_feature (1165)..(1165): n is a, c, g, or t
  misc_feature (1223)..(1223): n is a, c, g, or t
  misc_feature (1249)..(1249): n is a, c, g, or t
  misc_feature (1311)..(1311): n is a, c, g, or t
  misc_feature (1366)..(1366): n is a, c, g, or t
  misc_feature (1370)..(1370): n is a, c, g, or t
  misc_feature (1382)..(1382): n is a, c, g, or t
  misc_feature (1400)..(1400): n is a, c, g, or t
  misc_feature (1522)..(1522): n is a, c, g, or t
  misc_feature (1524)..(1524): n is a, c, g, or t
  misc_feature (1567)..(1567): n is a, c, g, or t
  misc_feature (1577)..(1577): n is a, c, g, or t
  Peptide Sequence Number=SeqID_7092
  Probeset Number=SeqID_14572
ttttttnnnnnnnnnnnnccnnnnnnnnnnnnnnntttcttccatccttccctaccccctncaccctcccctcacncaccttccatcnnctctacgagacgtactcactctcgtcctacattgaccacctcatcagtcactctcatcncatctcaccactcacgactatacacnactcgcagacctggcccgcgacaaactcatccacacacacaannnannaaaatgtaancactaacacgacatgatgcntatggcatgtctagtatgtaataagnctgtgtgttctgtttgctgccgcgtgtgtcgtgctagcactgttcctctgtgtggttgtgatgtctggtgtgtgtcggtcttgttcatgtgctgcagtcggatcggtaccancgcgcgtgcgccttagacgcgtctatctgtcgttgtcgtgctgagcgagggggcgcgggggccgggtggagtggtgcgagatgctgtttagttcggtattgnttgtcgtgtgcgntgtgtgtgtggttgttggggctgtgtgtgtttgttggctctggtagttctgcttgtatgtactgtctnctcttgtctatagtatgtgctcacatcgtctgcgcgctgccctcgatgtacggntgcgccactcttccgttcactatctcttcatcctgatcagtgtgaggccggtgtgcttcattatatgctgatcgcatgttgtgtgcgcagtaatgcgtggtntccgtgcggtntgccgccgctctctgagctgattccgacctacaccactgcgtttgctgcgtcgtgttctcttctactgtgtattccttgtgtgctccgttcgctgacacgcgtctctcctctcacatctactgcttgtagatcacatntagaacttatccctacttatacatctgtantgatttcgcatctcgatagcgtatgtctatattcactatatatgttgtaccgtctcacgagatgtgtggattgcgagagtctctgctgctggctgcgcgtgtgcccncacgcataatatccatgcagcgatttctattgttcctgttcgtctctcgtgatctgtgcgcgcatcgacatgtgcttctacagtcatggctgcggcatattcattcctcgctgtctgtgcgcacgcgtactacggcagcgatgccttcgngtatacacttgtacatatatacactgcattgtatgtatcacgtagttgatatgatagngtgcgtacgggtacgaggagaacatnacgcagtgatatgaagtgtgtagactgccgcgctgcgtgtgtgctggtgcgctggtgtggtngtggtcgttctatgctgtgtctgatgctgctgtcgctctgtctcaccacatatanaccnactcatatagtntatattattctgcggctnctctaccctcattcaagcgtggtcagctctgactatatacaactcgtcgaatgtagatctcccgctatcgtccttcttgctcgcgtctaccgatatatatacactgctgctctatctactangngtgtgtgtggtgtgatgttatgtgggtgtgtgcgtgtgtgtgngtgctgtgtnacatagtcttgtggagttgattgttgtg

SEQ ID NO: 4794 - DNA, 442 bp, Glycine max
  Probeset Number=SeqID_14573
gagagagttgtgtggtgaggggttcaagctgaattgcttggttgaaaatagagagatggatgtggagtcatcatcatcatcatctttggtggatgatgcttccttgagcttaagtgaagaggatttaggggagcctaggatttcaagattggggatgaatttcgagagtagggtcgatcgtgtgggagcaagtaggaccgctctgtaccaagggggtacttttaaggagcctgctagaataaaacaccggccctatgactatagcagaggtggaaatcctaggggagagggtttagaaggtttagtggcaaagcttgatggaggagagagaggccggagcttcaccacaggaaggggggctttgacggggggtggtgacccttgggggggggtgcgggaagaaatgggcggcggacaggatgtaggcggggggggggaacag

SEQ ID NO: 4795 - DNA, 852 bp, Glycine max
  misc_feature (1)..(36): n is a, c, g, or t
  misc_feature (833)..(852): n is a, c, g, or t
  Peptide Sequence Number=SeqID_7093
  Probeset Number=SeqID_14574
nnnnnnnnnnnnnnnnnnnnnnnnnnnnnnnnnnnnttttttttttttttttgagatgcagctagtactctgcgccacccagtgctaagcgactagcatgaagtggaaatttcatttggaaacatataacatgacccgggttaacaggaaggaaatttgaagccacgacaaacaacccggcctacattagagcaatttacagcctgcaaattactatataacttctcaaaacatgttcgatcgcgaattagaaattaccccaaattctacaagtgcacaaccgaaacattcacaggaatggcagtaacgcgtcgaaacttctcaaacttcgaaatgcacattcagagtattcacatgcccacaaacatcacgagataaaggtgcccaaccacaaagagagaggagcaccccacaaagcaaatagaccaagccgataagaaataaaagactttccatcagacacccacccactacgactaggtagcccaccccacaggcaacccataaatccccgaaagacactgcgcaacacaaccaggaaactcccacaaaccggggggacacgcaaccccaccccacagcgcgaaaacggccgacggcccccccgggccccccggggacgcccgccctccggcgcagcttccttcgcgaataccgatggccccgagtagaagcctgaaggcgacacgccaggcacctcgaaaggggctgccttacagccaccccagccgagccaaccagagccccgccgatctcttgccaccggctgttactcctgccctctccccctcccgaccaaccgcccccgctgcataacctagtcgtgtgttggnnnnnnnnnnnnnnnnnnnn

SEQ ID NO: 4796 - DNA, 602 bp, Glycine max
  misc_feature (602)..(602): n is a, c, g, or t
  Probeset Number=SeqID_14575
ttttttttttttttttttctttttttttttttttttttttttttttttttttttcccttttttgtttgcttgaatcaattaaattcatactgaacttaaaaatgattatatcaaatcttattgtatagataatatatcgacacattccgtccatataaactggaatatcgggagtgaaagtgacagtaacagtaaatatgtatttatcaccaattagtatgccgacagataaatacaaactcctatatataggacaaatatttacaattcttagcttctttcctaaaatcataccaaaaatctttattcgaaacttctgtatccatctcaagctctattaaagatttttctcttcttaaggtattgcataaaccacacagcagggaccctgaaacatcaaaagatagttttacatgaagtaatgcccctagctgcgcctttaaataagggtttttaaaaacggtttcttgaaattttcttgaaataccgaaatttatgtacaaaccatcttttgaaattgggtgggaaaaccttaaggaaaggcttctctccttgaaaaaattcttaaccaccaaatttttccaaaaaagttttagaaaatn

SEQ ID NO: 4797 - DNA, 429 bp, Glycine max
  misc_feature (19)..(20): n is a, c, g, or t
  misc_feature (23)..(23): n is a, c, g, or t
  misc_feature (36)..(36): n is a, c, g, or t
  misc_feature (38)..(38): n is a, c, g, or t
  misc_feature (57)..(57): n is a, c, g, or t
  misc_feature (67)..(67): n is a, c, g, or t
  misc_feature (70)..(70): n is a, c, g, or t
  misc_feature (128)..(128): n is a, c, g, or t
  misc_feature (164)..(164): n is a, c, g, or t
  misc_feature (175)..(175): n is a, c, g, or t
  misc_feature (206)..(206): n is a, c, g, or t
  misc_feature (208)..(208): n is a, c, g, or t
  misc_feature (217)..(217): n is a, c, g, or t
  misc_feature (247)..(247): n is a, c, g, or t
  misc_feature (249)..(249): n is a, c, g, or t
  misc_feature (262)..(262): n is a, c, g, or t
  misc_feature (272)..(272): n is a, c, g, or t
  misc_feature (316)..(316): n is a, c, g, or t
  misc_feature (320)..(320): n is a, c, g, or t
  misc_feature (322)..(322): n is a, c, g, or t
  misc_feature (351)..(351): n is a, c, g, or t
  misc_feature (363)..(363): n is a, c, g, or t
  misc_feature (383)..(383): n is a, c, g, or t
  misc_feature (394)..(394): n is a, c, g, or t
  misc_feature (397)..(397): n is a, c, g, or t
  misc_feature (404)..(404): n is a, c, g, or t
  Peptide Sequence Number=SeqID_7094
  Probeset Number=SeqID_14576
tttttttttttttttttannatngaagtgtttaatnanagaccataagcgatgagtnttaacagcanaanacattccctcgaattacaatgattaacactaacattacaatatcttacaacatttacnaactaaaatagcaaatgcaattgagttggtacaatntttccaacttnaagttaaattaatgtattaggaaataattgngnaaaactttnattccacaagtcacttgtaggttctgaagntnatatgtcactatnaggagacccnaatgattcatagccatagtctgacttcactgcatcagttatatnactncnaggggacaaaggctcatctttaaatgtangcatcaagtaanatgttgttgttacttcctgnacagcctcttntanaattacncaatcactctcatcttggagttgga

SEQ ID NO: 4798 - DNA, 449 bp, Glycine max
  misc_feature (51)..(51): n is a, c, g, or t
  misc_feature (65)..(65): n is a, c, g, or t
  misc_feature (67)..(67): n is a, c, g, or t
  misc_feature (199)..(199): n is a, c, g, or t
  misc_feature (318)..(318): n is a, c, g, or t
  misc_feature (340)..(340): n is a, c, g, or t
  misc_feature (407)..(407): n is a, c, g, or t
  misc_feature (410)..(410): n is a, c, g, or t
  misc_feature (425)..(425): n is a, c, g, or t
  Probeset Number=SeqID_14577
gacagcgaccgcgttaagcaagcaagcaagcttaccaacacaacacctggntgcagcgattctcngnggtccttcattgatctctctttctttcttgggcgggaaaacgaaatcgtctagggtatcgatacgttccgcaatgggagagaatggcagaggtgggggtttcggataatttgaaaggtctaatactggcgangggttctagtgcattcatcggttccagcttcatcttgaagaagaagggtcttaagcgtgctgctgcacgcggtactcgtgcaggagttggtggttatacttatctacgagagccgcttnggtgggctggcatggtaacaangataactggggagatggcaaacttggtggcttatatctatgctccggcagttctggttactcccctnggngcactaagtattatngtcagtgctgttttgtctcacttc

SEQ ID NO: 4799 - DNA, 758 bp, Glycine max
  misc_feature (174)..(175): n is a, c, g, or t
  misc_feature (244)..(244): n is a, c, g, or t
  misc_feature (252)..(252): n is a, c, g, or t
  misc_feature (299)..(299): n is a, c, g, or t
  Peptide Sequence Number=SeqID_7095
  Probeset Number=SeqID_14578
atgagagcagaagaggtgcctcttactccgttacgagttcgacccctcctctcgctcttctcttctcttctcttctcttcatagcaaagcaataatcctattagaatatggaagagagcttcgttttccagtggagcgttatcagatctctcttgtccatccttcagtggtggnngcttcatgtcactgtcatcatcgtcaacaagtggatctttcagaaatggaaattcaagtttcccttatncagttccntgtgtccactttatctggtccatcatttggagcatatgttggaattnaagttgctgaagctttaaccactgataactgttgaaccttgaaaatcgttggaaaagaactttcccagggcatttgggggtccgaattaacattggtcgggggaaagggggcccaacgaactttccagtttcttttttggggaaaaaaaagtctttccccccggccccccattggtttttcatgggataggggggaaaaaaaattttggcgggggatttggggctctcccttaaccccggggggggggggtttttctccccttgggaaaaaagtttatttttaaagtgggggggaccgggggggccctttttggggggtggggaacaccaaaaaaaaaattttttggaaaaaccttttcggtggggagaaaattgtgggcgaacaaaaccgtttattttgggggcctttttttaaaaaaaaattttgggcgccccccgcggcggtttttaggggggaga

SEQ ID NO: 4800 - DNA, 515 bp, Glycine max
  misc_feature (487)..(487): n is a, c, g, or t
  misc_feature (507)..(507): n is a, c, g, or t
  Peptide Sequence Number=SeqID_7096
  Probeset Number=SeqID_14579
ctcttctccaaaaccctagccccacatcggcgccgtaacatggcgtctcggggaggttacgacggcggctccgccacgggaggcaagatccgtaggcgccctccctcccgcgtcgcagctgcctcaccctatgcgcgcccggctgctcctactcatcctgcgtcacgcggcggtgaagggagcggctggctcgcccgtctcatctccggtggcgcatcgcgcctcctctcctctgtgtttcgcaagccgcctcctcagctcgccgcgcctacgctttcggaaccagagttggtcgacgctccttgctcgccgctgccgccgcctttagagaacgacattctagaagaagaaaacggaggagggactgctaacaatctgtctactgataatcctgaaaattctcccattgatggagatgacattctaagttcttgtttcaatggtagtatggatctagaagaattgttgaagcagaaaacctttacanaggagtgagtttgaatattngactgggt

SEQ ID NO: 4801 - DNA, 661 bp, Glycine max
  Peptide Sequence Number=SeqID_7105
  Probeset Number=SeqID_14580
ttttttttttttttttttctttttttttttttttttttttttttttttttttttttttttttttttttttttttttttggaggaaaggccgcttttaattatggggaaatttcccctcccctttgaggacggggaactaagggaatttgaagcataacaccccctttgtcaacattgaaaaatccgaagttcccccctgaggcatttgttaggttgaacaacccacaatttttggattttgggaaaaattccccttcccttccacaagggcttcaatctttgccaaaggagttaaaaaatcttctttggaggcattaccctttgacatgcttgccaaaacaattttctgctgaaaagcttgttatattaaacttgtcctgtaccaaaggggaaaaattatggcctgaagggaaagtaaaaaggttccccccttttacaaaggccccccaattccgcaaagcttaattaaaaacttaatctgacccatcaactcttattttgttgaaaaatctggggaatttaaagaatgttaaaccccgttggggggtattccggaatgagcttccagacttctcaaaatccacaaatcccgaaaaacgggatgtttatttgttccaggggggtggactaaggcgcatccctctattttctccccacacaa

SEQ ID NO: 4802 - DNA, 1568 bp, Glycine max
  misc_feature (15)..(16): n is a, c, g, or t
  misc_feature (21)..(22): n is a, c, g, or t
  misc_feature (30)..(31): n is a, c, g, or t
  misc_feature (35)..(37): n is a, c, g, or t
  misc_feature (39)..(39): n is a, c, g, or t
  misc_feature (46)..(46): n is a, c, g, or t
  misc_feature (61)..(61): n is a, c, g, or t
  misc_feature (78)..(78): n is a, c, g, or t
  misc_feature (107)..(109): n is a, c, g, or t
  misc_feature (116)..(116): n is a, c, g, or t
  misc_feature (149)..(149): n is a, c, g, or t
  misc_feature (153)..(153): n is a, c, g, or t
  misc_feature (182)..(182): n is a, c, g, or t
  misc_feature (188)..(188): n is a, c, g, or t
  misc_feature (214)..(214): n is a, c, g, or t
  misc_feature (239)..(239): n is a, c, g, or t
  misc_feature (346)..(346): n is a, c, g, or t
  misc_feature (586)..(586): n is a, c, g, or t
  misc_feature (862)..(862): n is a, c, g, or t
  misc_feature (1056)..(1056): n is a, c, g, or t
  misc_feature (1135)..(1135): n is a, c, g, or t
  misc_feature (1432)..(1432): n is a, c, g, or t
  misc_feature (1478)..(1478): n is a, c, g, or t
  misc_feature (1488)..(1488): n is a, c, g, or t
  misc_feature (1519)..(1519): n is a, c, g, or t
  misc_feature (1531)..(1531): n is a, c, g, or t
  Peptide Sequence Number=SeqID_7106
  Probeset Number=SeqID_14581
agagctttttgagtnnttgtnncacagttnntccnnnanaataacntgtgtttattattantatattatatttttaantacaatagacattatacacaagctgtggnnngcgacgntgctgggcgcgccccgcgcggaccgcggccgcnctanccaatataagcagagagagtgatcacccncgcggnggtggtaatggggtattaataactgngagaagaataaagtctatataagcnataacacactcattaccttatacaagctcttaaaacatcatacatatgcactacgtcacactaatctcgcacatatgaatcatctctctgtttactctaatatattnctgctctttgatacattatgcgtatcaacactactgcatacactatatcaacgtactacaatgatcaagccaactatactctaagtatacaactatagaaacaggaaacataatcgcgatgatatattgattgtgaagtcgaagtggaaagtgagagtttgtctgtgtttgctcacacgctctctgtgttgtttctgtcaacactcaaatatacataattaccacacccaacccccacanaaatcaaaataaacaccccaccacaacctacaaaattacaccaacgagaaaagaaacagaatgaagacattaatctaatatatttataatatatatcttctatacctactcgtgcaatgacagtgcaattagcatactcaccacaatcaacaacgccctctctgaataatgtacgcacgtgatattgcgccgacaccagcgcccgcactccgaccccccccgccccgctgaccacgcactaccacgacagtggcgcaacatgagaacacgccatancagacacaaccgattagcactcctaacaacgtccacagtcgccgctacccgcgccctcctgtggtgtcggcctcgagagacagcctacggttgattcctcctctaccgtgtctctctctcgctcgacgcgctctcattataaagaatagcacagagaggctcacaccgcgaacctcaccgccgtcgacgtacanctcaaccacttcacatcactctctatactccaattactacttgatcttatccaactcgcctgcgcgtcgcgctactctnctccgccgcctctatacgacacagcacgttgagctactaactactacctatcatcgtattgatccgtattcatatgtggctcgattgtgattgcctcgccgcgccgcgtgtgttctgtgcctcccagattcgcttgattgatgctccacccatcgtggtaacgcccttcaagcatcaattattatgatataatatagaagtgaacatcacaccagtctctctatctatatactaaatcagttcacaaatcaccatagattattatgtcacacaacctactactctagcgctagcacnatatcttgaccaaacacaactactctcacttcctctctagaccatncacttcacanactccactcattctaatactcttcatttctncctcgactcacnccttcctcacttattcgaccactttgatgtctatatt

SEQ ID NO: 4803 - DNA, 636 bp, Glycine max
  misc_feature (467)..(467): n is a, c, g, or t
  misc_feature (636)..(636): n is a, c, g, or t
  Probeset Number=SeqID_14582
cccacgcgtccgcccacgcgtccgcccacgcgtccggttttggcgacactcattaatgatgttctagatctttctcgacttgaagatggtagcctcgaattagaaaagggaaaattcaaccttcatggtgttttgggagagatcgttgaactgataaaaccaatagcatctgtgaaaaagttacctatcaccttaattctgtctcctgatctgcctactcatgccattggtgatgaaaagcgacttacacaaactcttttgaatgttgtgggtaatgctgtcaaattcactaaggagggctatgtttctataagagtatcggttgcaaaaccagaatctttacaggattggcgacctccagagttttatccagcatctagtgatggccatttctacatacgactccaggttaacgactctggatgtggcattcccccacaaaaaattcctcatctttttaccaagtntacccactctcagagtggaccacctctacctatcataggtgcaagtctttgacttgccatttgttaaaaatttattaacctcattggatgcctcgtatttatttacatttaaggtcctgacgaacaaatcatctctacatttatcatccaacttcagatctctagccan

SEQ ID NO: 4804 - DNA, 556 bp, Glycine max
  Peptide Sequence Number=SeqID_7107
  Probeset Number=SeqID_14583
gttaagtatgcttataaaagaaaccatgatagaaggaaattaagacacggcattcattaataatggaaaataagaagagaaagggaaaagacgatggggtactggaagaagaagaagaagagatgatgaacaagttttacacgctgttgcggaggttccgagacgcgcgcgatggacgacgaaaggagcttgaggaactacagaagagtgagaggaagaagaagaggagtaaagtggggacagagcaacaccatgtttgggtgccatcgtttgaattggaagatttcataaacgaggctgaattcagaggacaacaacctctgcgattcccaacttcatctgcatctccttcgccacgtggcggtggcacagacaaacaacgtaagaacgacgaccaacactctcactctctggatctcaacctctctctctagctagctagctctatatcctctttgaatccttattctctccctttttccccagaatttaatttttatcatgaaaattgtaaccaagtactttttttcttcataattaacagtttgattaattg

SEQ ID NO: 4805 - DNA, 1387 bp, Glycine max
  misc_feature (22)..(22): n is a, c, g, or t
  misc_feature (272)..(272): n is a, c, g, or t
  misc_feature (280)..(280): n is a, c, g, or t
  misc_feature (326)..(326): n is a, c, g, or t
  misc_feature (1355)..(1356): n is a, c, g, or t
  misc_feature (1366)..(1387): n is a, c, g, or t
  Probeset Number=SeqID_14584
ccccgcgcgcggtatcgttagncaatacatctctatcttagaactactcgttcgctgtacgagcactagtgggtctagacgatcagacgcctcgtgcgtcggacgatcgcactacacggcgaccacaccagcgacatgagtccccccgactcgcgacacacctccatactcatctatatctcacaatcttcgtctcgatttgagtatgctcatgcgtgtctgtctggttgtcgtgtctcgtttatatatttgtcgcatctctctctctctgngttcggcncgtcttcctcctccctctcaacgccactcatctactctctcatcanagcatctacaccttacacccatctcccctatctagtctcaatcaccacacctcacattcccacatacataatatcgctcactatactccacacaggacatcacatccatcactcattccggcctcactctatcatctactcctcatcttctttctctttcttcgtttattctatcctccccactttcacccctaccgccgtacgtgttagtagtagttccgcttgtgttcacactgcacatatgtcaaccttgtactaactttcacccctttcgcccgattcatttctcattaccctatctgattcatatcatcgtggcatattggttgtatcatcatgtgggcgattactatgccttaaacgacagaacgctctagacccgttgctttagacggtagccgtctcgcacgggtcaaccccacacgtgtgacttgcacttatgtgcgatgtgtctctcatctgttccatttattctcatctcctagtttatatttgtgattatacttctattgcacaatctcctacgactctagctatctactctcatacatcacctacctgtctcatgcagtcggctctctcaggagaggagagtatggcgactcgcacgctcgcgggggacgtgtaggcgtatttttctcttgcttcgttcgttgctatattacccatcgtgcataactccactctctcgttgccgtcctccctctccagtcttcattctttcactttctcccccacctacctcactcacatccccacattcagccatgctactctgacacacgaacctgcacacttaatacgaccccggtctaatccatgtagtagttccagttctctcttcattttctttttgtgggagaaaaatatttccttctccgctctctttctatcaaacttcgtttcctactctcaaatcactatgttacgggataaactatgtggatacacacatcctccttctcacaagggccaacgttgtcgcccctctccccctctcctactcaccctctataaccaccacccccnnttttattggnnnnnnnnnnnnnnnnnnnnnn

SEQ ID NO: 4806 - DNA, 538 bp, Glycine max
  Peptide Sequence Number=SeqID_7108
  Probeset Number=SeqID_14585
gatattcctggagatcgacagaccaatttacatcaacctcaacagggtctcttgcccgaccgttgcggacctcatcaattcattgaggacggatggcgccatgaacgcggatatcactgagttctcgagcatcagaagtgtcctacctaaggagcatgttctgagtttcgacacatgcgctggtgatctatgcggacaagggctctaggacaagaaggaggggacagatattactgatgtcgagatctaccccacatccatgacggcaaagagtcatccaaggtacagcaagtacaaggcttgtcgcttgatgtaatgcggtgacggtctccctaaggaggcccatgctgccgacgacacccccaagaccaagaggactggtgaaaatgtggagcggcgaccaactggatctgagtgtgggatcaagtaccacccagcttcggttgatcctggtggggagcttgttacgggtctggggggtggtggcttgaccagcccgaaccacgccgtttgtgaggggtaccctccgattgaccaa

SEQ ID NO: 4807 - DNA, 564 bp, Glycine max
  misc_feature (61)..(61): n is a, c, g, or t
  Peptide Sequence Number=SeqID_7109
  Probeset Number=SeqID_14586
acgaggttctggtttatagatctctgtgaagtcactttataacactcaacctaagatgcanaacgaggaaggacatatcaccaagctttacattcctaagaagtgctctgccacaaaccaattgattaccactaaagaccatacttcagttcaagttaacattgagcatgtggatgaaaatggcatctacaatggccatttctccacttttgctctctacagcttcatccatactcaaggtgatactaacaataccctagatcacttataacaaaagaaaaaagttaaagttaagcaacagtagacacccataatagtttattactttactatgtattaatttctactcttactagagatatttaagtactataattatcatcttaagcaaatactcattctaaattttcgttaatatttgataccaccaactaaatttacttttttaacaatttaccaatacattaataaatatgtagttatcttatatttcaatcaaacaagctaaagaggggggggctgtgcggggtgggaggtggtgaggagagagagagaaagaacctc

SEQ ID NO: 4808 - DNA, 2250 bp, Glycine max
  misc_feature (1)..(1): n is a, c, g, or t
  misc_feature (9)..(9): n is a, c, g, or t
  misc_feature (18)..(18): n is a, c, g, or t
  misc_feature (27)..(27): n is a, c, g, or t
  misc_feature (54)..(54): n is a, c, g, or t
  misc_feature (65)..(65): n is a, c, g, or t
  misc_feature (69)..(70): n is a, c, g, or t
  misc_feature (78)..(78): n is a, c, g, or t
  misc_feature (86)..(86): n is a, c, g, or t
  misc_feature (109)..(109): n is a, c, g, or t
  misc_feature (118)..(119): n is a, c, g, or t
  misc_feature (122)..(122): n is a, c, g, or t
  misc_feature (127)..(127): n is a, c, g, or t
  misc_feature (140)..(141): n is a, c, g, or t
  misc_feature (147)..(147): n is a, c, g, or t
  misc_feature (174)..(174): n is a, c, g, or t
  misc_feature (177)..(177): n is a, c, g, or t
  misc_feature (189)..(189): n is a, c, g, or t
  misc_feature (191)..(191): n is a, c, g, or t
  misc_feature (201)..(202): n is a, c, g, or t
  misc_feature (210)..(210): n is a, c, g, or t
  misc_feature (215)..(215): n is a, c, g, or t
  misc_feature (223)..(223): n is a, c, g, or t
  misc_feature (247)..(247): n is a, c, g, or t
  misc_feature (270)..(270): n is a, c, g, or t
  misc_feature (285)..(285): n is a, c, g, or t
  misc_feature (288)..(288): n is a, c, g, or t
  misc_feature (309)..(309): n is a, c, g, or t
  misc_feature (312)..(312): n is a, c, g, or t
  misc_feature (314)..(314): n is a, c, g, or t
  misc_feature (317)..(317): n is a, c, g, or t
  misc_feature (319)..(319): n is a, c, g, or t
  misc_feature (323)..(323): n is a, c, g, or t
  misc_feature (329)..(329): n is a, c, g, or t
  misc_feature (341)..(341): n is a, c, g, or t
  misc_feature (368)..(368): n is a, c, g, or t
  misc_feature (380)..(380): n is a, c, g, or t
  misc_feature (394)..(395): n is a, c, g, or t
  misc_feature (401)..(401): n is a, c, g, or t
  misc_feature (407)..(407): n is a, c, g, or t
  misc_feature (469)..(469): n is a, c, g, or t
  misc_feature (475)..(475): n is a, c, g, or t
  misc_feature (482)..(482): n is a, c, g, or t
  misc_feature (489)..(489): n is a, c, g, or t
  misc_feature (499)..(499): n is a, c, g, or t
  misc_feature (504)..(504): n is a, c, g, or t
  misc_feature (537)..(537): n is a, c, g, or t
  misc_feature (554)..(554): n is a, c, g, or t
  misc_feature (563)..(563): n is a, c, g, or t
  misc_feature (581)..(581): n is a, c, g, or t
  misc_feature (590)..(590): n is a, c, g, or t
  misc_feature (613)..(613): n is a, c, g, or t
  misc_feature (617)..(617): n is a, c, g, or t
  misc_feature (639)..(639): n is a, c, g, or t
  misc_feature (648)..(648): n is a, c, g, or t
  misc_feature (703)..(703): n is a, c, g, or t
  misc_feature (724)..(724): n is a, c, g, or t
  misc_feature (758)..(758): n is a, c, g, or t
  misc_feature (788)..(788): n is a, c, g, or t
  misc_feature (840)..(840): n is a, c, g, or t
  misc_feature (845)..(845): n is a, c, g, or t
  misc_feature (849)..(849): n is a, c, g, or t
  misc_feature (875)..(875): n is a, c, g, or t
  misc_feature (923)..(923): n is a, c, g, or t
  misc_feature (928)..(928): n is a, c, g, or t
  misc_feature (949)..(949): n is a, c, g, or t
  misc_feature (952)..(952): n is a, c, g, or t
  misc_feature (1024)..(1024): n is a, c, g, or t
  misc_feature (1107)..(1107): n is a, c, g, or t
  misc_feature (1166)..(1166): n is a, c, g, or t
  misc_feature (1228)..(1228): n is a, c, g, or t
  misc_feature (1246)..(1246): n is a, c, g, or t
  misc_feature (1338)..(1338): n is a, c, g, or t
  misc_feature (1341)..(1341): n is a, c, g, or t
  misc_feature (1440)..(1440): n is a, c, g, or t
  misc_feature (1659)..(1659): n is a, c, g, or t
  misc_feature (1900)..(1900): n is a, c, g, or t
  misc_feature (2041)..(2041): n is a, c, g, or t
  misc_feature (2087)..(2087): n is a, c, g, or t
  Peptide Sequence Number=SeqID_7110
  Probeset Number=SeqID_14587
ncgtcggcntccgcactncgtctagcnatcagccaaacatactgagtcagtcgntcattgattantatnnatactgcntcgttgangagtacgacgagaagtacgatgnatgagtagnntangacantcagtgatcaatnntcggcnggtgccgctgtcgtagaccgccagcangcncgtcagccagancnactgagtacnngtgttgantcgtncaaatcancaattttcgatcgtcgtccccagncgcccgccgccgccccggacgtncggcgatcaagtatncangactgccgcatcgagtctgcnatnantantngctntcccgncgtcgtgctgcntgatcatatgccgacgtccggcacgcngatcgtttcgangttatgagtcatgnngttctnctgctnatattcagcatgattacatcgccagcgccgcgacgatgacgtcatcggcgtctgcagcgtantattantatttangtattantcgatcgtcngagantcgcgatgagtacagttcgagtcacgtcatcgnacgcacagtcaatttgntattatgancaaacatcgagatttcantattaaatnttgtttatagtagatatatgtantacngctagcgcgcgtccgccccgtntgtgatgcngcgacgcgattatatattgtcagctcacgtaccagtgtgtagtacttatacgcancgcagcgcgcgcacgcgtcgntttatatcactatcactgcgcgcgccccgacgcntttaatatatatatatttttcgaatgacantctatctactcgtcgcgtctttcgtctctgtcagcattggtctgacgcagtnatatntatnatagtccgtgtcgtgtacgtgctgcngctgctcaggagactacacgctcgtgtcgtcagcgtactgatatcatngcgtngcagtcattatactgtcacanccnatacgagcgtcatgtcgcgtctcagatatcgtagaataatatttacgtacagagtgcatcatatatggcgtntccagatacactgcagtgcatagtgtacaatacgaaaaccgacttcgcgtgcatactcacgactatcacacaccagggcgcgntgatatgctgcaccagacgacattcagcgcgtggcgggcaatgtctttgaacaacatcnatttactcatgtatagtatatgattgcttatgtcattgtctcgcgacgtatccactctcctntgatctctacgtgtttanatgggtcgcgacacacgcttgtagttcgtctgctcacatcatcactgtgtgtgtgtcgcgataagtatattgcggcgcgctgtttctatctnatnatgcccgccgcacgcagcaacgttatgttatatatatatggcgccgcggcggcgcgacccctttcatatacacatagttcatctcagcacacatactcntataaggcggcggtgcggcagagacggaatacagagaagcgcttacacttatgagctgcgcccttcacatggagttacttgcgtatcgcgggcggtcggtatatacttgatatattgttgtgtcgcgcgctgccggcgcttcgttttcacggtcgctaatacattcctacacccatcgccggctcgttgtttacaccacacgctctttgtcgcgttttntatttagggcggcgcgcggcgtgcgcggccccgcgccgcccgcggcgttcataatatacaccggcccgcgatctccgcacactcacaataccatatcgggcgagcacgcgcgattactctacaaaaagtagccgcgggcgatgagctatcgaatatttgtataatattatagtgagtgcgtattataaactggcgcgtagacgatggcgcagcatatatatttataagataattaagcggngcgccactaatacatatctatggctgccgctgagtatattagtgtaggatatacacacacgcgccgcggggcggcatacacgcgtctagatcgcgtgcttgtgtatgtgggcggctctctcgggtcctcacgcaatacctnttcaccacaactcatcaagtcgcgacaccgcagcgcagatataggnttctcaatcaaatatgggtatataccacacggggcgaagcgcggcacgcacataaacgtacaccgctatcctggcgagcgcggcgggttgtctgcgaggggcgagataatggcggagggtcacataaacggtagctgttgcgcatatttgcggggggcctcac

SEQ ID NO: 4809 - DNA, 967 bp, Glycine max
  Probeset Number=SeqID_14588
acacaaagtcacaagctcaacgtcggtcactgttgaggaagctagctagcttgccaggcatccgccatggccgccccgcatggcaccgtgctcgggggagccgactcgttctcccagctcccgctcgtccgagtcgccgcccagcagccggccgactccaccatccgcctcttcggctgcgacttctccaacgacgccgtcgctgccggcgaccagctgcccaaggcggacgccgcggcggcggccggggagggggagacccgcaagttcgagtgccactactgctgccgcaacttcccgacgtcgcaggcgctgggaggacaccagaacgcgcacaagcgggagcggcagcacgcgcgccgggcgcacctcgaggcctccctcgccgccgcctacctcccggccggcgcgcacgtctacggtgccctgttcggcggctatggccaccaccaggccgctccgatgccgccgccgcagtacccggtgtggccggggatgtacggcagcgtggcgcggtccgcggcatacggcggcatgaccgtgccggggatggtgtggaggccgacgccagtgggtgctgatgcttttggtgccgccggccggcacgatgaagcgacggcggccgttgctggcaccggagaggtgcctggtaagggtgggcacaatgcggtgatgagcgtggtggcgacgctgccgtcgtgcctcaccggcgggtcgcccacggagatcggtaggtccgaaatgatggggcagaaggagggcgttgtaagcttggacctctgtctgtagttcgttgcaattactgtcgatctaggtgttatctttaccggaattgttcaggtcaatcaccatgtttagtcttatataattactgttaccatctgtaaccgagggcgttcatttgtttttaaaattagaatgcatattaagttggcatgcatttaatttgaataatgtgtactcctac

SEQ ID NO: 4810 - DNA, 355 bp, Glycine max
  Peptide Sequence Number=SeqID_7111
  Probeset Number=SeqID_14589
ttcttcttcttccagttccaacccctggtggagatccatggccaccttcaccatatctaaacctgacgttaatgacggaactatgggactcgtggatcacgggaagaccacgcttactgcagcaatcaccagtgtgcttgcggatgaagggaaagctaatactgttgccttcgatgagatcgattacgctcctgaagagaggaacagaggaatcactatagcaaccgcacatagggagtatgagactgcgaaaagagattatgcacatgtggactgccctggacacgcggattattttagaaatatgattacagtagctgcccagatgattgaggtatacttaggagttccggcc

SEQ ID NO: 4811 - DNA, 982 bp, Glycine max
  misc_feature (1)..(1): n is a, c, g, or t
  Peptide Sequence Number=SeqID_7112
  Probeset Number=SeqID_14590
nttccccctcccgttccaactttattgtgtttaacaataatgtggatgaggatggattggtttcacagctgaaagtgatatgcccggactcccttccagagcttgtttccattgggtcagagaactctgggattgtgccctttctcagaaatctagaaacattgcaagtaatcagctgtttcagttcaataaatctggtaccatgcacagtgtctttttccaatctgacatatttgaaagtagaaagttgcaagagtctgctatatttgttcacatcctcaacagcaagaagtttgggtcaactcaaaacaatgaagataagttggtgtgattcaattgaagagatagtgtcttcaacagaggaaggggatgaatcagatgagaatgagataatatttcagcagctcaattgtttgaaacttataagattaggaaagctgagaaggttctacaaagggagtttaagtttcccgtccttggaggaattcacagtatggcgttgcgagaggatggaaagtttgtgtgcaggtacagtcaaaacagacaagctgttacaagtgaatattagtttgggcggagatgttatcccattggaaactgatctcaactctgccatgcaaaaccgataggcatttctggccagggcaatgactccaatattagagttagaggagatggattcaataaaaagaaaatggttagaggagatcaacaaattaagtggcccggtgcctaccaaaaaaaaaaaaaaaaggggcccagttttattatatttgtttgtttgtgaataaaaaaacgagtgtgcgtgtggtctatacagttagtggtgaaatacatggttctattctatttattatgtaatgtgtgtgattataagtcttaaacgaccctggagaataaaaatgaagtgatgaactgtaagttggtaacactaaaacttgactctatggttttatgacaaaataaaataaaaatgtgtcct

SEQ ID NO: 4812 - DNA, 1625 bp, Glycine max
  misc_feature (1)..(1): n is a, c, g, or t
  misc_feature (109)..(109): n is a, c, g, or t
  misc_feature (170)..(170): n is a, c, g, or t
  misc_feature (223)..(223): n is a, c, g, or t
  misc_feature (307)..(307): n is a, c, g, or t
  misc_feature (311)..(311): n is a, c, g, or t
  misc_feature (323)..(323): n is a, c, g, or t
  misc_feature (338)..(338): n is a, c, g, or t
  misc_feature (404)..(404): n is a, c, g, or t
  misc_feature (454)..(454): n is a, c, g, or t
  misc_feature (552)..(552): n is a, c, g, or t
  misc_feature (583)..(583): n is a, c, g, or t
  misc_feature (671)..(671): n is a, c, g, or t
  misc_feature (689)..(689): n is a, c, g, or t
  misc_feature (914)..(914): n is a, c, g, or t
  misc_feature (1051)..(1051): n is a, c, g, or t
  misc_feature (1062)..(1062): n is a, c, g, or t
  misc_feature (1210)..(1210): n is a, c, g, or t
  misc_feature (1278)..(1278): n is a, c, g, or t
  misc_feature (1452)..(1452): n is a, c, g, or t
  misc_feature (1465)..(1465): n is a, c, g, or t
  misc_feature (1469)..(1469): n is a, c, g, or t
  misc_feature (1479)..(1479): n is a, c, g, or t
  misc_feature (1494)..(1494): n is a, c, g, or t
  misc_feature (1500)..(1500): n is a, c, g, or t
  misc_feature (1588)..(1588): n is a, c, g, or t
  misc_feature (1602)..(1604): n is a, c, g, or t
  misc_feature (1610)..(1610): n is a, c, g, or t
  Peptide Sequence Number=SeqID_7113
  Probeset Number=SeqID_14591
nagacgagaagatcatgaatggtagcgcatgtacgtgtaaggtgcgtgcgcgtacgacagatcgtctgcatatgtacagtatctcgtgtcgagtgtagtcagagattantgtcttatcagtgcgtgtgtgacttagagcgctacagaagagagtaggtgagagtgtaggnatgggggcgtcgtgtgagaatgaatgtggtgtgtcggtaggagtgcacctagnaagatgaggtgatatgtgcgcgtcgcgagaagagcgcgagatagtgctgagatagatgtcgagtcgcgtgtggatatagcagangagnaaacggtatctngagcgtgcgtactgntctgtctgtagtacgcgttgtgtctcacagtgtcgacttcgccttattagtgcgcgtatgtagtgntattgtaaggttgtgtcgtaggataagtcagatcagcgtgagatagtgtntctagcgcgtgcgcgtggggggcgcttactatcatgatagtagcgcaggtgtgatgtgacctgacgtatagagagggagattgatgtgtgtgttaagntatgatcggtcgtctcggcgaactcgtaagnatgtctggatggctcacaagagatctgctataatagagaactacctaaagaagtgtgctaagagagtcgtcgtataagagagccgtanttatcttctcaatgttgnaacagtaacatacagctgttgtcgcacttcaatatatctctacctaataaactgatagcgagtgcggagagcgagaaagaacacaaagcgcgtgtgatcgggagcgcatcatatgaccagacgggttgtataagagatatatcttgaatgctcgtcgtagtgaagagatagtctagcccggcctattagcggcgcacaacttgcgtgcgtctctactgtcgcganacgaactatttgcactccgcttccctcccacatccaacgaaagattgctaggtatagtgtattggtcgtgcgcggaagacgcgtcgtgcctaagaactatcgtggagggtctcacccggattcgcacacagtacggnacgtgtgcttnacgcatggcgcagagagagagttcgattactggatttctagttcatagtgactagggtcacaggtggtggagagtgcgaattgttcggaggtagttgatcaagtagatcgttataggatgacgcgcgatagtcatactttatgttgtntgcgctgttgtctatattgggtgtagattcgtgtcgatgatcgagacattgtgtttgccgcttcatcntcctggttcgtctatcattaaaatgaatcattacatatatactatcaccttccgtgtgagaggtatgtgtgtgaactccgggagagatggcgtggcggtgggtggcgtatatggggaataatgacgacacacgagtgttgagtggtgtggcagtagagatgcagtgtgtgcgtntgtgggtgagtgnttgnttcagtgggngtccgcggggcacanatccanccggggggggtgtggtttataatacatatacaacaatatatgtgtgcggtgtgatgggtgtgtgaggagtggtgtgtgctgttgtatnagttttataatatnnnattacnaattctacaattaat

SEQ ID NO: 4813 - DNA, 278 bp, Glycine max
  Peptide Sequence Number=SeqID_7114
  Probeset Number=SeqID_14592
ataaaatcccaccacttgtcttaccataccttcatcacatctctctctctcccccccccgccctctcaattttgtgagattatttcctttttaggctttctcccctttaaagctctcttagggttaggtgaatctctgtcgtacgtctccccttgtaaggaagctttactacgttttgatgacaaataatctttgaactttttgaagcaagtcatcagtttttcaagtttagggtttgtcgaattttaatctctttgtaaccaaaaaaaaaaaaaaaa

SEQ ID NO: 4814 - DNA, 346 bp, Glycine max
  misc_feature (292)..(297): n is a, c, g, or t
  Probeset Number=SeqID_14593
atgaatgctccaaatcattacgagcgtttcgtcgtcctgaaggcaccgaccagcgctcttatgaaagggacacgaaaatcatcatatgcgacatccttccccatcgagagataagagcacactatcgcgcatctgcccttccggccgatgcacagagaccccaatgtcttatttgccgaatacaagcttcttcatcctcttcaatacaaaattattgtcagggtttgcgatatggatgctatgttatcttctgtgttttctggatattgtgcaccttatagccccgctaagnnnnnnatacaggtctgtatatggtgatggcttgatttggtttatacaacaaatt

SEQ ID NO: 4815 - DNA, 1784 bp, Glycine max
  misc_feature (16)..(19): n is a, c, g, or t
  misc_feature (25)..(26): n is a, c, g, or t
  misc_feature (31)..(32): n is a, c, g, or t
  misc_feature (34)..(41): n is a, c, g, or t
  misc_feature (43)..(49): n is a, c, g, or t
  misc_feature (52)..(53): n is a, c, g, or t
  misc_feature (61)..(61): n is a, c, g, or t
  misc_feature (63)..(63): n is a, c, g, or t
  misc_feature (66)..(66): n is a, c, g, or t
  misc_feature (68)..(71): n is a, c, g, or t
  misc_feature (73)..(74): n is a, c, g, or t
  misc_feature (77)..(79): n is a, c, g, or t
  misc_feature (84)..(84): n is a, c, g, or t
  misc_feature (100)..(102): n is a, c, g, or t
  misc_feature (111)..(111): n is a, c, g, or t
  misc_feature (120)..(120): n is a, c, g, or t
  misc_feature (136)..(138): n is a, c, g, or t
  misc_feature (197)..(197): n is a, c, g, or t
  misc_feature (313)..(313): n is a, c, g, or t
  misc_feature (376)..(376): n is a, c, g, or t
  misc_feature (412)..(412): n is a, c, g, or t
  misc_feature (536)..(536): n is a, c, g, or t
  misc_feature (590)..(590): n is a, c, g, or t
  misc_feature (651)..(651): n is a, c, g, or t
  misc_feature (695)..(695): n is a, c, g, or t
  misc_feature (710)..(710): n is a, c, g, or t
  misc_feature (740)..(740): n is a, c, g, or t
  misc_feature (779)..(779): n is a, c, g, or t
  misc_feature (866)..(866): n is a, c, g, or t
  misc_feature (872)..(872): n is a, c, g, or t
  misc_feature (902)..(903): n is a, c, g, or t
  misc_feature (908)..(909): n is a, c, g, or t
  misc_feature (925)..(925): n is a, c, g, or t
  misc_feature (942)..(942): n is a, c, g, or t
  misc_feature (976)..(976): n is a, c, g, or t
  misc_feature (1000)..(1000): n is a, c, g, or t
  misc_feature (1017)..(1017): n is a, c, g, or t
  misc_feature (1049)..(1049): n is a, c, g, or t
  misc_feature (1109)..(1109): n is a, c, g, or t
  misc_feature (1113)..(1113): n is a, c, g, or t
  misc_feature (1122)..(1122): n is a, c, g, or t
  misc_feature (1131)..(1131): n is a, c, g, or t
  misc_feature (1138)..(1138): n is a, c, g, or t
  misc_feature (1164)..(1164): n is a, c, g, or t
  misc_feature (1167)..(1167): n is a, c, g, or t
  misc_feature (1173)..(1173): n is a, c, g, or t
  misc_feature (1175)..(1175): n is a, c, g, or t
  misc_feature (1206)..(1206): n is a, c, g, or t
  misc_feature (1212)..(1212): n is a, c, g, or t
  misc_feature (1218)..(1218): n is a, c, g, or t
  misc_feature (1224)..(1224): n is a, c, g, or t
  misc_feature (1226)..(1226): n is a, c, g, or t
  misc_feature (1228)..(1228): n is a, c, g, or t
  misc_feature (1230)..(1230): n is a, c, g, or t
  misc_feature (1255)..(1255): n is a, c, g, or t
  misc_feature (1268)..(1268): n is a, c, g, or t
  misc_feature (1272)..(1272): n is a, c, g, or t
  misc_feature (1328)..(1328): n is a, c, g, or t
  misc_feature (1335)..(1336): n is a, c, g, or t
  misc_feature (1338)..(1338): n is a, c, g, or t
  misc_feature (1353)..(1353): n is a, c, g, or t
  misc_feature (1365)..(1365): n is a, c, g, or t
  misc_feature (1411)..(1411): n is a, c, g, or t
  misc_feature (1417)..(1417): n is a, c, g, or t
  misc_feature (1437)..(1437): n is a, c, g, or t
  misc_feature (1439)..(1439): n is a, c, g, or t
  misc_feature (1442)..(1442): n is a, c, g, or t
  misc_feature (1472)..(1472): n is a, c, g, or t
  misc_feature (1484)..(1484): n is a, c, g, or t
  misc_feature (1489)..(1490): n is a, c, g, or t
  misc_feature (1510)..(1510): n is a, c, g, or t
  misc_feature (1528)..(1528): n is a, c, g, or t
  misc_feature (1533)..(1533): n is a, c, g, or t
  misc_feature (1542)..(1542): n is a, c, g, or t
  misc_feature (1548)..(1548): n is a, c, g, or t
  misc_feature (1581)..(1581): n is a, c, g, or t
  misc_feature (1590)..(1591): n is a, c, g, or t
  misc_feature (1606)..(1606): n is a, c, g, or t
  misc_feature (1620)..(1620): n is a, c, g, or t
  misc_feature (1659)..(1659): n is a, c, g, or t
  misc_feature (1671)..(1671): n is a, c, g, or t
  misc_feature (1688)..(1690): n is a, c, g, or t
  misc_feature (1693)..(1693): n is a, c, g, or t
  misc_feature (1740)..(1740): n is a, c, g, or t
  misc_feature (1764)..(1764): n is a, c, g, or t
  Peptide Sequence Number=SeqID_7115
  Probeset Number=SeqID_14594
cccccccccccccccnnnncccccnnccccnncnnnnnnnncnnnnnnnccnngtcgtggngnganannnnanntannngtggngtcggtcaaccccccnnnccccaccgngtacacctnctatcgtcctcgatgnnnactctgtgagcacagatagtcggagaacaagtacttctcttctaatatcataatgattntggtatcactctacacgcgtggtactgtgcgacgagaaacaataagacaaatactatatcttcttaatatatatattattcctcgtctctctctgctctaactccgtaccacgtgnagagctcgcgcagcgcgaacgccgcgccggggaagcgcgcggcgcgcccgctcgtaccgactngatcgcgagtgctctctctgacctctaaaacttaangtggtcggtctgctcgtcgacttgtgtccgcggtgttgtgtagaagatgcactctgcatcctgacttctcgctaccagatgtcttacttcttaccgcaccaacaacacttatcgacgtcacgtncgcaatacagtttggtgtattataaatatatgttcacgatgtgtgttatgagcngtgtgtgtgagttctctctttctcattctgtgcgcgtttcctatgtcaatatgactcatgnctactgccgcgcgcgctctcgcggctctgctgtcttcggtcgcngcatcactggacacnccacagcctcgttacgcgctcgcgaccganagctatcgtgtgatctaatttgatcgtctactctagtanatattattacgccgtatactcctgatatctagtcttgtgtttgtctactgtgatgatatgtgtgctcgttatatatatatataatantcggtnatatgaatcgaggaatgtgatggatagagnngaaanngacgtgacgatgattngtggactgtgttgcctntgctcttggtgtacgcgcttactcgcgccgcgcnatgtgcttcgctccttctctctancagtagtgtgtcttccngtctgtgattctctactctctatacttatganatgatgagaagtgatgttagtagtgattgtgtcgtttttggatctcctccacctccctcntcantcgctgtgncgactattnctcgtcnctgctcgctgccgcttatatatctanacnacgagncnacggatatgcacatcgctctacatatcacangcgcgngccgtntcaccncncncnctttactatcacaacctcatctcgntgatgacaggtgngggngatgcgtaaggacagtatattacggtatggctcgtaccagaacatatactatcagngaggggnngngcggcccacatctcncactcgcatacncaacgctacactctgctgcgctcttcatctgcgctataatgagctnatgtgngatagcagttatctacttantntgnggcgtctgtacgacgtacagtacacgctgnagatcgcaaganattcnnctactacatattctgcatantctttactatctctggangaggnaggagaccngtgagnctatggatgcattaaactgtggagatattctantatcgcacnnattccctgtacgacntcgatagtaattgntgagatatggtaggagtagcgagctgagttgtcgactcncagtatacacanatcaatgatataaggtnnncgngtgctgtcatgatactcagttctcctatgctctctcatatcgctatnctcactgagtctcgtcgctgtacnattatgatgcattatagtag

SEQ ID NO: 4816 - DNA, 1176 bp, Glycine max
  Probeset Number=SeqID_14595
attttttacataatcgtaacaactacttgatcaaagaaaatgctgtcacgtctcttaaaatcccaaatcatcaagtcttcttacgtcaccgccactcaaagaacttttgcttcaacccaccacaaccgtgttgtccctgatgatagaaacgatgccacttctcaatttttcgaaagtgttacctccactttgaagggtatcactcacgtcaactacatcgtcgaacacgataccagtctctctgaagctgccaagggaaagatgaagagattcctcatctacagatacgatccttctgatgagaacgacactcccaaatacgtcagctactatgttcctattgatgagattgcccctatgtacttggatgctttattctatgttaagaatatcctcgatcccaccctctctttcagaagatcctgcagagaaggtatctgcggttcttgctcaatgaactgcgatggtcttcacactcttgcctgcatcaagcccattgacagagatctttccaagccctctattatcacccctcttggtcacatgtttgtcctcagagatcttgtcgttgatatgaccaacttctacacacaatacaagtctattgacccttatcttaagagaaagacccccaaggaagatcccaacatcgaatatctccaaagccccgaagacagaaagaagctcgatggtatgtacgaatgcgtcctttgcgcttgttgctcaacttcttgccccagctactggtggcatcccgataagtacctcggccctgctgtccttatgcaagctatgagatgggtcagtgactctagagatgagtttactcaagaaagaattgaagctttgactgaagatattaagcttgaagattgccaaaacatcggaatgtgcagtgttacttgccctaagggtttggaccccagatctgctcttcaagacttgttgaaacttgccaaggaatataaaaacgagaaaatcgctgctgaagctctttaaagaggtaatgatgatggtgatgagcaagcagaatttactagtagttacataaataaaattaagattgaacacattttggataaatactaacctaatatgtaagaaatctatctcattcatactctatttatccatataaaataagttgcttttcatttaatcattatgaagaatttt

SEQ ID NO: 4817 - DNA, 1686 bp, Glycine max
  misc_feature (137)..(137): n is a, c, g, or t
  misc_feature (226)..(226): n is a, c, g, or t
  misc_feature (542)..(542): n is a, c, g, or t
  misc_feature (548)..(548): n is a, c, g, or t
  misc_feature (683)..(683): n is a, c, g, or t
  misc_feature (813)..(813): n is a, c, g, or t
  misc_feature (1009)..(1009): n is a, c, g, or t
  misc_feature (1062)..(1062): n is a, c, g, or t
  misc_feature (1350)..(1350): n is a, c, g, or t
  misc_feature (1412)..(1412): n is a, c, g, or t
  misc_feature (1540)..(1540): n is a, c, g, or t
  misc_feature (1645)..(1645): n is a, c, g, or t
  misc_feature (1667)..(1668): n is a, c, g, or t
  Peptide Sequence Number=SeqID_7116
  Probeset Number=SeqID_14596
cagtgatgcgcagtgagtgaagtctgttgtgtgcactgtcgcagagtgctgacgcagtagcatgttcccgatattagtgagtgtgtgatcgtggtgtatatacagtagagagagatcggtagtgaatatatctcttngtggtgccgcgcaagagtagatatatgtcgtatatagcgactcgcgcgggccacggaggaaatataacgtgacgcgcagcacgaatacncgtatgtctgagcgctgcacgagagtggcgacgcaagatagagacaaagtcacgatagataagtagattatatagtagagacacagaatcgtagccaggttgtaagattaggcgtagtgcgacatatccgatctagcagagaagaggcagtgaagcacgagcgtggagtgagggacatcacatacactgtaacacgggcacgctatgctatgtcacaatataggcggtgtgtcatgcacgagaccagtcgaacttacgtataatataaacgtacgctatcgatgccgctgacccatgcggtgtgtagatgatactncgctgngtctcgcacacatccatcaagccaactggtcgtacgtcatgtgagtgttgtgatgcagtgcgagaagagcgtggtcagcttgcgataagacaatcatcaagtttcagatttatgtcccgctccggcgcacacatnagtagttagctaggaaggagcacgcctgacaccgacggcgataaggtagtgaggatgcgacgacgtagtaagataatcgttattatacgcactagccgtgcgtggtgtggcagaagggagggcgaggccnataggaacggaagtagtggaacgaaaggatagactacgagaatagaagtccatacaggcggacaagtgtggacattcgtgatcggtagtcaccacaaatccgatacacagtcgcgcggtgtcgccacaagcgaagcggttatagtatacatgaggtatgtcagacgaacatgtcatgctcggagatagatagcacnatcccaagaacagagagagaggcaccgcaaaagaccgccggcgaaggggaggnataacatataacgagagtgagaaaaagtcaacaccgaagcagagagacagaaggtagggtaagtatatgaggagtgggagatcgatgtgtcagctcgtcgctatgtcatcgcggtgtgtatgatgggtaatactcggaacatatgttgtcgtcgcggttgatgtctttgtgtgtcgtgtcttcgtcctatgaggtggaagttggactaaatagagagaggttggtccggcgcctacatcccacgaacatacgcgccgtacatttacacacatagtcttcgcactgtcntatacgtggtgaagtatgataaaagagatattgagatcatctccttgtggagagttggagtntagctgtggagataaaatatcctacgacgccctcgacacgacttgtcgtaagctgtacggatgggacgagagtagccacgcacgaatacatcacattttaattggcgcgcggggggggtgggggggtngtgggggcaatattataagcacgcctacaacgtagacaagacatgtctaaatgagcgctgaccgcgccacacaagagagcggagaaggggacgaactataggcanacgaagggagaaaaaaaagganncgcgccaccacccgaccg

SEQ ID NO: 4818 - DNA, 1426 bp, Glycine max
  misc_feature (60)..(60): n is a, c, g, or t
  misc_feature (166)..(166): n is a, c, g, or t
  misc_feature (241)..(241): n is a, c, g, or t
  misc_feature (271)..(271): n is a, c, g, or t
  misc_feature (305)..(305): n is a, c, g, or t
  misc_feature (315)..(315): n is a, c, g, or t
  misc_feature (553)..(553): n is a, c, g, or t
  misc_feature (755)..(755): n is a, c, g, or t
  misc_feature (1393)..(1395): n is a, c, g, or t
  misc_feature (1403)..(1403): n is a, c, g, or t
  misc_feature (1406)..(1407): n is a, c, g, or t
  misc_feature (1413)..(1413): n is a, c, g, or t
  Probeset Number=SeqID_14597
cagtgtcgtggtgtcagtgtggtagcggatgtgtgacgcatcacctcgatcgcgacaccnatcaacgagcgaggcgatcagcagatgaacgatgtcctgcgtgaggggcagcggacgacacaccccgcctcttcaagggtgtgagctgtcgggcagagaccaacancgcccgggcgcgcgagcgaagtgtgtacgtatgcgtcgtcgatcgtcgtggttgtgtatggtgcggtcagccgangtgtgagtatatgccacaagcgttcaaatngtagatcggggtgtgtcgagagtggaagcgcgcncaggttgttncgccgccacactgtcagccggcgtcttatgttatgagtatcgatgtgtaggtgtgagagttagaccggtcgtgatgtggttagtagctcagacagaggcagcagatgtgcgacaagacatggcacggacagaggacagcgacgacgtggtgtgtgcacgtagatgacgcgacggataatgagagagttgtgtgtgcggtatacgccggcatagagcatcggtgagcggcgggcgttgncctcgagcatgcgagatatcacggaggaggaggcaggggcgtgcggtggtctatccatgaagcaatagctcaaggcgttgtagaactggagacgcatggagttgcaaatccatcgagtgtggagggtgccgagtattgatgcgcgtcgttacgactgtcatgatagcagcatttcgagttagatgagcgcaccgcgtgcgcngtgggtgctgggcgggtgtttggttgcatatgcgtcagggtatggagggtgatttctcgcgctcgcactcgactcacacacacataatacacacacatcagatacacacacaccaagaaaacaggacagcgcgtccacgatgtccgcgtcacgcccgcggcgcgccgccgcggctcttactcactgctcaactacattacagacagcacgcagagcgtgcggtgcggggccggagaatcagaggagtctcactgtgtgataggaccaacaatacaccacataaaaatccagcggctctccctgcaggtcaggaggtgaggtgggttggtgtgggctggacgtgtcggtaggggctacagacacgacattatatcgataataacgcgcgacgtccaggcgtgccgatgacgacaacacacacagatactacctgcgatcgaaaagatgaagggatccccgggtccccgggcgcgaggagcgagacggggagcctcgggcgggtgagtggagtgaggtggcgaggaggaggggcagtcggcccacgagtaccccttttcttatggtgggcgggaccgccgcgtggggtgcgtagggagggtcgagagagagtgataaaggacgcgaggattgccaccgtnnncccgcgcnccnngggacnacaaacacacaaa

SEQ ID NO: 4819 - DNA, 1045 bp, Glycine max
  Peptide Sequence Number=SeqID_7117
  Probeset Number=SeqID_14598
atctgactcacttcatcttttgaagaaggtagtggtaaaattgttcttttgttcttctggcaggctcagctagttagtactgcctccttccggcaacctcagctagttagtcccccgccgccgccatccgccccaagacgaccgccggcctaaccacccctggatcccgaaccacatcgtgagggtgaacgcgacgcctcgtcaccatggctgcgtcccacgtcaacaccaatggcgagcttctagatctgtatcaacttcccttcgtcctcggtgttcaacggaacataagattgtcgtcgctcggggaactgtctacggcacccgatatgttcgaacagctccatttcctaaccagaactagacagtggacctgtgcacagatggaagttctgcgaggatacagctggctagctggctggctggtacgcctccgcgacgacgttcttgaaccattactgcctgttcatattccaaatcctgtgctgcacggccagcagggttttcttcccgtgattacccgcatcatgcacgaagcaattcagctaatgcatgcaaaaaaggacattgggtttaagcctgtacagcttggaacgcgacttaatattttcagcgaagtcctaattgatctggctgaaaaagttttgggagacggcttgagcgtagcacagttccaactgcatattccacatctgatcatttccatcaacatgctactccacgcgcagatggcattctgaggctggtggtggtcgtggtggcggcccacctgttggtggaggacgatgtgggctgagccgctgtctgagtcgaggaaggaacttgctgctgcctttatctttgtcaatggagaatattcttgtgtttatctttgtcaagtagacatgctagttgattttgttagtatccatctttgctaagtcttggtgatccttttggttgtcctgttttaggattcttttccacagtgaccttatttttgttatccaactcagtggatttgactttattgacacgagcaatgatgcatacgattttatcaccc

SEQ ID NO: 4820 - DNA, 1625 bp, Glycine max
  misc_feature (1)..(1): n is a, c, g, or t
  misc_feature (66)..(66): n is a, c, g, or t
  misc_feature (185)..(185): n is a, c, g, or t
  misc_feature (301)..(301): n is a, c, g, or t
  misc_feature (316)..(316): n is a, c, g, or t
  misc_feature (336)..(336): n is a, c, g, or t
  misc_feature (369)..(369): n is a, c, g, or t
  misc_feature (397)..(397): n is a, c, g, or t
  misc_feature (403)..(403): n is a, c, g, or t
  misc_feature (410)..(410): n is a, c, g, or t
  misc_feature (454)..(454): n is a, c, g, or t
  misc_feature (651)..(651): n is a, c, g, or t
  misc_feature (656)..(656): n is a, c, g, or t
  misc_feature (662)..(662): n is a, c, g, or t
  misc_feature (697)..(697): n is a, c, g, or t
  misc_feature (702)..(702): n is a, c, g, or t
  misc_feature (946)..(946): n is a, c, g, or t
  misc_feature (968)..(968): n is a, c, g, or t
  misc_feature (1058)..(1058): n is a, c, g, or t
  misc_feature (1072)..(1072): n is a, c, g, or t
  misc_feature (1455)..(1455): n is a, c, g, or t
  Probeset Number=SeqID_14599
nagcagcagatggtacgttcgtccagtatgtatagttttagtatgatcatatagatgcgtggtcgngttgtcgtcatcgccacgcagccacacggtgatatcatagacaagaatatacgcgcgatcatgtctaaagataacacgcacgtgacgccgtacagctgtattacatgacggaagagatnaatacgcgcgagtgcgctgttataacagacgacgcgcacatagacgatcatatagtcacatcagcacgtatatatctgtggtatcctcgccagcgtcgtgtcgtctgaagatagcnacacgccctacgcgnacgaaatatgtatatactanctcatcgtgacagacgctagtaagctcgcacgncgggatacgacatacaacgatctgagtngtatangtagtcncgatcgcgtcagttattatcataatatgggtcactgtacgcggncagacatgagaggatatgtatgcatataattatacgactgagcgcggaataacagtatacacgtctcgttagatataggcaatacacaactagaagcatacagattaggatgtattgcgctgcgtgtgagctaacgtgactgcgtggtggctcgatgatggtggcgccgctcgtatcactaatacaacaaagataanagtgngcagcngacacgttcgactacacagtctatatgatatatgntgggngggagagtggagaggggagttatgctgtatataatataacatcctagtatgtatatacatataatattatccgtcatcaacaatagagcaatgattgtataaacaataaatttatatgggcatagaacatctatcttacactcaacttaccactaatacgtcaaagacattatactagtgtgttgtattgttctctcgtcatatcttacgaggatgcagcgagaccgcgtagacgcgcagtcanaatatacagaggtcaatgcagncacacgtaccactctcttcctcataatacacttctatattccactatactgtatctagggacgtatattatgatacgtcacatcagaatncactatcaatcagntagcgaagacatcctcttctaccaccaatatcgctgacattcgacaaatattgatacgaccgcgttatgaaacgcgagtatacgcattcgctctcttttcgcacacacttcaatatgcaaaatcagtcagtagtacactataattgtgtttatatatgatgtcgtagttaccagctgcgactcatgagagaaggtaatatccatcatgatcgaaacgcgattcccgcgcgcagtgctatttccgggatcgtattctctgcgtacagcgaccgtatatagtattatatcttaatagacgtgacagtctgccatggttctgatttaatatgataagagataaataaagagagagtaccctctctccgtcacgttaacgcgcgcgngtgaggacactcaacaccacctattaataatgacattatccctcatatcatcggcaagggacgagatattattgtatgtgttaaattatagcgaaccaaatgatgaggcgatagtatgtcgatgtattatatttgttattgcatagatatgtaggtgaggcacacactat

SEQ ID NO: 4821 - DNA, 2139 bp, Glycine max
  misc_feature (1)..(21): n is a, c, g, or t
  misc_feature (28)..(46): n is a, c, g, or t
  misc_feature (66)..(66): n is a, c, g, or t
  misc_feature (77)..(77): n is a, c, g, or t
  misc_feature (82)..(82): n is a, c, g, or t
  misc_feature (92)..(92): n is a, c, g, or t
  misc_feature (131)..(131): n is a, c, g, or t
  misc_feature (192)..(192): n is a, c, g, or t
  misc_feature (195)..(195): n is a, c, g, or t
  misc_feature (199)..(199): n is a, c, g, or t
  misc_feature (226)..(226): n is a, c, g, or t
  misc_feature (277)..(277): n is a, c, g, or t
  misc_feature (360)..(360): n is a, c, g, or t
  misc_feature (365)..(365): n is a, c, g, or t
  misc_feature (380)..(381): n is a, c, g, or t
  misc_feature (384)..(384): n is a, c, g, or t
  misc_feature (387)..(388): n is a, c, g, or t
  misc_feature (396)..(396): n is a, c, g, or t
  misc_feature (565)..(565): n is a, c, g, or t
  misc_feature (840)..(840): n is a, c, g, or t
  misc_feature (905)..(905): n is a, c, g, or t
  misc_feature (932)..(932): n is a, c, g, or t
  misc_feature (992)..(992): n is a, c, g, or t
  misc_feature (1034)..(1034): n is a, c, g, or t
  misc_feature (1047)..(1047): n is a, c, g, or t
  misc_feature (1149)..(1149): n is a, c, g, or t
  misc_feature (1225)..(1225): n is a, c, g, or t
  misc_feature (1292)..(1292): n is a, c, g, or t
  misc_feature (1442)..(1442): n is a, c, g, or t
  misc_feature (1523)..(1523): n is a, c, g, or t
  misc_feature (1840)..(1840): n is a, c, g, or t
  misc_feature (1852)..(1852): n is a, c, g, or t
  misc_feature (1971)..(1971): n is a, c, g, or t
  misc_feature (1994)..(1994): n is a, c, g, or t
  misc_feature (2038)..(2038): n is a, c, g, or t
  misc_feature (2071)..(2071): n is a, c, g, or t
  misc_feature (2082)..(2082): n is a, c, g, or t
  Peptide Sequence Number=SeqID_7118
  Probeset Number=SeqID_14600
nnnnnnnnnnnnnnnnnnnnnttttttnnnnnnnnnnnnnnnnnnncccccaaaaacccacgcaangggtaggcctnaccanagcccgaacnctactcataccgcgcgacagatcacgttgctcgctatgngtactcagctaccgccgccgcgcggtatacggcgcgaggtgcgcgttggtatactgaaganagnaatngcgagcaaaggcaccggacaacgcagnatgcgttcgagaagcggaggagaggttcgggcgacaacagcaaggtgacgncgcatcagcgaacacataaagtgcggatcaacgtgatatccatatctctatgcatatttaatcatctctctctctccagcgtntctcnctcttcacttcctcnnatnatnntttataanttagattttctctctcctcctctcatatgattattctgttattattcactatactctcagtctcaaatatttactgaccgcgtctcatatacacaccgcacgacatacccttacaatcaaccgcactcacatcatccaacaccatctcacagcctgtagatactctatntagatcgatgacagccgatatgactactcacatacgacctatacgactgacgaaatctgacaagcacatcaaatgcgattatatgacagaatcacatactgtccaacatacacataagaatggaatactcatagaaacatatatatcaacaacttacgacgcagcacctcattgcatgaaaacagtgaggcacaggcacataagaatcataaagcagacaagagagatagagcagtatgacactgtgtctgttggtgattatgtcatttctctgnatgttgacattatcatatagccagccgctggagtgtcaagtcgatccatgtcggactagtaactnatgtagcatgtgtcatacgcgatcaanctaatcgtgcagtggggatatgcgtcagcgtgtatgatgcgccgtgtgatatcgtacgtnttgagactcgcgtagcgccggcggtgatgtattaccactgtntcagtcagatctntcttcctcgtatattgtatattttgtgtctctagggctgatgttacagtggtgtccgtggtacctgacggaacgtagctggtgttgtgcgtatataatggtnaatctatcgagtaatcgacacttcgcgcgcgatgatcactggagtcaacatcagcgtagttgtcctatttctattnacattatatcgttatacgcacatctacacatataccctccttcatatattaagtacaccccatacancgcactctagtctgcgacatcgatcgagattcatataattgtacctctcgtcttcatatcgcttacttgttgattgcacattccgatctgacactgactgtcaccacgcaagtgacactcgtgctctatgtataatctatagcctagcgngtcttatgtctcttctgtgatgtcatttctgtctctatatactctcctctcactcactgtcagccacaacgatctcattanacatacatcagtaaatcaatatattactgtcttgtgcgcgttggctgttacatactaccattcttacttatctccgcgcgcccctcatatactacaattcacttataacatcatctcatcatcgcgacgtcgcccacgctcctctacggtgagggatgatactgacggatcggcatgtaatagtgatttgaataacgcgtagttttagatagtgggcgtcacgaggtcaagctcacaggttcaatattggtgaggtaatagagttggatgaagtgatgtactagtactcaggcgcaagatgaaatggacgtatgagngactcgggcgcncgatgcaccggcacatgcggcgcgtcggtccagaacggagactgtcatagctcggatatcaactaggtgtattcaatcctgcgacactcatcagatacatccccaatcaaatcatcacnccgcattcatttcatacataagnagaccatacactacgatctcaaatcacccactcagccagaacangcagctctacaacaacggaatgcagtcagcttnactgcacttancactgctcacacgaaaccacttacacaaaccagaccaccgggttttgtgacctgcga

SEQ ID NO: 4822 - DNA, 1645 bp, Glycine max
  misc_feature (24)..(24): n is a, c, g, or t
  misc_feature (27)..(33): n is a, c, g, or t
  misc_feature (36)..(36): n is a, c, g, or t
  misc_feature (40)..(41): n is a, c, g, or t
  misc_feature (53)..(54): n is a, c, g, or t
  misc_feature (69)..(73): n is a, c, g, or t
  misc_feature (77)..(78): n is a, c, g, or t
  misc_feature (85)..(85): n is a, c, g, or t
  misc_feature (106)..(108): n is a, c, g, or t
  misc_feature (110)..(110): n is a, c, g, or t
  misc_feature (144)..(146): n is a, c, g, or t
  misc_feature (150)..(150): n is a, c, g, or t
  misc_feature (200)..(200): n is a, c, g, or t
  misc_feature (209)..(209): n is a, c, g, or t
  misc_feature (304)..(304): n is a, c, g, or t
  misc_feature (316)..(316): n is a, c, g, or t
  misc_feature (446)..(446): n is a, c, g, or t
  misc_feature (635)..(635): n is a, c, g, or t
  misc_feature (904)..(904): n is a, c, g, or t
  misc_feature (944)..(944): n is a, c, g, or t
  misc_feature (1029)..(1029): n is a, c, g, or t
  misc_feature (1454)..(1454): n is a, c, g, or t
  misc_feature (1572)..(1572): n is a, c, g, or t
  Probeset Number=SeqID_14601
gtgggtgggtgtgtgtgtggggtnttnnnnnnntcntttnntgccgcccgccnnggaggaggggggtgnnnnnatcnnttctgtngggcacctggggcgcgcttgnnngnaggtagtgtgggggtggcgataagggtgtcctgnnnttantctacgtgagtgtttgtttgatgctttcttcgtgctcttcttttgatttntcttgctanttgtgctgttcttcacatagagaggctgtttgtggtgtaggttgggtgcacactctgtagtattgtgtagatgaatatagttttatgctcgcgantagcgcgcgctnacatcccgcatctatttttttggatgagatttatctacggtacttttatcggtgattaatattgcatgcgccgagtggtgttcttacaattgaataaatatattgtatttgagttgagacatggacacgnccgagctagggattgttgtgtgaagaacccgatcgctatgtcacatcagcacgtgtgtgcgtaccccgctagagactcgagatagtaggcgatcttacgccaacatcatcttaccatatttaggatgatgcaaaaaattacagactaaactagccgttcatggttatatattgtgtaaaccattacatntatatatcctaattgcctgaccgcgccatcaccatacatacgtgttctatatcatgacttttgtagagagtgagatatcaactttgttgctgtcacactgcattgaagatgttgtgaaattgtatactatagaatatacagtaacataaagagactaatccatatatgttatattccttttcattgatttttcgttgctttctcgtctctcatcagtatctcggcgctgcagaggcgttggtcgtgtccgacgcctgactgttcacggntcgtatccttgtgtgatgatatttattacatcacctacanaagtacaccgcccttgtcactgctattgcctctccgtggtatgaccatgttgagcgctattgtacgtctcatagtctctccctancatcactgtgtcactatcctttgacttctcacttatgtgttgccatctcttatgctttgcttgcgccgatcactgcgctatgacatatcactcgcacgcgtccgtcgcgactgcccctctcattactttctactttgtcactgctcactggtatttgaccactgtacaatgtcttataatcttatcattgtctcactactcatctcaacttcgtgtgtccatcactctcgccatcaactcttcacatatcacgtatctctattacattgcctgtgtgctcggatatgattgctcttgacatctgcactaaacaacactatcatgtgattgattacatagatatttgtcatccttctcattacactgagtcccgtgtgatacgactcgtgtccatgcaccctatctcgcatacactctgtggtgcncacgccattgatcgtacgtgtcaggtatctaactacacttatatatatacaactccttgcatatagttaatctcgactaagcgcctattatacactctcaccgaggagatctgtgcgnacgtgctgccttcagcctctctaagtcggcagtagggtgtgccggtgctagcactaaaacctacacatcctgt

SEQ ID NO: 4823 - DNA, 1422 bp, Glycine max
  misc_feature (25)..(26): n is a, c, g, or t
  misc_feature (28)..(28): n is a, c, g, or t
  misc_feature (32)..(32): n is a, c, g, or t
  misc_feature (46)..(46): n is a, c, g, or t
  misc_feature (74)..(75): n is a, c, g, or t
  misc_feature (81)..(81): n is a, c, g, or t
  misc_feature (93)..(94): n is a, c, g, or t
  misc_feature (266)..(266): n is a, c, g, or t
  misc_feature (310)..(310): n is a, c, g, or t
  misc_feature (322)..(322): n is a, c, g, or t
  misc_feature (405)..(405): n is a, c, g, or t
  misc_feature (419)..(419): n is a, c, g, or t
  misc_feature (460)..(460): n is a, c, g, or t
  misc_feature (462)..(462): n is a, c, g, or t
  misc_feature (475)..(475): n is a, c, g, or t
  misc_feature (489)..(489): n is a, c, g, or t
  misc_feature (496)..(496): n is a, c, g, or t
  misc_feature (501)..(501): n is a, c, g, or t
  misc_feature (503)..(503): n is a, c, g, or t
  misc_feature (526)..(526): n is a, c, g, or t
  misc_feature (538)..(538): n is a, c, g, or t
  misc_feature (542)..(542): n is a, c, g, or t
  misc_feature (575)..(575): n is a, c, g, or t
  misc_feature (580)..(580): n is a, c, g, or t
  misc_feature (588)..(588): n is a, c, g, or t
  misc_feature (603)..(603): n is a, c, g, or t
  misc_feature (646)..(646): n is a, c, g, or t
  misc_feature (701)..(701): n is a, c, g, or t
  misc_feature (721)..(721): n is a, c, g, or t
  misc_feature (760)..(760): n is a, c, g, or t
  misc_feature (765)..(765): n is a, c, g, or t
  misc_feature (771)..(772): n is a, c, g, or t
  misc_feature (774)..(774): n is a, c, g, or t
  misc_feature (777)..(778): n is a, c, g, or t
  misc_feature (824)..(824): n is a, c, g, or t
  misc_feature (827)..(827): n is a, c, g, or t
  misc_feature (829)..(829): n is a, c, g, or t
  misc_feature (867)..(867): n is a, c, g, or t
  misc_feature (869)..(869): n is a, c, g, or t
  misc_feature (873)..(873): n is a, c, g, or t
  misc_feature (902)..(902): n is a, c, g, or t
  misc_feature (912)..(912): n is a, c, g, or t
  misc_feature (929)..(929): n is a, c, g, or t
  misc_feature (931)..(931): n is a, c, g, or t
  misc_feature (983)..(984): n is a, c, g, or t
  misc_feature (1029)..(1029): n is a, c, g, or t
  misc_feature (1031)..(1031): n is a, c, g, or t
  misc_feature (1035)..(1035): n is a, c, g, or t
  misc_feature (1133)..(1133): n is a, c, g, or t
  misc_feature (1137)..(1137): n is a, c, g, or t
  misc_feature (1171)..(1171): n is a, c, g, or t
  misc_feature (1173)..(1173): n is a, c, g, or t
  misc_feature (1219)..(1219): n is a, c, g, or t
  misc_feature (1267)..(1267): n is a, c, g, or t
  misc_feature (1315)..(1315): n is a, c, g, or t
  misc_feature (1317)..(1317): n is a, c, g, or t
  misc_feature (1324)..(1324): n is a, c, g, or t
  misc_feature (1333)..(1333): n is a, c, g, or t
  misc_feature (1387)..(1387): n is a, c, g, or t
  misc_feature (1415)..(1415): n is a, c, g, or t
  misc_feature (1422)..(1422): n is a, c, g, or t
  Peptide Sequence Number=SeqID_7119
  Probeset Number=SeqID_14602
gtgtggtcgggcgctcctcttccgnncncggncgagcgccgcggtnccctctcttcctccacacacggcgggannaaaagntagatggggtgnnttcggacatagagggtgagctgtagaggcgccctccgcactctctagatctagtcatagcgctaatgggcagccgcctctcctccgcctcagtcggcgtgtgtcgcggagtcgcgggatattaatggccatcatatatacgtgtatattgccaaaccatatgcctggcagcngagatatatcctgcctacctgcaacatccctactctatcatatntaccaagcagcntatagcgccagaggtacataggagtgattgcgtatcccgaaagtagagtagattatgtatcgagcgcgcatagatcgcatccncacactcatagcangaatcggcgctatcacgaaggcagtgcatagtagagtcgangnagtcgctcatcantaggcgtacctctnctaatgntatananacgtttaactagggcagcgcgcntagaacgacaantctntcgtcctatagacagcgagagctagtcagcganagatngtagtccnctcggtctctacccncatcgcgtacttgagccaggagggttaggggagtcttcgtgcnagtgagtcatatttatgctagcagactcgcggacacacgagcatccgactgtgtngggtatagcatagagtgagnagatttatatataaaaataaagaaagtaaggccacaaanaaatnaaaaannantannaaaaaatacatatatgtagtatctgtttaaatatcgtaaacatagntantngagatatatacccctcttgtggtagggatagaataaantnaaanacacgaagactcatcgtcccactgcgccnctctcctccngagcaccctaagccccncnaacaacacaaagatcgcagacgaaacagcccaacaacaaacgacttataagnncgatctcttctaatatggacaagtggagagctatctcccctctgncnagcnacgctccaggcctagaactccatctactaaacgatacctattgttgtaggaccctgagggattatcgagatcttcctctagaggcaatggctcactcngggncgacggagtcgggacagctactattctatgcgcnantgccgataactcaggtgagagaatgagctcatgttatgcttgggtnagcacatagcgtgttctggggatcgaggccccgcacagcatataaganatagtcgacttatcgtaatcgaactctgaaggagatcagtaacgcganangccgtcncgttcgganagtattctatgtgcgattgagaggcgatcatctcctaagctcgactagcggtanaggctgacgcgcgtctctacgtcgcgtnctcgacn

SEQ ID NO: 4824 - DNA, 677 bp, Glycine max
  misc_feature (677)..(677): n is a, c, g, or t
  Probeset Number=SeqID_14603
gattcaataaaatcaataattaatgttagctccattttgaacttttacatttgctaaatatggcttgaggtttagtttagtgtctttgatgaatttgtttattttttgtttggttttgaactagctccgtttgatgttcaatttttttcaagctgttgacatcttggggcaaattgttacttgaacttgaggatactgtcaatgttgatgaacggaaaatgtctgttattttaataaaatgatgagtgagattgagagtttggtttctgaggcttattttatttcataatgtgaaatacactgtattgttttgtgtttttataagctgcaaacacagggctagtttatgttttgtggcacaactaattgtttgttgcagtgagtactcaatgcagctgaatgcttctcggattaaagttcttcaagctcaagatgacgtgatcagttccatgaaagaagctgcatccaaggaacttttgactgtgagtcatcatcatgatgatcatgtgtacagaaaccttctgaaagatctcattgttcaggtcagttgaattttaaatatggtacacccactgtggtttgatagtttgatttttgctgttctgctaactatcattttcagattgttgtttccatttttttttgagagcgttgcacataggcaaccagtgttgctn

SEQ ID NO: 4825 - DNA, 1319 bp, Glycine max
  misc_feature (1)..(38): n is a, c, g, or t
  misc_feature (1319)..(1319): n is a, c, g, or t
  Peptide Sequence Number=SeqID_7120
  Probeset Number=SeqID_14604
nnnnnnnnnnnnnnnnnnnnnnnnnnnnnnnnnnnnnnttcgagtagccacatagatcaaataacctaagaaaacctaaacccctcgttggtggtagcggctgtgacagactcagaggcggagcaaggagaatgggaaggtcgagaagaaagtacaagcaatcgagaaccaaggtccgtgtgggactccctaagaagaaccctaggcttttcaaaccctctttctccgttccacccaagctcttgcgaaccctcgccgaagagccccaatgggacgaccaaggcaccgttaacagcaactactcctccttcggcgttctctccgaccctaactccctcaccgagccttctcccgatcctcaaaccttcgattccggcagcgatctcgaagaagacgacttgaaatcagccctaggaaagaagcgaagggatgggagaagcgcgccgcctcagcctctgactgcaatgcaacggattcatattagtcgccttgtcgataaatacggaaatgattatcagagtatgttgatggatataaagctgaatccgatgcagcattcaattgcaactttgcagaagctatgcatgaggtatcatatataccaaaacaagaaccctctccttaaggccaaatgaagtgggagcttaattaattaatccattgacggaacagttgcacgtggaggcccaaatttttgtcacagtgaggatgtgtttctctaccatgtgtcatcgttgagaaattttgttaatgcttttgaatctatgaattatattatgtggatttttggttgtggtagatgaggcattctggacttctggtcttcctacacctgctgccaccaagattatgtagcatttttacatgcatgcacttttggaattctaaagtaattattataaaattgacaaatttattaaaaaaaaaaaaaaaaaagaaaaaaaaaaaaaaaaaagcttatcgataccgtttaaacacaataaagggccaacgggaggggggaaacccctatcctgacccctactacccatcgcccacatggccggtccccttaccaacgccccggactggcaaccccctgcccctgcccggcttagtgcccctgccacgccaccacccttttgccgaactggccatattagctaaaatgtgccccaccgatcccacttcgccccagctgcgtgccctgaatggccaatgccacttgtaaacgccaacatttcgctaaaaactcggagggaaattttgtaaagaccccccccttttttaagccaaaaggccaaagtctcaacactcctctatatccacaggacggacgn

SEQ ID NO: 4826 - DNA, 1791 bp, Glycine max
  misc_feature (10)..(20): n is a, c, g, or t
  misc_feature (28)..(32): n is a, c, g, or t
  misc_feature (34)..(44): n is a, c, g, or t
  misc_feature (50)..(51): n is a, c, g, or t
  misc_feature (60)..(60): n is a, c, g, or t
  misc_feature (62)..(62): n is a, c, g, or t
  misc_feature (64)..(64): n is a, c, g, or t
  misc_feature (66)..(70): n is a, c, g, or t
  misc_feature (72)..(73): n is a, c, g, or t
  misc_feature (76)..(76): n is a, c, g, or t
  misc_feature (78)..(78): n is a, c, g, or t
  misc_feature (82)..(82): n is a, c, g, or t
  misc_feature (87)..(88): n is a, c, g, or t
  misc_feature (90)..(91): n is a, c, g, or t
  misc_feature (93)..(93): n is a, c, g, or t
  misc_feature (95)..(96): n is a, c, g, or t
  misc_feature (98)..(98): n is a, c, g, or t
  misc_feature (100)..(100): n is a, c, g, or t
  misc_feature (104)..(105): n is a, c, g, or t
  misc_feature (107)..(107): n is a, c, g, or t
  misc_feature (111)..(111): n is a, c, g, or t
  misc_feature (113)..(114): n is a, c, g, or t
  misc_feature (116)..(116): n is a, c, g, or t
  misc_feature (118)..(118): n is a, c, g, or t
  misc_feature (120)..(120): n is a, c, g, or t
  misc_feature (122)..(122): n is a, c, g, or t
  misc_feature (124)..(124): n is a, c, g, or t
  misc_feature (128)..(128): n is a, c, g, or t
  misc_feature (130)..(130): n is a, c, g, or t
  misc_feature (132)..(132): n is a, c, g, or t
  misc_feature (134)..(134): n is a, c, g, or t
  misc_feature (138)..(143): n is a, c, g, or t
  misc_feature (145)..(149): n is a, c, g, or t
  misc_feature (151)..(151): n is a, c, g, or t
  misc_feature (156)..(156): n is a, c, g, or t
  misc_feature (186)..(186): n is a, c, g, or t
  misc_feature (189)..(189): n is a, c, g, or t
  misc_feature (206)..(207): n is a, c, g, or t
  misc_feature (209)..(209): n is a, c, g, or t
  misc_feature (211)..(211): n is a, c, g, or t
  misc_feature (213)..(213): n is a, c, g, or t
  misc_feature (215)..(215): n is a, c, g, or t
  misc_feature (217)..(217): n is a, c, g, or t
  misc_feature (233)..(233): n is a, c, g, or t
  misc_feature (235)..(235): n is a, c, g, or t
  misc_feature (268)..(268): n is a, c, g, or t
  misc_feature (270)..(270): n is a, c, g, or t
  misc_feature (330)..(330): n is a, c, g, or t
  misc_feature (333)..(333): n is a, c, g, or t
  misc_feature (353)..(353): n is a, c, g, or t
  misc_feature (363)..(363): n is a, c, g, or t
  misc_feature (373)..(373): n is a, c, g, or t
  misc_feature (395)..(395): n is a, c, g, or t
  misc_feature (402)..(402): n is a, c, g, or t
  misc_feature (410)..(410): n is a, c, g, or t
  misc_feature (415)..(415): n is a, c, g, or t
  misc_feature (417)..(417): n is a, c, g, or t
  misc_feature (443)..(443): n is a, c, g, or t
  misc_feature (446)..(446): n is a, c, g, or t
  misc_feature (449)..(449): n is a, c, g, or t
  misc_feature (451)..(452): n is a, c, g, or t
  misc_feature (454)..(454): n is a, c, g, or t
  misc_feature (480)..(481): n is a, c, g, or t
  misc_feature (503)..(503): n is a, c, g, or t
  misc_feature (594)..(594): n is a, c, g, or t
  misc_feature (604)..(604): n is a, c, g, or t
  misc_feature (606)..(606): n is a, c, g, or t
  misc_feature (643)..(643): n is a, c, g, or t
  misc_feature (648)..(648): n is a, c, g, or t
  misc_feature (659)..(659): n is a, c, g, or t
  misc_feature (671)..(672): n is a, c, g, or t
  misc_feature (742)..(742): n is a, c, g, or t
  misc_feature (823)..(823): n is a, c, g, or t
  misc_feature (825)..(825): n is a, c, g, or t
  misc_feature (851)..(851): n is a, c, g, or t
  misc_feature (882)..(882): n is a, c, g, or t
  misc_feature (902)..(902): n is a, c, g, or t
  misc_feature (943)..(943): n is a, c, g, or t
  misc_feature (1012)..(1012): n is a, c, g, or t
  misc_feature (1038)..(1038): n is a, c, g, or t
  misc_feature (1041)..(1041): n is a, c, g, or t
  misc_feature (1047)..(1047): n is a, c, g, or t
  misc_feature (1148)..(1148): n is a, c, g, or t
  misc_feature (1150)..(1150): n is a, c, g, or t
  misc_feature (1205)..(1205): n is a, c, g, or t
  misc_feature (1251)..(1251): n is a, c, g, or t
  misc_feature (1253)..(1253): n is a, c, g, or t
  misc_feature (1350)..(1350): n is a, c, g, or t
  misc_feature (1374)..(1374): n is a, c, g, or t
  misc_feature (1412)..(1412): n is a, c, g, or t
  misc_feature (1416)..(1417): n is a, c, g, or t
  misc_feature (1452)..(1452): n is a, c, g, or t
  misc_feature (1510)..(1510): n is a, c, g, or t
  misc_feature (1530)..(1530): n is a, c, g, or t
  misc_feature (1581)..(1581): n is a, c, g, or t
  misc_feature (1589)..(1589): n is a, c, g, or t
  misc_feature (1591)..(1591): n is a, c, g, or t
  misc_feature (1606)..(1606): n is a, c, g, or t
  misc_feature (1705)..(1705): n is a, c, g, or t
  misc_feature (1709)..(1709): n is a, c, g, or t
  misc_feature (1781)..(1781): n is a, c, g, or t
  misc_feature (1791)..(1791): n is a, c, g, or t
  Peptide Sequence Number=SeqID_7121
  Probeset Number=SeqID_14605
gggttggggnnnnnnnnnnngggggggnnnnntnnnnnnnnnnngggggnnggtgggggncncncnnnnncnnccncncacnccccnncnncncnncncnctcnncngccncnncncncncncnctcncncncncccnnnnnngnnnnngncggtnagtggacatagctagtgtcgtgagctctcngtnctttcactatcacaacnncntncngntntcgtgctccttcgccntnactgctgcggacgtcggtgcgcgctcgcgctgncngcccttagcgctggacgcgaggcagctgcgcagctagagccggcgcgaactagtgctgancgngtacagacgctgtcagtctncactatcacnacgcacgccncacatacacagcgcacagaganaaacacnaggtggtncacgncnccaccacacccaccacaacacacganaanatntnngngagagatataccctctcatatgtctnncttctacttctccatcgatcantggctgtcgtgatgtcgtgcatgtgagtcgtctcgcgtgcgcgtatgtctagtcaggtagctgtctgtcggtactgatgactgcgctgccnagagcgcacngncgatgcgagagacaggatatgtgtgggtaggtggtgnagagntgtcgtcgatnagcagtgtgtgnngagacgagtggatggtaagatgaagaggtaacgactgagagccggctccgagcgagcgctgggacttacnatcacgagcaccggctccctcccgctcacagagcgcgtcgcgtatagcgcagcacacaccgacgaccaacgaacagcgatntngctgtaagctatcgcacagacgacgncgaacgatgcgcgtactagtgtggtggtgtngcaataagtgatgcacgaangagcagtcgtgagtgagtagtatatgatggagataggacantagagagaggaagaagatgaacagagacgctagacgcgcgatgcgcgccaggtgtgtgatcgatcaganagcgaacgatcggtgaagtactcagnagncagagngcagtagcgacagctaacaacgcacgatggagtacgacaacacgccacacgattatgattaacgtatttctgctagtctatcgctagacgtctctgtacantntccctatggctcgcgcaccgcgcgagcagttgtggtagacgtgagaaccgacgantacaactgatatgagacgtatcagtcactgtgtttacaatatcgancngtcttcatctctacgtgactcgctcattcgccatcgtgtatatgatgtgtgatgtgcgcgtcgtattctcgttgtcgtggctctatcgtcgcgcccnttgtggctcctctcgtcgcctcgncactgactgcagtgacacgtcacgacgaacaacgccgncccnnccgacatcgaagcgcgcgtcatcgaggagtgtgcncagagtaccacaggagagcgagaggagaagatacgaatacaggttgagacgatgagangtgatcacgctgcgacgcgntcagggagcgacgagcgacgagtatgagtaacgcccgtgcgtggatcgtanatcaatantntgcctcgcgcgcccngcgacgtgcaaccgaaggcgcgcgcagtgttaacacgctcacgtgcgatggccgcacacacgccacacaagcagaggacaaccacgtcggcacacgccnagcngcgcagcaccgccggctaggcacgcgcacgcgcgcgacgcgcgcgcgcgagtgctcctgcacccaccacacnactgcactcn

SEQ ID NO: 4827 - DNA, 290 bp, Glycine max
  Probeset Number=SeqID_14606
atgggtctggttagagtttacacaaaaccacaaggccagcaacctgattttggtgatcctgtggctctttctgctgatataggcggctgcactgttgaagacttctgcaaccgtatacacagaatattggtgaaggatgtgaagtatggactgctctggggtactagagcaaggcactacacccagcactgtggacttattcacaatcttcatgacgaggatgctgttcagaatgtgaacaaaaagtgaacgatagccaacccttcatcttgttctatgttctatgactg

SEQ ID NO: 4828 - DNA, 458 bp, Glycine max
  Peptide Sequence Number=SeqID_7122
  Probeset Number=SeqID_14607
gcacgaggcctcgtgccgaattcggcacgaggcaattatatatcgattctcgggccgtgcaaatgttctctgttattgtcagctgtctggatcataatcaaggcaaccgttgaagtctatcatcacataactgaacacctgtttctcatgtgtatgttatcattaatatttatgtttcgtctgtcaaaatcttgacagtatatgtatctcagcatatgaacttattcagcttggtgagtgacttatgttaataatgactttgtcagacttgtctagtagtaagtaaatgcccataatgttaaagactacgtcagatttgtgcagtagtaatgccactcatgtcaaatagtcaagtcttcaccagactggtttggaccaagcttaaagttggtgttgtattcctgtactattcaactcgttctagttgccccacctccatagctaacctgtggactgtc

SEQ ID NO: 4829 - DNA, 1598 bp, Glycine max
  misc_feature (107)..(107): n is a, c, g, or t
  misc_feature (189)..(189): n is a, c, g, or t
  misc_feature (363)..(363): n is a, c, g, or t
  misc_feature (393)..(393): n is a, c, g, or t
  misc_feature (477)..(477): n is a, c, g, or t
  misc_feature (617)..(617): n is a, c, g, or t
  misc_feature (726)..(726): n is a, c, g, or t
  misc_feature (783)..(783): n is a, c, g, or t
  misc_feature (973)..(973): n is a, c, g, or t
  misc_feature (1005)..(1005): n is a, c, g, or t
  misc_feature (1043)..(1043): n is a, c, g, or t
  misc_feature (1224)..(1224): n is a, c, g, or t
  Probeset Number=SeqID_14608
gatgtatagattatcatgtgatatgtggatggagagacgtcgatgtgtggagagcgggatatctgttgtgtatagttggtgcatgacgaatagcgtttatgcatcantgacatgacattctgtgtgctagcctctaataatagatgatcgtggagggtcgatagtacacacctgtcagtacatggtacntacactatcgactagtagaggagattgtatagcgtatgagtattatgcctgctagtcgatgtagtaacctatataatatgagtgtgtctatgtcttataacgtatagccttatgtgttatgtaatgagttacatacatatatggtgtgatatcttttctttatgtattatattnttatatatatataagataggaagagactangcgcacgataacgacataggtgaatatgtgtcgttatgtacgagagatagatagagatgaacgctatcgtgctattcaccaatntagcacattattaatacagaagagagaggagtgaacatgtacaaagaggagagatctgtatgtctagagatgcgtcgctttgagagatttactaactatgggttatcctatggatatgtgataattgtgtgttagcagangtatctattatctatgcgacaatacgcagagaaacgaacacggtgaccgagtgtctcgcatgtatagtataattactataatgtgatcgtatatctcactcatgtattntcgatcgaatatggtgcgtagtaacgaagtcgatgtatgaaagcatctcagataatnagcgcggtggattgtggagagagctgtgaggagaccaatgcagtatttgagggtgtagagcttgatgagggagtggagacagtaggaggttgtatataatttggttgaagtagtgggtgttgtgctaaggtgcggcatcatattaggtaaaggttggctgtgattgatggatagagcgtgagcgctatanacaagaggcatagcaatagagagagttgagcngggtcgtggcgcatattatatatgatagacagtatganagcagttttgatgatcgcattgtaactgttctgattaatatgtgtcacccgggtatatcaaaggcttgtaatatgaagatgagtaaatggtagataggtattatagttgttgtatgagggaatgataatcttactcatacagtgtcgcaatagtggagatatagcgtaggacgcttggtcnttcatattctggtatgaatcagttcgcgttgctagagggtatatgtgtgtcatggggcatgcgctctataggtgttataagtcagtacatagacaatgctatatctggtattgctggtgtgcgaatagttaactatactacgtctcgcaagtgactattctatgcgcgagtatgtgtctagcttgtcagtatatttcacatctcttctaaccacgctaattgcgaggtgatcagtatgaatcacttgccttgacgtctttcgtagtggggagatattgatcgatatataacattttcgtaatatatataatcatttatatttaaatcttattgatagtgatggagggagtagtagggagatgggaggagtgagg

SEQ ID NO: 4830 - DNA, 558 bp, Glycine max
  Peptide Sequence Number=SeqID_7123
  Probeset Number=SeqID_14609
caccaattcacacacataataaactcactgctcttctctctacccctacctccctcctcgcctgcgcctcaagctcccctgctgcgccctcccctacccgggggccggcttccgccttcttccccgcccctacttcatggtccccggccccattggttataacatcctcctcgagccccccggcagcggctccggtcgacgcccctacaccgtagctgggcggcccccccctttttttttctggaggaaaaaattttttatacatcttcgaaggtcctcgtccatcgattcatgttctgtttgcttgccctttaaagcctttaggtccgacctcggccttttccatcttaaaagtaaaaaattgggttccaggataaatcggaggattttatatgggcttggtggaatattccatccaaccagggccattggttaaggtagtttggttttttctggtgccaaaattcaggtattttggttgctaatagcttgttatgcgtctcaacaggaatatgtttaatatacttcactattgctttttaattaggttgttgagtg

SEQ ID NO: 4831 - DNA, 337 bp, Glycine max
  misc_feature (326)..(326): n is a, c, g, or t
  misc_feature (328)..(328): n is a, c, g, or t
  Probeset Number=SeqID_14610
aaacgatatgtatatgtgggcttgggttctgtccactgtatggtatcatggatctgctatgatcagtgcccactgcagcaggattgttcaccttctgctcttatctctgtgccgccaagatcagtttcgcggtctaggtctcccttgtggcaacagtgcctgctgtacagtgtgtagagagcacatacttgtgcatgtggttgtttggatcaacactctgattcttggatcaagtgtgtgtcctgacaatgatgacggaactcgattattcttatgtttcggtaaaaaaaagaaaaacagttaatgtcatatcacaaatatagcananaaaaaaaaa

SEQ ID NO: 4832 - DNA, 1499 bp, Glycine max
  misc_feature (1)..(1): n is a, c, g, or t
  misc_feature (8)..(8): n is a, c, g, or t
  misc_feature (161)..(161): n is a, c, g, or t
  misc_feature (163)..(163): n is a, c, g, or t
  misc_feature (456)..(456): n is a, c, g, or t
  misc_feature (1306)..(1306): n is a, c, g, or t
  misc_feature (1310)..(1311): n is a, c, g, or t
  misc_feature (1322)..(1322): n is a, c, g, or t
  misc_feature (1371)..(1371): n is a, c, g, or t
  misc_feature (1393)..(1396): n is a, c, g, or t
  misc_feature (1403)..(1403): n is a, c, g, or t
  misc_feature (1406)..(1406): n is a, c, g, or t
  misc_feature (1409)..(1409): n is a, c, g, or t
  misc_feature (1472)..(1473): n is a, c, g, or t
  misc_feature (1477)..(1480): n is a, c, g, or t
  misc_feature (1499)..(1499): n is a, c, g, or t
  Peptide Sequence Number=SeqID_7124
  Probeset Number=SeqID_14611
naaagcanggacaacgcagcagaagagcatagattacacatgatagatagagtgaatgagtgattagattattctacagaagattaatacagaaaataataaagtgcatcatagtaagagtataatataaagattgtattatatttgtcgctgacggagcntnttatgacagaattgacatagtaagtgtgcgtatagtataacatacgtacatagacattactatagaactaatatatctataaccctgccgcggctacgcacatctctcccacacatcagctcggcctcgtggacgcgccgcaccacgccattcctctacatatatctgttttctcatagacttcgatacttgcgtatattgctatttcttctcttctctgttcgcttatcttctcattgagtggctacagttgcgtcggaggagcgtgaaggggcgcgtggacagagtaactntcgtgatgtgtcggggtgatcataggagcgagaggttctatattgatctgttgactgacactctctaagttaagtgtacattgcatgagttgtagatgaagtgtgtgacatcatgtctacattgcatctatcaacacacatcacgctctcacgagtcgatacgaccacagagtcacaccgctgcgtcgtagtctgcgactgtccgcgggagccgatggcaaactacgtcgtaccacgacaattaccaaccacgcattgtgttatagcgcgtgcacgattgtgacggagcgagtgcgtctaggaggcgtgatcggtatggcatgggtcatctcacaatccgaccgacccacacgactgcgctctgcgtagatcgcataggagatgtatgataagtataatcctgatattcgtcaaagttataagtatcatatgagcgcacactgtcattcacataacacttccaacatatccattccatctccattcacaatctcacgacagactctatactccttacccctcgactctcatctacacctacccatatccacctacactcatactcattaatgtgggcatagctaagcacttgcaatccatacggaccacacactaccggagagaagactagatcgagatagacaccaagcatgtagtcgtttcttacatgtgtgtctccgctactgtaccacttacactctataggtggtcgagctctcatacagtcctcagacacagttcgtcacacaaccgcacacgagacggcaccaagacctctcataaccatccatattgaataaaccggtttctgtagctctgtcacgcagacaatactatcattgacactttnttannatatttaggtnaggtagtgtaggatagggacagaaagtctttcactgtgatctaccgtanagttgtattgagagaatctaannnnatcacantanatngaaaagatttcgtgtatagatgggagaaggaggagtgagaggggaggaaataagaagaattannaaannnnaaaaaaaaaaaaaaaaaan

SEQ ID NO: 4833 - DNA, 619 bp, Glycine max
  Probeset Number=SeqID_14612
ttttctcctttatttctcccagggggggggggaaaaaacccactttttttttttttttccgggggtaaccccggacggaaaacccgcgggttttcccttggttaagcccaatcccccccggcggagaggggagccccccccctttctcccaaacccggccctttcctccagaagggagaatttttgcaggaacgggatcgcctccgaaaacaatgaaaccgtattctctcggggatgccgacaattacctggcgaccgatgggttctaggagcgagggccacgtgtcggtgctgaatcagcgccagagatcgtctagtgtgcagaggacggtgcatgaggtacgatacgcatgtggcggatgtcatcgtggctccgtcgagtcgtgtgaggatgtgcacgtcgatgatctcggagtggagcgtggcgagtctcgacgtgctttcggttttttccgacggtagtgaagtattatcgctattatcagccatcatcatagttaaaagttgtgttccaatttccgtttcttagtggagaatggagaaagaaagaacagaggcgggtaatggactaataaagtataacgtgttttctttgcgaagcgtaatatattaatattat

SEQ ID NO: 4834 - DNA, 553 bp, Glycine max
  Peptide Sequence Number=SeqID_7125
  Probeset Number=SeqID_14613
agagttgagagagagagagagagaaaaaaagagggctaagataaacaaaaagaagacagaatgggtaagaacaataccaaaatcctcatcacagctcttgtgatggttgtaaccgccgcgatgatgattgaagaagctacgagcattcccatatgtggcgtcaacacaaacgacttgaagaaatgtagtccagctgtcactggaaacaacccaccacctcccactccccaatgctgcaaggtggccaaagccgctaatcttgaatgtctctgcccgtacttcaccaggtccgcgcttgacccggccaaaatcaaggctctagggaccaattgtggcattactaaaaaaccctcctgtttgccatgattgaagaactgagctggaagggacaaatgctggcctgccacaagattaagtctctaagttattatgtcttttgttgttctattcgaataaaccaccagattttgcaattatttttcagtcacctttttctaaataaaaaaaccgtgttctatatatttaataaatcaataaagtactgttttgtctt

SEQ ID NO: 4835 - DNA, 1390 bp, Glycine max
  misc_feature (1390)..(1390): n is a, c, g, or t
  Peptide Sequence Number=SeqID_7126
  Probeset Number=SeqID_14614
atattagggcttttctcagctcacagcggcagtatgaggccaatttgtgaaacatgtggaaaccaaggatggaaaggactgcttgtggcttgctctaaatgccgtatagcctgtgaacaccgttactgcatggataaagtttcatttgaggcctcagtagattttgtatgtgctgattgttcgaagaggcctgttcaaaacagattatctacagcgtccatcaaagcagcaccctctaggattgaaaagggcaaagcgagggttgaatcttcaaatccagttcccagatggaaaaagattcctgaatcatcgaaaatgaggttaatctcaccggaggaagtcagaaaactttcatccagtgggggcaataactcaactttcaaagtgccaaaacctgttccagctcgttctccaacgggtttaacaaagcttgcttgctttccaagatctaggagtctgagttctacagttgtggctcgcaaaaccaatcacatgctccttcctccacctaaaagggctgagtctcctaggcctttgcagattcgttcaggagtcatgcaacaatcttctaaacgacaagcagtagtagaagggtcaaagctgaaagttggtggtggagtcaaagatcttggttcaaaagagatatgcagatcaatcctatcagaaaagctcttgcagttacttccacatcgaccagctttgccccctatttggaagggacgtattgtagattctgctacaccatcagagtttaatggcttgttttgggctcagccagcttctgtaatccgcaagaaggcttacaatctttcaaagacgattcctgtcgtactcaaggtcgaattggtccctataggcagtctcttgaatgatttgtttgccaacagaaagccagcgctttcagatgtcgagatgtacattttcccagatgataagaacacaataaggtttaaggaggaacatgcttatctatttgagaccatgaagagacgcaatgctatgatcagaatcaacgtcaaggacaagccgttcctgatattctcttcgaaagtgctggacaagtcctctcaaattatcattgagatgcagaagaaaacaaagaacttcctttggggggtctttctcgtgacgaaaaagtcattagcactcgttcctggaacttctaatcaagctgctcaacgttttgatgctggagatgtggttgacaataccgctaaacgtcagtacaggagggagagagtttgatcgatgcatcttatctcaagaaaattggtaattactaatagctttgtttgctactgtctgaatgtgtgttcttgtttgttgtaataagaagtaataaagtcaggccttgttgttgttactttcacctcaatgatagttttaatgn

SEQ ID NO: 4836 - DNA, 1830 bp, Glycine max
  misc_feature (1718)..(1830): n is a, c, g, or t
  Peptide Sequence Number=SeqID_7127
  Probeset Number=SeqID_14615
atttaacctagaaataaagaaaagaaaaacaaaagcaaaacggcatgtcgtgtaatgtaatgaaacgaatgaaatgataggtaggtggaggattgagagagcgcggtgttggttcaccatgaggaagtttggtgcttgaacttgatcccgaacattgccattcatacatagagaatggccatggcccgaagagtccctcgttatgttttaggatcggtccaaaggaacatgttcttcaaatatttaatgccatgtaattatggtgttttctttactttttttaattacactttatgctggagacttaagttaatttgcaagggcaacttttctgcatctgccttctgatccatcatccaagaaacccaagtctggttggagccacctagcgactagagttaaatatactaaaattgagagaaccaaatgtaaatgggcatcgtccaataagggtgttttagtaggagtaacgatttcagattgggcaacagaatcagttacagttcttttagtaaatctgttgaacctacaatcccatcactttcccctgaatccttcctctcgcatggaatccatggctttcaatgccccgatgccttttgaattgtagtcaaccttccggagtgacatgtcctatcgaggttgcaacattccctcctcccatacaaattgactccaaaatatccgtttctcaaactcttgcaagatatatttttttcggcgcgaatgtattggctctagatgttgaaaatgtcttcttgttcaaaagttattttctaaaaaaaactagagcaacctcctccagaaatgattgcaatttgagtactagatattcgaaatccaatgcaaaaaaagaagaaccttatggtgggtaaatattgattgcatcaaaggttgacatctgtccaaatcctgattagtgtttataatactctagattacatttgatgcactaagattcattggcacctctcccattgactattacatggatggtaggatggaagaagaatctgagatatatcttatgcaattagtaaccatcataggtgtttcaaacacagatttcatacatattcttgagtcttatagtttttcagtataactatttttctgtgtctattgctagattgtaaaataagcatccttaaattgcgcatgtgatgatgcactgtataacatttacataatggacagcctcaagtatgaccaatattatttggcggtacgtgaaatggtttaatctcattcactggtgctgggagtatttctcaaagattggttgcagaactttacgaaaaagtcaaacagctgagaaattaactgctgttacaagtcaatatgagactacggtactcttcggctgtcacataattaaacaaatggttgagagagtttctcacagagataacttgcagagctttgtgcagaaatcagaaaacctagagaaacaatgcctttccaaggctatcagatcttactgtgaacttcgggtgttaccttatgaagaaaagaggactgttgtattttgacggaaacagaaaataaccaaaatacagtgcaccaaaatggtgtgcatctacattcatattcaaataatatcccacttcagttgtaaaatatgagcataaaaggaagattgagtcgattctttgggtccttgtaacatgctaattgcctaattcagtgaaatgaattcagcaactttctgagcttcnnnnnnnnnnnnnnnnnnnnnnnnnnnnnnnnnnnnnnnnnnnnnnnnnnnnnnnnnnnnnnnnnnnnnnnnnnnnnnnnnnnnnnnnnnnnnnnnnnnnnnnnnnnnnnnnn

SEQ ID NO: 4837 - DNA, 683 bp, Glycine max
  Peptide Sequence Number=SeqID_7128
  Probeset Number=SeqID_14616
cccttgtgtgggccgggttctgtttttttttttttctgtaggttgggcctaaacaaaaattgtgaggggttttttccttttccattaaaaaaaaattttgtggccctgcctttttgagtttcctggtttataggcctttgggggggaacgattttaactgccagaagtattccattagttctcattttttgcaccaaagagggggccaattaatctggaggcggcggggttcctcccaatttctctttggaggggccaggccacgggtggctaaactccaatttctaaaagggtctcaacctgtgagcaggcctttggaatccaatccttcgatgtcaagattcaggggagtttaggggataattcccaacaattgtcctagaaggatacagtacatatacctagtcgtgtatacctttccaggaggatatgcctttaatcagagctttcagaggatcctcaatgtccgtgatcgacgcatcttgcgtgtgcatacccttagagtcatagtgtgatttcagctctctgggggtaggaagcttcactttcctcggcggtttaggtgcaactttaggtatcgttacatctggcgtttgcatttttcagagtacaagcagtgtttgatgcagatcttcgtaggaatgttgcgttgccctcgcggcgctaaggtttatcccgtaatc

SEQ ID NO: 4838 - DNA, 1600 bp, Glycine max
  misc_feature (837)..(837): n is a, c, g, or t
  misc_feature (914)..(914): n is a, c, g, or t
  misc_feature (973)..(973): n is a, c, g, or t
  misc_feature (1027)..(1027): n is a, c, g, or t
  misc_feature (1119)..(1119): n is a, c, g, or t
  misc_feature (1251)..(1251): n is a, c, g, or t
  misc_feature (1254)..(1254): n is a, c, g, or t
  misc_feature (1363)..(1363): n is a, c, g, or t
  misc_feature (1475)..(1475): n is a, c, g, or t
  misc_feature (1498)..(1498): n is a, c, g, or t
  misc_feature (1513)..(1513): n is a, c, g, or t
  misc_feature (1535)..(1535): n is a, c, g, or t
  Probeset Number=SeqID_14617
tacctactccacttgtattgtgcaaggcgaagcgccacattcctcccccccacccggggcgaagttgggtaccgggtccccctccctcggaggtcgaacggttatcgtataaatcattattttcttttgttttcttctgtgcaacgaataacacgaagtgggtatcacaaaaacttatagcatttctctttcgcgcagcatgagtgtcgccctacactcgaagtatgtacgttcaaaggagtgttgtatcagtgcttaccttgtagctgctacgtcctgcacgcgggccatgaaagattacgactcataatattaacatcatgcatccgcctggtagctcgctgtgtgacgataggcaaaaacatatacttcaagctacagaagatacggccaacgtctttgcgcaataactctacgactcccatctacccctcactgtcgctatcgagtcttgacatccaatgacagcttcggcctccttagctcgacacccacatcccacttcatcctcacgtgtcagccatcgaaggatgaacaattataagatgacgcgagttattctatttcattgttcaataagatagcacccaagacgagcgaacaccatgaccctcgtgtcctgtgctcttaccgacccagactgttcaaatattgatggcaagccgcttgcacccaacgaataaccgacaaatccgcctaggtctccttatattgcccagaggtaccctactcacctttatccacatcatcgcaatcgtcataaacatcactcccgccacgcacatgcatattacagtggtagaagcattatcacacgtctcgctcaagtatttagtnatagcagacgactacttgaccttctccggtgcgtacatctctacatctacacagagcatatacgttcgcatcatacntacgtatcctacatagatgatcactcgcgtgtgtgatctccagtgacatgctcggtacnccattcgaacaacgctattcacatagtcgacacatttatacattcatccactcntgtatgcccctctctgggacacggacggtcgagcgatctcttatcgcatacgccagattatacgtgcgcagagatctgacaacttaggctancctgtcatagactctcatgtacattcgatgactagactagcgagctgctactacgaatgcagcagccacatcatcttccgatatgcctatgagagatcaatcataaaatctcgtataccatcgcaacgacgntcngtgctctcatacaacacggttcagtaccatcacgtggtgcgaatcacactggttacacgaagttcatagcagatctcatatacagaatgagagactctacaccatgacntgcatgtatctcacatctctacactgatctacgtactaagtagtagtgtttttcgtaatagagttaccgcatcgctcttgatatatcagacacacctgaacttagatctacntctgctatcacacgactctattngcctgtaagatgtcnatcaatgagcagctcaacgtanagatgacatgtagtcagctgtcttctattggatgaacgtgcactactctatcatcactcgactta

SEQ ID NO: 4839 - DNA, 624 bp, Glycine max
  misc_feature (99)..(99): n is a, c, g, or t
  misc_feature (125)..(125): n is a, c, g, or t
  misc_feature (134)..(134): n is a, c, g, or t
  misc_feature (198)..(198): n is a, c, g, or t
  misc_feature (203)..(203): n is a, c, g, or t
  misc_feature (209)..(209): n is a, c, g, or t
  misc_feature (212)..(212): n is a, c, g, or t
  misc_feature (602)..(624): n is a, c, g, or t
  Peptide Sequence Number=SeqID_7129
  Probeset Number=SeqID_14618
atggagaacagggtaatattacaggaatggtttgaccgcgttgactcggagaaaagtggaagcataacagcggtacagctgaagactgctcttgctgtnggcaacctggaatttccgctctcagntgttcagcnaatgatcaggatgtacgatttcgacaggaatggtactatgagcttttcaggtatctctattaancctanttatcnatncaccccattttttctatcactctctctgtttctaccctcaatcctaaaatttgttgactccacaacttccttctaagggaggctggaatttattaatttatggccttccaaacaaatttcaacccccctctcaattcgggggcattttttttcccaaaatattcccccccccctttggggggtgggggaatttttccaaaaagagggggggccccttttgtattccccccggggtttttttaaacacaagggggtgttggggggaacacattttttttttttaaagagggggggttttttttttcccccccacaaggggggcttctcccccgcagaaaaaaaaaaaaaaactctttttttttttttcccccacaaaaaaaaaaagagggnnnnnnnnnnnnnnnnnnnnnnn

SEQ ID NO: 4840 - DNA, 1825 bp, Glycine max
  misc_feature (1)..(1): n is a, c, g, or t
  misc_feature (8)..(8): n is a, c, g, or t
  misc_feature (29)..(29): n is a, c, g, or t
  misc_feature (45)..(45): n is a, c, g, or t
  misc_feature (55)..(55): n is a, c, g, or t
  misc_feature (85)..(85): n is a, c, g, or t
  misc_feature (175)..(175): n is a, c, g, or t
  misc_feature (185)..(185): n is a, c, g, or t
  misc_feature (190)..(190): n is a, c, g, or t
  misc_feature (215)..(215): n is a, c, g, or t
  misc_feature (235)..(235): n is a, c, g, or t
  misc_feature (241)..(241): n is a, c, g, or t
  misc_feature (267)..(267): n is a, c, g, or t
  misc_feature (272)..(272): n is a, c, g, or t
  misc_feature (295)..(295): n is a, c, g, or t
  misc_feature (297)..(297): n is a, c, g, or t
  misc_feature (299)..(299): n is a, c, g, or t
  misc_feature (303)..(303): n is a, c, g, or t
  misc_feature (381)..(381): n is a, c, g, or t
  misc_feature (389)..(389): n is a, c, g, or t
  misc_feature (393)..(393): n is a, c, g, or t
  misc_feature (444)..(444): n is a, c, g, or t
  misc_feature (453)..(453): n is a, c, g, or t
  misc_feature (462)..(462): n is a, c, g, or t
  misc_feature (487)..(487): n is a, c, g, or t
  misc_feature (489)..(489): n is a, c, g, or t
  misc_feature (516)..(516): n is a, c, g, or t
  misc_feature (527)..(527): n is a, c, g, or t
  misc_feature (548)..(548): n is a, c, g, or t
  misc_feature (568)..(568): n is a, c, g, or t
  misc_feature (596)..(596): n is a, c, g, or t
  misc_feature (780)..(780): n is a, c, g, or t
  misc_feature (791)..(791): n is a, c, g, or t
  misc_feature (1437)..(1437): n is a, c, g, or t
  misc_feature (1596)..(1596): n is a, c, g, or t
  misc_feature (1693)..(1693): n is a, c, g, or t
  misc_feature (1717)..(1717): n is a, c, g, or t
  misc_feature (1742)..(1742): n is a, c, g, or t
  misc_feature (1747)..(1747): n is a, c, g, or t
  misc_feature (1800)..(1800): n is a, c, g, or t
  Peptide Sequence Number=SeqID_7130
  Probeset Number=SeqID_14619
nggctgtngcgcgcgtcacagatacgatncagatgagtttggatnctatcgacgngaatcagagcacgcgcaagcatctactcgnttcatatcgtcgctcctacgatagagtcgcatcgcgccgactttcgatcgtttttattcgtatatgatcacgacgattatcgcatccacnctcgcatgtncgtcngagtcgtagttgtcgtactgcgtgntcgtcacctcgcgctcgcantctatngcatactgtatatactatcgatatanatatntatgactcgctcgtttctacatncntntggncgtcacgcgcgatcgtgtagtgtacgacacagtcgcgcacgctatacgtatcgctcggccgatcatatcatagtgcgncgttcagngcanccagtcatacgcagatgcgctcgtgtgccgcgcgaccgcgcgtctgactcncgacatatnctccgttgnctagcatacgtcatcatctgcgcantnatgcagatcagtcgcatcgagctatgncgctagacgtncagtcgactcgtcagcgatcncgatcaacgcggtgtgtcgngtgttgacgcgtgtcgtgcatacgtggntgtgtgtgatgcgtctcgcgcgtcaatgctctcgtactgtagtcgcatgtgtgtcgtcgcagttctctgtcggataccgatatgcgatgcatcattcatactcagctagtggtccaatacacgtatatggatgatgcagtcacgagcagtgagaaatatcgctatagatcgcgcgcggattctngcgatcgagtngtagagctcgacgcgcagagggtcgtgcgtgagcgtacgcgagcactgagagtgcaagatcgatacgataccagcagcagtgcgcgtcgcatatcggagtcgtgatgcgtgatcgacggacgcgacggaccacacgacaggataacagacagagtggtcatagacgcataggtgatgaagtcgttattcatctaccgtgctagtcgagagtgacaatacgacgcgtgcggactggatcatcacacacatgacatcacgacgatgtgtgcgcgacttcttatgtagtctctttgtcctagttgtattagatgcctgtaatgcatcgctattgcgggtcagtctggatataatctcatcgctacacttctaacgcggcgcgcggctcgcgcgcacgggcgatagctcgcgcgcagcggaatgtgcgaccatgtgtcatatcactttcggagtcgacggcaatacatatcattttctcgcctaccgcctgttgatctaatatctataacatatcgccgatgcgccagacgtctgatctggaagacgtcgcgcgctcgcgaacgacgtactgatagtagatccgatgcgcgccgacacatgtgccgccatacgttgtcggttcagagcacgagagcgcggcgacgcgtgngacgtcactatacgtacatgtggctacagcgtcagcgcgataggagaaacaatatgtatagagtattgaatgtgatatgttgtgattatgtaatagtcatgtataggatttgacgcgcgacgagttgcggtacagggctggagttcgctagcgcagctnggtgaagcctccctctcctatctcctcgagcgagtgtggtagcaacgcagcagttctccacattatagcagtgatctgatctaggtctgcgtatatntatgatgtgagaagacgcaaacgngtaataaaggtaagacacgaagcangaaanagatcgaccacctatcatatcactcttacggctacacagggcaataagatganaaactatgagaagaataaacatatc

SEQ ID NO: 4841 - DNA, 2044 bp, Glycine max
  misc_feature (1)..(2): n is a, c, g, or t
  misc_feature (14)..(16): n is a, c, g, or t
  misc_feature (20)..(23): n is a, c, g, or t
  misc_feature (25)..(44): n is a, c, g, or t
  misc_feature (53)..(53): n is a, c, g, or t
  misc_feature (57)..(57): n is a, c, g, or t
  misc_feature (60)..(60): n is a, c, g, or t
  misc_feature (64)..(64): n is a, c, g, or t
  misc_feature (66)..(66): n is a, c, g, or t
  misc_feature (76)..(79): n is a, c, g, or t
  misc_feature (100)..(100): n is a, c, g, or t
  misc_feature (108)..(108): n is a, c, g, or t
  misc_feature (112)..(114): n is a, c, g, or t
  misc_feature (117)..(118): n is a, c, g, or t
  misc_feature (123)..(124): n is a, c, g, or t
  misc_feature (136)..(136): n is a, c, g, or t
  misc_feature (149)..(149): n is a, c, g, or t
  misc_feature (154)..(154): n is a, c, g, or t
  misc_feature (159)..(159): n is a, c, g, or t
  misc_feature (161)..(161): n is a, c, g, or t
  misc_feature (163)..(163): n is a, c, g, or t
  misc_feature (175)..(175): n is a, c, g, or t
  misc_feature (198)..(198): n is a, c, g, or t
  misc_feature (207)..(207): n is a, c, g, or t
  misc_feature (251)..(251): n is a, c, g, or t
  misc_feature (258)..(258): n is a, c, g, or t
  misc_feature (261)..(261): n is a, c, g, or t
  misc_feature (263)..(263): n is a, c, g, or t
  misc_feature (267)..(267): n is a, c, g, or t
  misc_feature (281)..(282): n is a, c, g, or t
  misc_feature (290)..(292): n is a, c, g, or t
  misc_feature (394)..(394): n is a, c, g, or t
  misc_feature (416)..(416): n is a, c, g, or t
  misc_feature (418)..(418): n is a, c, g, or t
  misc_feature (422)..(422): n is a, c, g, or t
  misc_feature (424)..(424): n is a, c, g, or t
  misc_feature (448)..(448): n is a, c, g, or t
  misc_feature (452)..(452): n is a, c, g, or t
  misc_feature (458)..(459): n is a, c, g, or t
  misc_feature (472)..(472): n is a, c, g, or t
  misc_feature (496)..(497): n is a, c, g, or t
  misc_feature (499)..(499): n is a, c, g, or t
  misc_feature (510)..(510): n is a, c, g, or t
  misc_feature (526)..(526): n is a, c, g, or t
  misc_feature (540)..(540): n is a, c, g, or t
  misc_feature (545)..(545): n is a, c, g, or t
  misc_feature (567)..(567): n is a, c, g, or t
  misc_feature (575)..(575): n is a, c, g, or t
  misc_feature (605)..(605): n is a, c, g, or t
  misc_feature (608)..(608): n is a, c, g, or t
  misc_feature (622)..(622): n is a, c, g, or t
  misc_feature (624)..(624): n is a, c, g, or t
  misc_feature (638)..(638): n is a, c, g, or t
  misc_feature (645)..(645): n is a, c, g, or t
  misc_feature (653)..(655): n is a, c, g, or t
  misc_feature (672)..(672): n is a, c, g, or t
  misc_feature (682)..(682): n is a, c, g, or t
  misc_feature (684)..(684): n is a, c, g, or t
  misc_feature (686)..(686): n is a, c, g, or t
  misc_feature (752)..(752): n is a, c, g, or t
  misc_feature (775)..(775): n is a, c, g, or t
  misc_feature (779)..(779): n is a, c, g, or t
  misc_feature (786)..(786): n is a, c, g, or t
  misc_feature (864)..(864): n is a, c, g, or t
  misc_feature (882)..(882): n is a, c, g, or t
  misc_feature (895)..(895): n is a, c, g, or t
  misc_feature (920)..(920): n is a, c, g, or t
  misc_feature (981)..(981): n is a, c, g, or t
  misc_feature (1035)..(1035): n is a, c, g, or t
  misc_feature (1041)..(1041): n is a, c, g, or t
  misc_feature (1046)..(1046): n is a, c, g, or t
  misc_feature (1049)..(1049): n is a, c, g, or t
  misc_feature (1051)..(1051): n is a, c, g, or t
  misc_feature (1092)..(1092): n is a, c, g, or t
  misc_feature (1111)..(1111): n is a, c, g, or t
  misc_feature (1145)..(1145): n is a, c, g, or t
  misc_feature (1174)..(1174): n is a, c, g, or t
  misc_feature (1220)..(1220): n is a, c, g, or t
  misc_feature (1245)..(1245): n is a, c, g, or t
  misc_feature (1296)..(1296): n is a, c, g, or t
  misc_feature (1340)..(1340): n is a, c, g, or t
  misc_feature (1351)..(1352): n is a, c, g, or t
  misc_feature (1401)..(1401): n is a, c, g, or t
  misc_feature (1463)..(1463): n is a, c, g, or t
  misc_feature (1478)..(1478): n is a, c, g, or t
  misc_feature (1493)..(1493): n is a, c, g, or t
  misc_feature (1643)..(1643): n is a, c, g, or t
  misc_feature (1660)..(1660): n is a, c, g, or t
  misc_feature (1664)..(1664): n is a, c, g, or t
  misc_feature (1680)..(1680): n is a, c, g, or t
  misc_feature (1721)..(1721): n is a, c, g, or t
  misc_feature (1746)..(1746): n is a, c, g, or t
  misc_feature (1758)..(1758): n is a, c, g, or t
  misc_feature (1807)..(1807): n is a, c, g, or t
  misc_feature (1866)..(1866): n is a, c, g, or t
  misc_feature (1906)..(1906): n is a, c, g, or t
  misc_feature (1933)..(1933): n is a, c, g, or t
  misc_feature (1950)..(1950): n is a, c, g, or t
  misc_feature (1956)..(1956): n is a, c, g, or t
  misc_feature (1960)..(1960): n is a, c, g, or t
  misc_feature (1965)..(1965): n is a, c, g, or t
  misc_feature (2016)..(2016): n is a, c, g, or t
  Probeset Number=SeqID_14620
nngggggggggttnnntggnnnntnnnnnnnnnnnnnnnnnnnntgtttgttncttnttnctcntnctttttatannnntatttataattaattcctgtnatataaancaannnaannaaagnnagagaccgcacnacctatatagtcnagggnggcgncncncgcccggggggngacgaggagggcgagatggaggncgactgcgngcctgccgagccgagttacactgtcgtggggctgctgtgtgagncgaggcngangnttgnagagaggtcgcggnntggcggtnnnctctttctatcgtgttcgcgctccgtgctcgcgcatgagcgatcgtcgtgcgcgcggtatgtagaagtatctcgttagtttaatgtctttctgttgtagtgntgctgccgtctgcaggagcacnangcgncncgggcgcagagtgagtgtaatacnctcnctgacnnacgaacggcgcgnccgccgcagagtgcggcggggggnngngtgagcaccangttgctctctgccgtngctgtgtcgatggnagctnagcgccttctcgcaggtgacgncggtggtnatatagtgcaatctcgtgagcactgcgagnagngacgtagtcatgantnatagggagagtggncgagagnaggggggnnncgagacgctgagctgangtctttgtcntntnctactctgtgtgcgtgtcgcaagctctgtgtgtcgtcgctgccggcgagcaatgcgtgttgtgtantgatttatatattatatattcgngtgngttttanttatatatatatatgactatatatatcatggcgatctttgtcggcgggagaatgaggtactatgcgcgcgcgtggcgntatatatgatttcatggntagatcggtatgnggtgatataatgatagtgagtctgngggcgcgctgtagataatgcttccgtgtctttactatatattataatctgtgtctggttgntatattattaaattacatcatagctgtgtgtatgtgtatatatatgatgataancaatcnagtcnacnancttcggcgcgctcgcaagaacgtgcacgagaggcgtgacgngaggagaggtgaggagtancgctggtcgtagatgtgtgatgcgagatgtctancgggatcactctgtgctgcgcgctccacncgtctccgcgcgctccccctacactcagctctaatatccgtgactngacggtctgtgtgtaatgatggtgngtgtgtgttgtgtcagtcgcgccgcgtcgcacccgcaacgcgtcggtgcgntgtatgtcgcgcagtcgatgtgtgtgcgcgttcgtgtcgtcgcncggtgcgggcnnaggtcggtgcatgggtgacgcggcagtaggtaagcgcactcctcgactntctgcttcaccctctatccttacgtctctcagctcgtagcgtctcacgcttgttgttccgantgtggtctcttctgncgcggcgcactgganctcgcgcgatgctacgctccatcgtccgctgtagcatcgctgctctcgcacgctagcgacatgtctctcgatcacacttgcgatgctgtccccagctcctctccgctcgctgccctctacgtcctcgcggctcctagactcacggaatcnactctctacgctatacntgcnacatcacattgtaatntatcacactcagccctgtgctcgttcctcgtgtgccgtcgntgtgcatcgatgctctgtctggtancgacgcgcgatnacttaatttctctagcgctactgtcctctctctcgcgcggtgatcgcanctgattcgtgacgtctgagcgacgtgctgtgagtgcgagctccgtgcttgatagcatgntgattcgtcgtccatttgtcgcagtgacgctgactacgangtggtagatatcgacgccgacacgctngcgtgacatgcgagctngtactncctngccgntcgcgcaggtcgctcatgctagcgcttgacgtctcagcacgagcctgccgntggtgagtgcgtcgtgtgagctgcgcgg

SEQ ID NO: 4842 - DNA, 1457 bp, Glycine max
  misc_feature (1)..(1): n is a, c, g, or t
  misc_feature (114)..(114): n is a, c, g, or t
  misc_feature (216)..(216): n is a, c, g, or t
  misc_feature (251)..(251): n is a, c, g, or t
  misc_feature (361)..(361): n is a, c, g, or t
  misc_feature (443)..(443): n is a, c, g, or t
  misc_feature (1317)..(1317): n is a, c, g, or t
  Peptide Sequence Number=SeqID_7131
  Probeset Number=SeqID_14621
nctatactcattatgtcgatctatcatgttacgtgatatacacagcatatacgatgatatatcgtgtagcgcaacataatcgctaggcacatatactcgtcgacactggtcatnttatattcattcgctctaaacctatccctccagtctatgtggtgtgttatcgtgtgatcacttatatgtagggatgtcagtcactctccttacgtacagatnttcgagcacgcaccgatttagggtgcggtgtgcgnatagtgtcgcggatgctatcttatatctctgaccgcgacggcgcctcgtattcgtactagtgtgttatgcagtctgtgcaatagcatcatgatcggtaagtgacggcgtngtcggatatgaattatcagcaccgagtcacagactcatatatatagctgtagcggacactgacatctaccacacagaatagnagacccacagtatgtaattcagctagtaacactgatcgatcatatagggccattatcatatatatatgtgagagttctagaatgatcgtcacgcgcgatgttagatatattagatcttcatttcatattctccggtcgatcgcttaagtcacggttgagtactcgtcttagggccatgtatcagttactcgctagctgaatggtagcaggatgtagacatgttccacacgtcctgatactgctagcgcgatacgtctttagtgcgcagcataatgcagcatgcgggttgcgcggtgtccactcgacggtattcaatattgcggtgaagaaaatatattatcggctacgatatcgctgatacatacatttcggtgtgttctgctagtatcgtcatattcatatttggtagctgtgcgatatataattcctcttatatagattcttatcgcttctcatgctagacatctgagttatagtgaaagacacagccaatcaaatgtactaggatggtcgtggtgggtgtgttaaacataaataactcctaaagtgtcggcaatgtaggccgggcggtcagtcataccacgcatggcaaatgctccgtagcgcggggggtcgagtatttgtttgtgagtaggcggtcgcctattatagtcggctgagaaagattacatatgcctccctcgccccgcaccctcagtctaactatcatgagagacacggaacgtctcgcgcgaacagacacatcaaacatttgtaacactctttgattattctggtattagtagtgttgctctctcgcgtctaattcgctctgtatttattcgtgtgttgctattcctatctcttattttactcagacaaaaaatctccctcncccatctcccaccctcatactgtggaaaacaagcgcgcccctccccccgcgctccgcaatctcctaactcatcaaataactcaaatcaatactatatccacctcattcgcataaaatcagagctcaagattaatacgtcc

SEQ ID NO: 4843 - DNA, 720 bp, Glycine max
  misc_feature (720)..(720): n is a, c, g, or t
  Probeset Number=SeqID_14622
aaacaaacacaaaaaaaaaaacatggcagctcaagcctcgggtctctttagctccgccgtaacaaccgccgctacctccggcgtaaaaaaactccaccttttcacaacaacccaccgtccaagatccctctccttccccaaaaccgcaatccgcgccgagaaaacagactccgccgccgccgccgccgccccggccgccgccgtgaaagaagaagctccggtgggattcacgccgccgcagctggacccgaacacgccgtctccgatcttcgcgggaagcacgggtggtcttctccgcaaggcccaggtggaggagttctacgtcatcacgtggaactcgccgaaggagcagatcttcgagatgccgacgggaggcgcggcgatcatgagggaaggtccgaacctgctgaagctggcgaggaaggagcagtgcttggcgttggggacgaggctcaggtccaagtacaagattaactaccagttctacagggtgttccctaacggtgaggttcagtatcttcatcctaaagatggggtttatccggagaaggcgaatgcgggaagagaaggtgtcggtcagaacatgagatctattgggaaaaatgttagtcccattgaagttaagtttactgggaaacaaagttatgatttgtaagttgtggaaacttaaaatgtgaaaaaacaaaaatcatgtggatgtgactatgtttggttttaatn

SEQ ID NO: 4844 - DNA, 1828 bp, Glycine max
  misc_feature (35)..(35): n is a, c, g, or t
  misc_feature (64)..(67): n is a, c, g, or t
  misc_feature (134)..(134): n is a, c, g, or t
  misc_feature (136)..(136): n is a, c, g, or t
  misc_feature (160)..(160): n is a, c, g, or t
  misc_feature (229)..(229): n is a, c, g, or t
  misc_feature (294)..(294): n is a, c, g, or t
  misc_feature (416)..(416): n is a, c, g, or t
  misc_feature (805)..(805): n is a, c, g, or t
  misc_feature (899)..(899): n is a, c, g, or t
  misc_feature (1090)..(1090): n is a, c, g, or t
  misc_feature (1103)..(1103): n is a, c, g, or t
  misc_feature (1129)..(1129): n is a, c, g, or t
  misc_feature (1235)..(1235): n is a, c, g, or t
  misc_feature (1237)..(1237): n is a, c, g, or t
  misc_feature (1401)..(1401): n is a, c, g, or t
  misc_feature (1430)..(1430): n is a, c, g, or t
  misc_feature (1441)..(1441): n is a, c, g, or t
  misc_feature (1579)..(1579): n is a, c, g, or t
  misc_feature (1581)..(1581): n is a, c, g, or t
  misc_feature (1590)..(1590): n is a, c, g, or t
  misc_feature (1616)..(1616): n is a, c, g, or t
  misc_feature (1647)..(1647): n is a, c, g, or t
  misc_feature (1690)..(1690): n is a, c, g, or t
  misc_feature (1773)..(1773): n is a, c, g, or t
  misc_feature (1828)..(1828): n is a, c, g, or t
  Peptide Sequence Number=SeqID_7132
  Probeset Number=SeqID_14623
ccacctcacacctccctcaccactacctaccaacnctatctgtcactcagacatgcgacgaggnnnngggggtgcgccaattatagggtgacaggtcggttatcttacgcgcagcacgcgcgctcaggaggggnangcacgaggcataacccgccacctnagtctttcattgtctattctctagaagcaggttcactgagagagtactaagtgtgtggtgagctatctnctcacgaagaagctgcctgtcggacacagcgctgcgtcgcatattatcgtatcttaggattgtgnctagatcatctacatctctagcagatctgcgtgagcacagtgtacgaacacaatgagtatatggatagaaagaggtccagccgcgctatcttatagacagtgtatatcagacagacaatcanggctatctcgtatgaatacccttcctcgagctggtagatgcgattaactaggtagcacgacactagatctcgtcgcacgctgaacttcactctcctgcgtgataccacctcccgacgtagctgctctagtgctacaataaacagaccactcttactacaagaatgaacatagatctacaagatcgcaggcatcgcaccaattcatactatatgtactgatatgagaggtcgacagcacacatctctggcgtgaccatttacgctacggagacgtgtggtctacactcgtactgcatcctgcccgcctagtgcgtgcacccgcgtcaccactacgtacgtgatgcatctccaacgtacggctcaacgtagcgcactacgaccccacaccnattaattattatatacagccgtcagatatgtaaatctgggcgtatgactcacactctactgcatacacaacgctagataggagctccaactcanctactaggagttcctgcgtcactgcaagcaagatgaatgctagagacgacaacgcaagagatattcggcacgaaggatgagactcttcgagagacgtatcaactaagacatatcgattcatgtagcgagatgactcacagcgcatcgccacacaacgcgatggattagacgacagtagatccgaagtgagnctcaactacatanttgagcgtgagacgatggtcgcctcnccgatgcaccacgctcgcacctcatatatgagtgtgctgcagcgcatcatctgtctaggtgcacacgagatcatagactatgattgccagacatggatgtgtatangntgtggaagatggaatatgactgcactacataacggatacgtgtgagcgtctcgacggacgtagtctcagtatgagtcatatcaccgcacttagtactgatctgcaccacaaccgtgagtatcgcgcgatgactatattcgcactacgtacataacctggcgacnatagcgcgtgatgcgtcgatgactcaacnggagtttgctncacgttaccagcgtcgcatctacgtctatgtgcacggctgaagcgcgacttgctgacatgagattatcacatactactctatcgctatccatatatatcgagtcatatacatctcacaacgtacgccatctcgcgacncnactgtgaanagttacacttgacgatggacagagangtaacgctcatatgtatatatgttatatctntcagcacagcagcagaggtgaacgacgtctgtatgatacgatntgatatgtaatagacaccttcgtttgcgacgacgcacgctgcgtctaccgtctccgatgacgtcgtacagctgtatcatgagngacactcgctatgatactgctatctgattcactctctcgtcacgcatgtctcgtn

SEQ ID NO: 4845 - DNA, 504 bp, Glycine max
  misc_feature (39)..(39): n is a, c, g, or t
  Probeset Number=SeqID_14624
atttcccctctctctcgccgatttccttggctcccacangaaaacgacccccgcggcgaccagaggcacaccggccatggcggtgcagcagctccgttcgtcggagcagcgtgcctggcctcaaggccgcgcgctccttcgccgaacggcgctcgccgtgtcgagcacatggcgagattgtgagccgatccccgccagcgatgcgcacaacgcgctggacggcgaggcggggaggcgagcgccggcgaccgcgacatcaggagacaacggcaacgtgcgcggcgactgccacgcaacgtgcgtccataagggaggcgccgacgggtgcttttgtgcgtcgtctcgagggacggcggtgtcccgcccatggcgtactcgcacggcggcggccgtgcggacccgcaggccggcgtcatcaacataaggcccagcccctctttcctttaatttctttcgtcggggctggggatttgcggattcctcctctatggtttggatttggtg

SEQ ID NO: 4846 - DNA, 1540 bp, Glycine max
  misc_feature (1)..(1): n is a, c, g, or t
  misc_feature (103)..(103): n is a, c, g, or t
  misc_feature (178)..(178): n is a, c, g, or t
  misc_feature (226)..(226): n is a, c, g, or t
  misc_feature (231)..(231): n is a, c, g, or t
  misc_feature (251)..(251): n is a, c, g, or t
  misc_feature (260)..(260): n is a, c, g, or t
  misc_feature (299)..(299): n is a, c, g, or t
  misc_feature (538)..(538): n is a, c, g, or t
  misc_feature (651)..(651): n is a, c, g, or t
  misc_feature (710)..(710): n is a, c, g, or t
  misc_feature (819)..(819): n is a, c, g, or t
  misc_feature (826)..(826): n is a, c, g, or t
  misc_feature (870)..(870): n is a, c, g, or t
  misc_feature (956)..(956): n is a, c, g, or t
  misc_feature (1013)..(1014): n is a, c, g, or t
  misc_feature (1019)..(1019): n is a, c, g, or t
  misc_feature (1062)..(1062): n is a, c, g, or t
  misc_feature (1068)..(1068): n is a, c, g, or t
  misc_feature (1137)..(1137): n is a, c, g, or t
  misc_feature (1165)..(1165): n is a, c, g, or t
  misc_feature (1188)..(1188): n is a, c, g, or t
  misc_feature (1211)..(1211): n is a, c, g, or t
  misc_feature (1262)..(1262): n is a, c, g, or t
  misc_feature (1285)..(1285): n is a, c, g, or t
  misc_feature (1332)..(1332): n is a, c, g, or t
  misc_feature (1423)..(1423): n is a, c, g, or t
  misc_feature (1429)..(1429): n is a, c, g, or t
  misc_feature (1453)..(1455): n is a, c, g, or t
  misc_feature (1460)..(1460): n is a, c, g, or t
  misc_feature (1469)..(1469): n is a, c, g, or t
  misc_feature (1477)..(1477): n is a, c, g, or t
  misc_feature (1480)..(1482): n is a, c, g, or t
  misc_feature (1486)..(1488): n is a, c, g, or t
  misc_feature (1494)..(1494): n is a, c, g, or t
  misc_feature (1496)..(1498): n is a, c, g, or t
  misc_feature (1501)..(1501): n is a, c, g, or t
  Peptide Sequence Number=SeqID_7133
  Probeset Number=SeqID_14625
ngtgtgggtaaggagttctgggacgtattatcagcaactgtgagacgatagaggacgcgcgcggcgcccctgcgactagcggacagagcgagtgagtgtacantgatccatagcacagacgcgcctgctatatatctgcttacactagcttcgtgacgcatgagatcactggtgatancgcatcaatcatgctgtgcatccatgcgtcgtagatagcacaatattntatcntcaacatatcagtgatatanacatataantcactagcagtgacgacagcatataggatcggatgtganagtggagctacgtgcctcagacacgctcagtgtgcggcgtcctctcctctgcgagcatgaagagcaggtgtagggtggtcgcgacgctgtgggggtggacagcatataggatcgcgctcatgcctcatatccaactcatgttatcgctcgctaggactggctacatacagtagtatccgcgcacgctctatgtaatgacgagcgtacgcgcgaacgacatacgacgagacgcgacacancacgacgcccacaccacaccacacatacagacaacacacatacacgtcgcgggatgcgcgtagagcgacgacgcggctcatctacgagtatagcgtaagcctattctatcatntgtgctatctcgtacgataacttcgatatgcgagctggaggtagatcagactaatacantctgattggataagcaactagccagtgctcaatacgacgatgtatgttatagatgaggcgtggtggtggatgtcggcgcgagcaccaagtagcacacgacactagcganccagtgntgagcgatagcagacaatccacgaatatgctatgagttatgtantgatgatatcaccatctgacgactgcagatacatacggcagagagcagagtgtgacggctgtagttatggtgagcgtgtcgtatcnttgactgtgctcatctatccaacactctagcgcagaccgccgctagccccacccgcnngcgancccctcccacgaaacgatgtgaggagaatatatacacacaacnagctantgagtacatactagcgagtgatggaggggagatggacgatgcagcaccatctataccactacattatcntctgctatcacagtctcactacatattnttcatatgtagactgtacgcgtnacagcgtcgtgttgtgtgcttcnactatatagaggatgtgagacagagcacaggagcgacgtcgcgcggcgtcngcgcgtctgcagccgcccgagcnggcggcgggcgcgggcgagcagcgctgcataccacataatctatacnactctctagtgtgaggcgaagaagagatagagaatactacggaggacagtcatcgatacctcatacacatatcggatacatatgaagaagngagagncgatagttatgagcgagcgcggcnnnggggncgggggggngagagganaannnaaannnagaaanannnaanacgaggggggggcgaccgtccaccatacacacacactcc

SEQ ID NO: 4847 - DNA, 558 bp, Glycine max
  Probeset Number=SeqID_14626
cgatttatgtattggaaagagaaaaagttatttgcaaagtcttgtttcatgcaacacatcaatctgattccttcagcaaacttattttcatcactaaacgtatgtttgtgtggatgttttcaaactattctccattttaccaatacacaaaacgcttaaagattttgttatttttgcgttttatgcattggaaagagagaaattttgttgcaaagtctacacaaacatacgttaaagccgtgtttcacgcaacacacatcaatctaatggctctaaacggtatttccacaccaaggttatacaaaaccatttgcaactacaattgagttcacaacatagtttctggggttgtattagtttgcatgcaatttttcataaagtcaaaggttacaataaaattattatgagtaattatattcatctggattgagagtagaaagaagtgtgtgataagaagaaaagaaaagaaaaaggtaaagagaaaaaaatataaatgtaatatatgacgtcaacggaaaaggagatgatatatatataaagaagaaaatatgatggaag

SEQ ID NO: 4848 - DNA, 660 bp, Glycine max
  misc_feature (445)..(445): n is a, c, g, or t
  misc_feature (501)..(501): n is a, c, g, or t
  misc_feature (511)..(511): n is a, c, g, or t
  misc_feature (515)..(515): n is a, c, g, or t
  misc_feature (519)..(519): n is a, c, g, or t
  misc_feature (549)..(550): n is a, c, g, or t
  misc_feature (554)..(554): n is a, c, g, or t
  misc_feature (562)..(562): n is a, c, g, or t
  misc_feature (566)..(567): n is a, c, g, or t
  misc_feature (579)..(579): n is a, c, g, or t
  misc_feature (581)..(581): n is a, c, g, or t
  misc_feature (584)..(585): n is a, c, g, or t
  misc_feature (591)..(591): n is a, c, g, or t
  misc_feature (606)..(606): n is a, c, g, or t
  misc_feature (612)..(612): n is a, c, g, or t
  misc_feature (623)..(623): n is a, c, g, or t
  misc_feature (628)..(628): n is a, c, g, or t
  misc_feature (630)..(630): n is a, c, g, or t
  misc_feature (632)..(632): n is a, c, g, or t
  misc_feature (636)..(636): n is a, c, g, or t
  misc_feature (642)..(642): n is a, c, g, or t
  misc_feature (647)..(647): n is a, c, g, or t
  misc_feature (660)..(660): n is a, c, g, or t
  Peptide Sequence Number=SeqID_7134
  Probeset Number=SeqID_14627
gaacacatcaacaacaacaacaacaactactactactaccataaccaaacaactctacatcatctttatttagtctttgcaccaagactactttgcgcaacaccaaaacacatccacttaacacactccactacacaaatcatccaaaatgggcggtgttgtctcttgcatcaagtcttgtctccagaccatcggagatgccatcatggccgttatcggcggtgtcggccgcatcctccaggccatcatcggcgccattgtcaagttttgcggcatcatcgtcagcttcctcacctgtggctactgcggcagcaagggcggacgcaccaagcgacgcggtcactcgcacatgaagtcgacgagagtatagaggagaagaatctctcttcttgcacagaaataagaacgtttgaagtgataccaatttgagaaaaggagacggtanaagaggggatgatgatacacctggtggaagaaggagtttgcgactaccataacggncttttttttnttgnctgnatagcattaggatcccaatcctcgattttnnactnaaaaaaanaaannggaatatgtttnanggnntctgcngccgggaatcattanttaaancggccgcccgngggantncncttngtcttnggggnaatcaactggcgn

SEQ ID NO: 4849 - DNA, 527 bp, Glycine max
  misc_feature (7)..(7): n is a, c, g, or t
  misc_feature (9)..(9): n is a, c, g, or t
  misc_feature (20)..(20): n is a, c, g, or t
  misc_feature (24)..(24): n is a, c, g, or t
  misc_feature (30)..(30): n is a, c, g, or t
  misc_feature (32)..(32): n is a, c, g, or t
  misc_feature (34)..(34): n is a, c, g, or t
  misc_feature (91)..(91): n is a, c, g, or t
  misc_feature (108)..(108): n is a, c, g, or t
  misc_feature (137)..(137): n is a, c, g, or t
  misc_feature (139)..(139): n is a, c, g, or t
  misc_feature (141)..(141): n is a, c, g, or t
  misc_feature (151)..(151): n is a, c, g, or t
  misc_feature (160)..(160): n is a, c, g, or t
  misc_feature (162)..(162): n is a, c, g, or t
  misc_feature (166)..(167): n is a, c, g, or t
  misc_feature (192)..(192): n is a, c, g, or t
  misc_feature (197)..(199): n is a, c, g, or t
  misc_feature (202)..(203): n is a, c, g, or t
  misc_feature (209)..(209): n is a, c, g, or t
  misc_feature (212)..(212): n is a, c, g, or t
  misc_feature (220)..(220): n is a, c, g, or t
  misc_feature (223)..(223): n is a, c, g, or t
  misc_feature (228)..(228): n is a, c, g, or t
  misc_feature (233)..(236): n is a, c, g, or t
  misc_feature (245)..(246): n is a, c, g, or t
  misc_feature (251)..(252): n is a, c, g, or t
  misc_feature (256)..(256): n is a, c, g, or t
  misc_feature (262)..(262): n is a, c, g, or t
  misc_feature (267)..(267): n is a, c, g, or t
  misc_feature (282)..(282): n is a, c, g, or t
  misc_feature (291)..(291): n is a, c, g, or t
  misc_feature (294)..(294): n is a, c, g, or t
  misc_feature (296)..(296): n is a, c, g, or t
  misc_feature (309)..(311): n is a, c, g, or t
  misc_feature (313)..(313): n is a, c, g, or t
  misc_feature (315)..(318): n is a, c, g, or t
  misc_feature (321)..(321): n is a, c, g, or t
  misc_feature (323)..(325): n is a, c, g, or t
  misc_feature (328)..(328): n is a, c, g, or t
  misc_feature (331)..(331): n is a, c, g, or t
  misc_feature (336)..(337): n is a, c, g, or t
  misc_feature (339)..(339): n is a, c, g, or t
  misc_feature (341)..(341): n is a, c, g, or t
  misc_feature (343)..(343): n is a, c, g, or t
  misc_feature (350)..(351): n is a, c, g, or t
  misc_feature (353)..(353): n is a, c, g, or t
  misc_feature (357)..(359): n is a, c, g, or t
  misc_feature (361)..(361): n is a, c, g, or t
  misc_feature (365)..(366): n is a, c, g, or t
  misc_feature (368)..(368): n is a, c, g, or t
  misc_feature (371)..(371): n is a, c, g, or t
  misc_feature (389)..(389): n is a, c, g, or t
  misc_feature (391)..(391): n is a, c, g, or t
  misc_feature (396)..(397): n is a, c, g, or t
  misc_feature (400)..(400): n is a, c, g, or t
  misc_feature (406)..(406): n is a, c, g, or t
  misc_feature (408)..(408): n is a, c, g, or t
  misc_feature (412)..(412): n is a, c, g, or t
  misc_feature (414)..(414): n is a, c, g, or t
  misc_feature (420)..(420): n is a, c, g, or t
  misc_feature (422)..(422): n is a, c, g, or t
  misc_feature (426)..(427): n is a, c, g, or t
  misc_feature (429)..(430): n is a, c, g, or t
  misc_feature (432)..(432): n is a, c, g, or t
  misc_feature (436)..(436): n is a, c, g, or t
  misc_feature (441)..(441): n is a, c, g, or t
  misc_feature (446)..(447): n is a, c, g, or t
  misc_feature (450)..(450): n is a, c, g, or t
  misc_feature (452)..(452): n is a, c, g, or t
  misc_feature (466)..(467): n is a, c, g, or t
  misc_feature (472)..(476): n is a, c, g, or t
  misc_feature (478)..(478): n is a, c, g, or t
  misc_feature (482)..(482): n is a, c, g, or t
  misc_feature (484)..(484): n is a, c, g, or t
  misc_feature (486)..(486): n is a, c, g, or t
  misc_feature (496)..(496): n is a, c, g, or t
  misc_feature (499)..(501): n is a, c, g, or t
  misc_feature (511)..(511): n is a, c, g, or t
  misc_feature (513)..(513): n is a, c, g, or t
  misc_feature (520)..(520): n is a, c, g, or t
  misc_feature (526)..(527): n is a, c, g, or t
  Peptide Sequence Number=SeqID_7135
  Probeset Number=SeqID_14628
ctaggtntncgctattgtgnccgngaaacngnanaatgggtgcactacaagtatgagtcggagctatggggcaagaagcgagtcatgatgntatgagatccttgcagngggaagaggagctgggagcaccgccagcnancngtctagatgngccggctgncnaggnncactcgaccagagaaggcccgcgcnggggnnngcnnggcganganaaaaccgnganggggnctttnnnngcaaagcgnngcganncccncaaaangaggnttttttttttttttnccccccccnccncnggggggggggggnnnanannnnccnannncanacnggaanncngncncggcgannanaaannnanacanncnggngggaggggggggggggcncncagcnnaanaccagngncagnanagccgnanggannanncnacgnggccnggggnnggnanagagcgggaccccnnaagannnnngngcgnangngacggagaanagnnngaccccgacnangccccgngacccnn

SEQ ID NO: 4850 - DNA, 352 bp, Glycine max
  misc_feature (291)..(291): n is a, c, g, or t
  misc_feature (323)..(323): n is a, c, g, or t
  misc_feature (341)..(341): n is a, c, g, or t
  Probeset Number=SeqID_14629
aaattagattttcattatatatatattcagactctcttcttcttcttcctcccatctcctcgcttcgacttttcttagggttttcgcgtgttcaatcgatggctaccctcgatagcgacgtaaacatgatccctgctggagaatcctcgagctccgtcgtggcttcttcgtcgagcaagaaggcgaagagattcgaagtgaagaagtggagcgccgttgctctttgggcttgggatatcgttgttgacaattgcgccatctgcagaaaccacatcatggatctctgcattnagtgtcaggctaatcaggccagcgctaccagngaggaatgcactgttgcnttggggggttt

SEQ ID NO: 4851 - DNA, 2818 bp, Glycine max
  misc_feature (1549)..(1549): n is a, c, g, or t
  misc_feature (1586)..(1586): n is a, c, g, or t
  misc_feature (2529)..(2818): n is a, c, g, or t
  Peptide Sequence Number=SeqID_7136
  Probeset Number=SeqID_14630
tacggctgcgagaagacgacagaagggggcacaggtccagatcttgctgctagtttttaaaaagtgaacaaaacctgctgctagtttttaaaaagtgaacaaaagacagcgtagaattattaaattcaaccgccattacataaaacaatcaattttttttttcactaactccgctctctgctcttcttcttcccccacaccggaggagagaaaaccaaaatcactcttcactgttagggttagggtttcgattttccccttatccaatctcgcagcagcgagatgggcgccaattcgttgccatcggcggaatcaaacttcgatctcgacgagcagatctcgcagctcatgcaatgcaagccactttccgagcaccaggttagagttttatgtgagaaggctaaggagattttgatggaagaaagtaatgtccagcctgtgaaaagccctgtgacaatttgtggtgatattcatgggcagtttcatgaccttgctgaactatttcgaattggagggaagtgtccagatactaattacttgtttatgggtgattatgtggaccggggttattattcagttgaaactgtaacacttcttgtgtcactgaaagtgcgatatcctcagcgaattactattcttagaggaaaccatgaaagccgtcagatcactcaagtatacggattttacgatgaatgcctcagaaaatatggtaatgctagtgtttggaagatctttacagaccttttcgatttctttccattgactgcattggttgagtctgaaatattttgtttgcatggtgggctttcaccttcaattgagactcttgataacataaggaacttcgatcgtgttcaagaggttcctcatgaagggcccatgtgcgatctgttgtggtctgatccagatgataggtgcggctggggaatttctcctcgtggtgctggatatacatttggccaggatatatccgaacaatttaatcactcaaacaagctcaagttaattgctagagctcatcagctggttatggatggatttaactgggctcatgaacaaaaggtggttaccatttttagtgcacctaactactgttatcgatgtgggaacatggcttccattttggaggttgatgattccaagggccatacgtttatacagtttgatcctgctcccaggagaggagaacctgatgtcacccgtagaacgcctgattacttcctatgatgttgctgccgcatatcatactcctggcacagttacatgggattaggcaaaattaactgggctattgtttccgcatgctccttgcccattctgctgatttacttattggggcaggtatactttacacccttttccccacaatttttagttcacccaaaaaatcatatatctgcagattctttgtacaattcaacaaggagaattgcatcagcatatttcaagaattcggggggagtttccctttggtggaatgcctttccaaccatttcaagcagttgttcctcaacctattcacacaggcgctgtttcacagtttcccaancggcctatggtttttccctcagttagcatctgctgancaatctagatttcaaatgcagcccccttggggaggtcttagtcctcatagccagtcaaggcagaaacaggaaacccttccacctgacttgaatattgattttgaatcaccagggtcacctgttaaacaatctcctggtgtccttgttgactcacagcaaccagacctagctttgcaactatgatgaggtattgttgtcatggtatggatatttccacttgaattggactggtcatgtgtttaaacacaataaagttggaactggaggggggaaccagtgacactatcaggtccatctggtctgagaaatgaattgggaaatgcttcgggagcatctgcccatgcatggatgtctgttggggcaggagggtttaaacaaggacccaacaattctagttcacccaaaaatcagatatctgcagattctttgtacaactcaacaagagagttgcatcagcatatttcaagaattcggggggagtttccctctggtggaatgcctttccaaccatttcaagcagttgctcctcaacctattcacacaggcgctgtttcacagtttcccaaccggcctatggttttccctcagttagcatctgctgaccaatctagatttcaaatgcagcccccttggggaggtcttagtcctcatagccagtcaaggcagaaacaggaaacccttccacctgacttgaatattgattttgaatcaccagggtcacctgttaaacaatctcctggtgtccttgttgactcacagcaaccagacctagctttgcaactatgatgaggtattgttgtcatggtatgaatatttccacttgaattgaactgttcatgaaatttggagctcctgtaatcgaatagtgaattttgatcccttgaaggtgtgcattataaattgtgaaaatgccacaggctacccggtattgaaaatttagcannnnnnnnnnnnnnnnnnnnnnnnnnnnnnnnnnnnnnnnnnnnnnnnnnnnnnnnnnnnnnnnnnnnnnnnnnnnnnnnnnnnnnnnnnnnnnnnnnnnnnnnnnnnnnnnnnnnnnnnnnnnnnnnnnnnnnnnnnnnnnnnnnnnnnnnnnnnnnnnnnnnnnnnnnnnnnnnnnnnnnnnnnnnnnnnnnnnnnnnnnnnnnnnnnnnnnnnnnnnnnnnnnnnnnnnnnnnnnnnnnnnnnnnnnnnnnnnnnnnnnnnnnnnnnnnnnnnnnnnnnnnnnnnnn

SEQ ID NO: 4852 - DNA, 1441 bp, Glycine max
  misc_feature (9)..(9): n is a, c, g, or t
  misc_feature (434)..(434): n is a, c, g, or t
  misc_feature (573)..(573): n is a, c, g, or t
  misc_feature (1195)..(1195): n is a, c, g, or t
  misc_feature (1341)..(1341): n is a, c, g, or t
  misc_feature (1345)..(1345): n is a, c, g, or t
  misc_feature (1348)..(1348): n is a, c, g, or t
  misc_feature (1353)..(1354): n is a, c, g, or t
  misc_feature (1419)..(1420): n is a, c, g, or t
  Peptide Sequence Number=SeqID_7137
  Probeset Number=SeqID_14631
ctaaacgtnatagtggcgacataggagcttgcgcgtgggtgtggaatagcgtggtgtggggcggagcgcattgacgtgagaagagagcgggaggttataagttaatagagtcggtgagaggcgagccaacgggcgcgtgacaaccccgtccatacactaatatgtctgctgcgcgcgagcggatgtggcgggtagtgtgatgagggcgggtttcatcttagtacggaaatgcgagtgaggggcgggggcggtgcgtgggagaattgttactatgagacaacccgctttgtcgtacaccacagaaagtgatagatgcacgggcacgacatagcaccgaccacgttgtgtgatgttgttttatgtgcccgccacatcaatagtgtagagaaaagtaaataacataaatagtgtatggttagttcgttgcgtacacntgtcgagcggtgtctggatatgctgtttacatgatcccggcggtgtgggaaggggttgtgggtgaataggtggaggaggggggagcagtggggaaatgtgagccaagcagcctcgtattcagactgtgtggggggcggngtgtcgttggttggtgtatcaataactcactcatcctcctaccaaggagggatgtagggggcgtggtttagctgatttaacgcactcgcggggacggcgggtgtgcgcggggacgtaagggacgagcgaggaacgacgtgactataatgcaacacctacagagcgttggagctaagggtgcgtgtgtctcccgacggtggtcgcgagcgcgatagcgggggccgtgcaggcgcgggggcggcaggtggcggtcgactagaatcggagaattgacccgcacgtcacaacgtcccatgagaatcgtctcagcactcgcgtacacggtaatctcgtattcgattgggtgggggaggtggtcgctaccgtattctcccgtccgctgctcctcggactttgggggtcgtgttgagcgtttggtagggtggagggggcggcgtatggtcgtatatagccgctgtaaatactataaatctctatagacggtggggaggagaggagggaggaaaatgtctgaatagtcactagcggcgcccgtcagcacgtgctagaaaaaataagggagaagcggagaaagataaataaagcacgtagcgcgttctagagtagaaaattaataatacangagaagggagggggatacacacacgcaaaggaaaaatccactaggaggaaagaggtggaagagactgacacctctatctccgtagccaatgtccgtgctggaaatatctgcacgggtaaagaggatcgcgccgcccgtcgcacacncacnagnggggnncgccgggcggggcgggtgcggaggggaagaggaggagtggggaacgggacaacaccacccaacgnnagtattgaggtgggcacccac

SEQ ID NO: 4853 - DNA, 291 bp, Glycine max
  misc_feature (25)..(25): n is a, c, g, or t
  misc_feature (54)..(54): n is a, c, g, or t
  misc_feature (156)..(156): n is a, c, g, or t
  misc_feature (280)..(280): n is a, c, g, or t
  Probeset Number=SeqID_14632
ttttttttttttttttttgtcatanagtagctttgtttttgttttaacatcggngtttctattttcattcttacttagcttattgttaattgtatcattttgttgatgttgtttaaatcaggaatagttttgtttgcttttgaaattttttcgtanacatttcatttatgtactgtacttggctggctgttgcttttcctgcatttaaaaattctgcttttgggttttttttgcacttttttctctctttgacatcaattattcagtgattgtgtgtganttgtgggtgtg

SEQ ID NO: 4854 - DNA, 1543 bp, Glycine max
  misc_feature (1)..(1): n is a, c, g, or t
  misc_feature (48)..(48): n is a, c, g, or t
  misc_feature (82)..(82): n is a, c, g, or t
  misc_feature (128)..(128): n is a, c, g, or t
  misc_feature (167)..(167): n is a, c, g, or t
  misc_feature (213)..(213): n is a, c, g, or t
  misc_feature (850)..(850): n is a, c, g, or t
  misc_feature (1089)..(1089): n is a, c, g, or t
  misc_feature (1130)..(1130): n is a, c, g, or t
  misc_feature (1320)..(1320): n is a, c, g, or t
  misc_feature (1377)..(1377): n is a, c, g, or t
  misc_feature (1422)..(1424): n is a, c, g, or t
  misc_feature (1493)..(1493): n is a, c, g, or t
  misc_feature (1497)..(1497): n is a, c, g, or t
  misc_feature (1500)..(1500): n is a, c, g, or t
  misc_feature (1514)..(1514): n is a, c, g, or t
  misc_feature (1527)..(1527): n is a, c, g, or t
  misc_feature (1531)..(1531): n is a, c, g, or t
  Peptide Sequence Number=SeqID_7138
  Probeset Number=SeqID_14633
ntcagttgagtccgtctatgctcgtcgcagagccgtgatatattaacntcatgtctattatatcgtctcatatctcatacgnctcgctaactagagagagcgagctgtcacctatccgtcagcactantcatatctgcgagtcggtagcggctatgttccgcactgntcttgtacgcgatgacgcagattatcgtcgcagtacacacagaggngcgtcacctgaaagtacatatgaagctaatgcgcggcgtcactacaggtcatcgtgcgtcgttctccgcgcgcccgggcgcgctacacatgcaatcgcagtcgtgcacgcaccgtcgtgcgcgagtgcgactgaatgaacatcggatgtgagctactatgagtgggtgtgagttagataacaattcgtagcactccgagggtgtgtatgtatgatgtgacagcgatcgctgaacagtttcatattgcgtgcggcccttcccttaccactcacatcgtctacctcacattaacgaataaatcgactcactctcgtcgatatcgtggctatttgtctgccgctgtccgtgtctcgcgacctccttccacactacccaacacggtacgcgctgcaacgcgtagtgtgtcgagaagacatgacagaagcggtacgtattaggcggtggtaattgaactgctacgtgtcacaccagccaccgcccacttcacagcatcagcctaaacactatggctggagtgggcaccggacttaggagataatgaaatatataaacagaacacggagagtggactatagaggtattcgcatctatttaatgacgttggcgtataactgtgtgcgcgcgcgtcgtctgtcantacccaccgcagccacgacctccacctcgcctgatccccacggctcccaacgcgctctcgtcaacaaaaacctgggcattctcaggaccgagaacacacgacagccaaaggagaaggggagccacggacgagaacggtgtgatggcgacgtgacaggagtagttcgggcgtgtcactatgcagcgtgtggattgtaaatgtagatcacactgagggggcacaaactacgcccgacacanaataacacacccgcaatgctcaggactgcgcgccaccaccntccccaccacatcctagcgtgccattagcgggagtgttatacgtgggttgggcgttatggtggtgcggggatacggggcacgggggaaagtagggggtgggcgtgatccatcgatctagcgagcgtcccattgttacgactcatgacgaggtgttgctcgtcgtagcgttgtctttcttctctatcgttncacccacccaccacaacagcaactataataaaaccgacgcaacatttgatgtctctntttctccgcccgcgtttatgagcgagtataatacaggtgtttttnnntaacagacaacatcagtgtgccgctacacgctccgcgccggattcgtagggccacagcgcgggtggggnaggncgngagggtgagaaagnaggcccaaaaagncccncaaccccaccca

SEQ ID NO: 4855 - DNA, 2024 bp, Glycine max
  misc_feature (23)..(24): n is a, c, g, or t
  misc_feature (33)..(34): n is a, c, g, or t
  misc_feature (42)..(42): n is a, c, g, or t
  misc_feature (44)..(47): n is a, c, g, or t
  misc_feature (49)..(53): n is a, c, g, or t
  misc_feature (56)..(56): n is a, c, g, or t
  misc_feature (58)..(60): n is a, c, g, or t
  misc_feature (62)..(63): n is a, c, g, or t
  misc_feature (66)..(67): n is a, c, g, or t
  misc_feature (73)..(73): n is a, c, g, or t
  misc_feature (77)..(77): n is a, c, g, or t
  misc_feature (79)..(80): n is a, c, g, or t
  misc_feature (85)..(85): n is a, c, g, or t
  misc_feature (87)..(89): n is a, c, g, or t
  misc_feature (93)..(93): n is a, c, g, or t
  misc_feature (95)..(95): n is a, c, g, or t
  misc_feature (115)..(115): n is a, c, g, or t
  misc_feature (124)..(124): n is a, c, g, or t
  misc_feature (129)..(129): n is a, c, g, or t
  misc_feature (213)..(213): n is a, c, g, or t
  misc_feature (235)..(235): n is a, c, g, or t
  misc_feature (309)..(309): n is a, c, g, or t
  misc_feature (358)..(358): n is a, c, g, or t
  misc_feature (388)..(388): n is a, c, g, or t
  misc_feature (403)..(403): n is a, c, g, or t
  misc_feature (416)..(416): n is a, c, g, or t
  misc_feature (515)..(515): n is a, c, g, or t
  misc_feature (550)..(550): n is a, c, g, or t
  misc_feature (616)..(616): n is a, c, g, or t
  misc_feature (803)..(803): n is a, c, g, or t
  misc_feature (806)..(806): n is a, c, g, or t
  misc_feature (927)..(927): n is a, c, g, or t
  misc_feature (952)..(952): n is a, c, g, or t
  misc_feature (1123)..(1123): n is a, c, g, or t
  misc_feature (1157)..(1157): n is a, c, g, or t
  misc_feature (1193)..(1193): n is a, c, g, or t
  misc_feature (1195)..(1195): n is a, c, g, or t
  misc_feature (1202)..(1202): n is a, c, g, or t
  misc_feature (1247)..(1247): n is a, c, g, or t
  misc_feature (1363)..(1363): n is a, c, g, or t
  misc_feature (1367)..(1367): n is a, c, g, or t
  misc_feature (1391)..(1391): n is a, c, g, or t
  misc_feature (1479)..(1479): n is a, c, g, or t
  misc_feature (1560)..(1560): n is a, c, g, or t
  misc_feature (1575)..(1575): n is a, c, g, or t
  misc_feature (1607)..(1607): n is a, c, g, or t
  misc_feature (1620)..(1620): n is a, c, g, or t
  misc_feature (1715)..(1715): n is a, c, g, or t
  misc_feature (1765)..(1765): n is a, c, g, or t
  misc_feature (1767)..(1767): n is a, c, g, or t
  misc_feature (1793)..(1793): n is a, c, g, or t
  misc_feature (1848)..(1848): n is a, c, g, or t
  misc_feature (1903)..(1903): n is a, c, g, or t
  misc_feature (1915)..(1915): n is a, c, g, or t
  Probeset Number=SeqID_14634
ttttttttttttttttttttttnnttttttttnntattattntnnnnannnnntanannnannganngaagtngaananntattnannnttanantaaaataaagagaaacagtnaataataantatanaatatatatatgttatagagaatttttgatatagttatgaatggtatgtaagattagtatattggtatatgtatatagttatanatatagtatagataggtagtgntgctatattttcagtgtaggtatcgtcttgtatgtagacgtcatgtctgttattatctgtatatctgtcgctcntggggcgagtataacgatattattatgcgcgatcagtatatagatgcantgagattctcgacagtcatgataatcatanactgtcagatgtcantaatgctcgtctncagactcggttgcacatatatacgtatatacttgtctatcgccgtcgcactagctctcgatgtctaatgatagatgtagcagactcatgacgacgaagnattcagtaccacgtagatagacaatgtgacagccnacagcgccattgcactacgcgcatagcacatcaacgcatccgacgagcacacagctgtatacgacnaacacactgactacgaactatcgttgacgcgagactatgagcgcatagatatcgtagaacatgtctatatctctatacagctcgctctcacgcgcgatgcgacgtcagtcgacatcacgatgtagaacggaaagtatctgagcgcactgcacgcaggtcaccgctcactcgtagtcagagtataganatnacgtatgttcttatatcactgacactcgtatgcgctcacgaccgctgacgtcgaaggcaggtcggcggtgactatatggcacgagtcgagctgtcggtgcgacgacgatcaagtctagcgntagcgtgacgcgctgacgcgcaccngctcacacacaccatctcgactgtgcaccactcgcagaccaatcaccgacaatacacgagcctcaacgacgccacttcacgcatgaatgacactcatagactgaggtgcgcgtcgtcccgtcgctcgcgtcgtcgatcgtgcgcggtacgtctggtgtgtatgtcttgtcnatgtcccgacgagcacggagcatgagctctgcanctcgtgtgcgactcatcggctgtactgatcatctgngntgtgtgncgtgtgtgcgttgtagtcagtactagcgctactgtcgtaccgctnctcctctacgtctctgatgctctatcgctacagcgtctgtgaggagtcgtgagtggtatgacggccgcatgtgcgacaactctgtgacgctacgtgtgtagcggcagaacttgctntatntgagacgatcacgtcacgactagncatgcgctgcatgaccgtgaagacacttcgtactgtgcgcgtctgtcgcactccggagtcgagactgcgccgcgtgcgagctgggctncgacgtacgcgacgggctctattgactcgtgctagtcgtgccatctacacgctctgtcatctgctgcgactatccgtgcgngtgctactgtatctnacttcgctctcgcctatacgtatcgtatgtcntaacgtgttgagntgagagctgagagtgacggcatacacgacctgctcgctgacgtgcgcaggtcgtctgagcgcctatgacgtgacgcagcggagaccgctagcatncgatcgcacgtgtcatgacgcgagcatgtcgccatgaccgtactgtagangncgtgcgacaagctctgctaggttganagagatagctgtgatataaactagtattacgactgatgacgcgagcgttccaganagactgatcagtaactcgatacatacaagatctctgagtcgcgcgacagactgcnatcgataactgnccacagtctgcgcgacgaccacgtacatgaatgttgtgctacgctcgctcacgatcagacaatggcagcacagcgcactaacatctcgcaccgatccctctatcccgag

SEQ ID NO: 4856 - DNA, 1428 bp, Glycine max
  misc_feature (1)..(1): n is a, c, g, or t
  Peptide Sequence Number=SeqID_7139
  Probeset Number=SeqID_14635
ntaccgggccccccctcgagtagctacgtaggccccccccccaatctttaataaaagatattaaaatcctatggcttccagcaacaagattcacgttgttatcgacaacaagctctatgacttgaccaagtttggcaagacccatccaggtggcagtctcatccttgaaaacttccacgactgtgatgtcactgattatttctatgccatccactctaagcaagcccaaaagatgctcaagaacatgccctcatctgacattgctgaagaggacaaagtcccccaaaccgattatttgaagctcttgttccaactcgaaaagaccgatcttttcaaggcagattatgttgttgagtttgttcaaatcttccacacaatcgttttgttcttcttggcaacttggtatggtcaaacctaccctgtcttttccgctatttgcctcggtttcggtaccctcatcggtggttgggttggccatcaatgcgatcatcagagagataacattatgagagacgtcaacttggtttacgccactgtttgcgacggcctttctccccactggtggtccaccaagcacaaccgtcaccacttgagcaccaacgaaactgaacatgatggtgatattcaactcttccctttcatctacctctggacccccaagaaggaccaagattcctggaacagagccatccaacacatctatttcaccgcattatacactatccttcaaattaaatggcaaattgactctgttcaatgggccatttctcaaagaaactacaaggagatggttggtttggctatccactgggcctggtacatcttcttcttgccttggcaagtctggactttgggagtccttattgctggtaccatttccgcttttgtcgtcacagctagtcaccaagctgagcacaaatacgaaggaaagaaggaattcgaaggagaagcagcaaatgttcgtagatccaaataccaaatccacgactatttcacccatcaagtcgtcaccaccagaaacatcgacctccacaactggttccttaattacatctgcggaggtatgcaataccaaatcgaacaccacgtcttccccagaatccctctttataaacttcctcttgtcaagggtgttgttcaagaatattgccaaaagcatggtgtagaatatagagatgaaggtttcatggatatcatgatgagaaactattatcacattgaaacaatcgctaaggtcaaagcccaagcctaaggttacaaagtataagaagaatttaataaattcatattttcttatatatgcttgcttgttctttctttatataatgcgtgaataaatttgcctatcccatttgttggaagtaagcagaatttgattttttttatcaaacgataattcaaacattattttaaaaaaaaaaaaaaaaa

SEQ ID NO: 4857 - DNA, 1612 bp, Glycine max
  misc_feature (1)..(1): n is a, c, g, or t
  misc_feature (6)..(6): n is a, c, g, or t
  misc_feature (95)..(95): n is a, c, g, or t
  misc_feature (158)..(158): n is a, c, g, or t
  misc_feature (160)..(160): n is a, c, g, or t
  misc_feature (163)..(163): n is a, c, g, or t
  misc_feature (217)..(217): n is a, c, g, or t
  misc_feature (227)..(227): n is a, c, g, or t
  misc_feature (232)..(232): n is a, c, g, or t
  misc_feature (236)..(236): n is a, c, g, or t
  misc_feature (274)..(274): n is a, c, g, or t
  misc_feature (330)..(330): n is a, c, g, or t
  misc_feature (340)..(340): n is a, c, g, or t
  misc_feature (392)..(392): n is a, c, g, or t
  misc_feature (443)..(443): n is a, c, g, or t
  misc_feature (558)..(558): n is a, c, g, or t
  misc_feature (657)..(657): n is a, c, g, or t
  misc_feature (703)..(703): n is a, c, g, or t
  misc_feature (1243)..(1243): n is a, c, g, or t
  misc_feature (1303)..(1303): n is a, c, g, or t
  misc_feature (1420)..(1420): n is a, c, g, or t
  misc_feature (1423)..(1423): n is a, c, g, or t
  misc_feature (1450)..(1450): n is a, c, g, or t
  misc_feature (1456)..(1457): n is a, c, g, or t
  misc_feature (1460)..(1460): n is a, c, g, or t
  misc_feature (1464)..(1464): n is a, c, g, or t
  misc_feature (1466)..(1466): n is a, c, g, or t
  misc_feature (1468)..(1468): n is a, c, g, or t
  misc_feature (1512)..(1514): n is a, c, g, or t
  misc_feature (1516)..(1520): n is a, c, g, or t
  misc_feature (1522)..(1523): n is a, c, g, or t
  Peptide Sequence Number=SeqID_7140
  Probeset Number=SeqID_14636
natganagcggcgtgcgtttggcgcgtgtacgatgtatatgcatcgcgatatcgacggatcgctacgttcgtagaacagacatgtagcgcatgcnttttctatctgtggaggagagtatcgcgcaggcaacgcagcgacgcgggcggcgagtgagagnanagngacgtttatgatatacgatcgtcatcttcgcgtcagcgcgccgacagaggcgcnataaagtaangaggnaaangatatagtgcgtgtcgcgagaagtcagcgcgctaagtncagtatcactgatgtgcacgactctaacgttcatagagagatgtgtggtgcgtcgnacgctgctgnagacagcacagcgtatgacgatctgtacgcgagctattgtgccactactatntcatatatacatataacttagtagacgatgtcagagagcgagacgtgctangtcactagcacgcatagataggcgtgcgcacattactacatactcgcgcgcgcgtgggcagtgaacggtggagcgcagtatctagatacacagtatatatcgtgggcgtgcgcantgagcgagagtgtgcgacgcgcagagagatgctaggcgttgcgagttattatagaatagcgcactcacacagcgcaggagtctaccgcgagagagagtnataataatatgagtgtgtgggtgtgggtgtggactatgatataagnagcgatagtcacagcgaccgcgctctcctacatcctaacttatactcggcgcgatatactcgcatcgtatgtcatacacaatatacattatacgagagacgtagaatgtcgagagcacatcagccgtggtgtctaagtagatcgtctcgacgagctgataatagatatatgcgcacgtgccggctgtatccgactagtcccgatacccatactgacgcggcgtgcgagggcgtgacgggtgcggtggcagtgcgtataatattaatgtatagtagcgccgattgacggcgtatgcggggcgcagaactcacggacgccgtgggcgtatgacagtccaatggaggtgaatatagcacacactattgcgcgagcgtgtgtgcggcgtcgtggcgcggactaatacacggatagatatgagtagcggggcgacgagctcgcagtaaaataacagcaaagacagaggtggcgtaaccacgcaatacatacatagcaggcggagcacactgtcaagcatgcacagcctggttccctatcaatagnagaccgctctatattatgacgtgccagcagtacagacagagccaaacctatatatactanctattgatgcgccgtatcgactacttagtgactacgtgcaatttatctactagacgcagtcgtatcgtctactatctacgcgctaggctcatcagccgctgcgatgtgagggcgtgnggngtgagggcgctatttaataggtgatgnatttannctncagnangngttaaataggagacgcagttctagggggacctcatgctgagccnnntnnnnntnngtgtggatataatgtatggcgctgtggtggcgtgtggcgcgtgtggtctctccggcgcgacacagagtagaatgagagattgcgaagag

SEQ ID NO: 4858 - DNA, 1422 bp, Glycine max
  misc_feature (1)..(1): n is a, c, g, or t
  misc_feature (50)..(50): n is a, c, g, or t
  misc_feature (81)..(81): n is a, c, g, or t
  misc_feature (92)..(92): n is a, c, g, or t
  misc_feature (138)..(138): n is a, c, g, or t
  misc_feature (167)..(167): n is a, c, g, or t
  misc_feature (344)..(344): n is a, c, g, or t
  misc_feature (507)..(507): n is a, c, g, or t
  misc_feature (1312)..(1312): n is a, c, g, or t
  misc_feature (1399)..(1399): n is a, c, g, or t
  misc_feature (1406)..(1406): n is a, c, g, or t
  Probeset Number=SeqID_14637
ncgtctacgcccatactgcgtgatcacgtacgtgtgagtacaggagtagntcgagcagcatgcgtgcagcgcggtggtgcntaatagcacantagccgagtcagacggtcagacgagtaggaagagcgatacccaggngtatcagattgtcgtgcatgtagatgtgnatgtgtgagtatcaatagtgacggtcgtgagtatgcgtctccgctcgacgcatgtatcgatcagcttactatgttgtcagcaagacacgacatatcgaacacatatcattatgcgataggatagtagagtgtcgattgtgtctgtgcgcgtcacatgcgctgtgtatgtgtgtggtntagacggtcgcgtcgtagttgtagagaacggagagttaggtataacttatattggatgtggtagggcgacgtggactctcgcagcacaagtgtggcgaggctgagatcatatattcaagtagcaagaggtaagatggtgtggaagatatatgcgccaaaagtnggatgtgtgagcagcagaataaacaagagaggagcgcgaagacgacaacacggactgtctctcatagattccttgcgagctccggctctgtaaatgctgtagggtaaagcgcacgcagatagagcgcggtgtgagcatatgtgaaggtgaggtggagggataggtcagacagtagtggaggtcgtggagaagatcaccactatctgagaaagtgactggtgtagtggggcgggaaagaacagacggacatgagtagcaatagatacagcaccggtagcagaccgccgacgcggagcacacgcaataagagtacgaacgagacgtaacagagaggctagcgcggacacacgtcgcgaaaggggtcgaagcataggaatagggcgagggacggcggcgtgtgaggcgttgcatcgtggaccagagtgagcagtaaagggatggccgatgtcgacagtagtggctggacgaggcacggcgctgctattctcgggaggcgtagaagagagagacgactcggatgagccctacacaccgcggacgcgcaacgatacgacgacgcgaagccagagccgcgcctcggtagggtgaatgtcatagtggatccttcttggcctagtgcatagacgggggtggccatgagagcgatgaggatagagagatgcatgatatacgaacgctgtcttctttctggatctgagtggatggttacatacgtctatagtggtaactacgctatagaaagttatcctccccagtccagcgaggaggtattagcacctagtttgcttagagcccgctcccttcncagcacgacgtggtgaggcttgacaggatggttgtaggcacaatggggaacacaggcacacacacgaccacccgaacaacacaccanccctccnagcggggcccggcaca

SEQ ID NO: 4859 - DNA, 260 bp, Glycine max
  misc_feature (11)..(15): n is a, c, g, or t
  misc_feature (115)..(140): n is a, c, g, or t
  Peptide Sequence Number=SeqID_7141
  Probeset Number=SeqID_14638
tgcctgcacgnnnnntcgccgtaaagaagttaaacttatttgcctgtcagcaactgttgcaaatccagatgagttggctgggtggattggtcagatactcagattgtgctgtctnnnnnnnnnnnnnnnnnnnnnnnnnnacggtgaaacagaattggtaacatcatcaaaacgccctgttccgttgacttggcatttctctctgaagaatttcttatcaccacttcttaacgagaagggaacacacatgaacaggtgct

SEQ ID NO: 4860 - DNA, 1914 bp, Glycine max
  misc_feature (4)..(4): n is a, c, g, or t
  misc_feature (8)..(8): n is a, c, g, or t
  misc_feature (12)..(12): n is a, c, g, or t
  misc_feature (33)..(33): n is a, c, g, or t
  misc_feature (46)..(46): n is a, c, g, or t
  misc_feature (54)..(54): n is a, c, g, or t
  misc_feature (57)..(57): n is a, c, g, or t
  misc_feature (84)..(84): n is a, c, g, or t
  misc_feature (90)..(90): n is a, c, g, or t
  misc_feature (93)..(93): n is a, c, g, or t
  misc_feature (103)..(103): n is a, c, g, or t
  misc_feature (122)..(122): n is a, c, g, or t
  misc_feature (125)..(125): n is a, c, g, or t
  misc_feature (141)..(142): n is a, c, g, or t
  misc_feature (175)..(175): n is a, c, g, or t
  misc_feature (202)..(202): n is a, c, g, or t
  misc_feature (213)..(213): n is a, c, g, or t
  misc_feature (222)..(222): n is a, c, g, or t
  misc_feature (231)..(231): n is a, c, g, or t
  misc_feature (241)..(241): n is a, c, g, or t
  misc_feature (245)..(245): n is a, c, g, or t
  misc_feature (258)..(258): n is a, c, g, or t
  misc_feature (282)..(282): n is a, c, g, or t
  misc_feature (284)..(284): n is a, c, g, or t
  misc_feature (300)..(300): n is a, c, g, or t
  misc_feature (369)..(369): n is a, c, g, or t
  misc_feature (382)..(383): n is a, c, g, or t
  misc_feature (426)..(426): n is a, c, g, or t
  misc_feature (455)..(455): n is a, c, g, or t
  misc_feature (531)..(531): n is a, c, g, or t
  misc_feature (571)..(571): n is a, c, g, or t
  misc_feature (576)..(576): n is a, c, g, or t
  misc_feature (591)..(591): n is a, c, g, or t
  misc_feature (601)..(601): n is a, c, g, or t
  misc_feature (632)..(632): n is a, c, g, or t
  misc_feature (647)..(648): n is a, c, g, or t
  misc_feature (651)..(651): n is a, c, g, or t
  misc_feature (676)..(676): n is a, c, g, or t
  misc_feature (729)..(729): n is a, c, g, or t
  misc_feature (764)..(764): n is a, c, g, or t
  misc_feature (771)..(771): n is a, c, g, or t
  misc_feature (804)..(804): n is a, c, g, or t
  misc_feature (829)..(829): n is a, c, g, or t
  misc_feature (837)..(837): n is a, c, g, or t
  misc_feature (839)..(839): n is a, c, g, or t
  misc_feature (863)..(863): n is a, c, g, or t
  misc_feature (868)..(868): n is a, c, g, or t
  misc_feature (904)..(904): n is a, c, g, or t
  misc_feature (908)..(908): n is a, c, g, or t
  misc_feature (921)..(921): n is a, c, g, or t
  misc_feature (931)..(932): n is a, c, g, or t
  misc_feature (934)..(934): n is a, c, g, or t
  misc_feature (997)..(997): n is a, c, g, or t
  misc_feature (1018)..(1019): n is a, c, g, or t
  misc_feature (1023)..(1023): n is a, c, g, or t
  misc_feature (1032)..(1032): n is a, c, g, or t
  misc_feature (1079)..(1079): n is a, c, g, or t
  misc_feature (1081)..(1081): n is a, c, g, or t
  misc_feature (1132)..(1132): n is a, c, g, or t
  misc_feature (1167)..(1167): n is a, c, g, or t
  misc_feature (1231)..(1231): n is a, c, g, or t
  misc_feature (1275)..(1275): n is a, c, g, or t
  misc_feature (1311)..(1311): n is a, c, g, or t
  misc_feature (1314)..(1314): n is a, c, g, or t
  misc_feature (1318)..(1318): n is a, c, g, or t
  misc_feature (1320)..(1320): n is a, c, g, or t
  misc_feature (1339)..(1339): n is a, c, g, or t
  misc_feature (1343)..(1343): n is a, c, g, or t
  misc_feature (1349)..(1349): n is a, c, g, or t
  misc_feature (1354)..(1354): n is a, c, g, or t
  misc_feature (1496)..(1496): n is a, c, g, or t
  misc_feature (1554)..(1554): n is a, c, g, or t
  misc_feature (1571)..(1571): n is a, c, g, or t
  misc_feature (1578)..(1580): n is a, c, g, or t
  misc_feature (1590)..(1590): n is a, c, g, or t
  misc_feature (1596)..(1597): n is a, c, g, or t
  misc_feature (1605)..(1605): n is a, c, g, or t
  misc_feature (1633)..(1633): n is a, c, g, or t
  misc_feature (1676)..(1676): n is a, c, g, or t
  misc_feature (1699)..(1699): n is a, c, g, or t
  misc_feature (1705)..(1705): n is a, c, g, or t
  misc_feature (1711)..(1711): n is a, c, g, or t
  misc_feature (1716)..(1717): n is a, c, g, or t
  misc_feature (1744)..(1744): n is a, c, g, or t
  misc_feature (1750)..(1750): n is a, c, g, or t
  misc_feature (1754)..(1754): n is a, c, g, or t
  misc_feature (1762)..(1762): n is a, c, g, or t
  misc_feature (1768)..(1768): n is a, c, g, or t
  misc_feature (1771)..(1771): n is a, c, g, or t
  misc_feature (1777)..(1777): n is a, c, g, or t
  misc_feature (1793)..(1793): n is a, c, g, or t
  misc_feature (1811)..(1811): n is a, c, g, or t
  misc_feature (1814)..(1814): n is a, c, g, or t
  misc_feature (1819)..(1819): n is a, c, g, or t
  misc_feature (1827)..(1827): n is a, c, g, or t
  misc_feature (1867)..(1867): n is a, c, g, or t
  misc_feature (1876)..(1876): n is a, c, g, or t
  misc_feature (1878)..(1878): n is a, c, g, or t
  Peptide Sequence Number=SeqID_7142
  Probeset Number=SeqID_14639
cacncctncatntttcggttctacgtcgaggtnaacgtctctgctnacgctctnttnttccgtttgcgttcccgcgcttctagnaaccgngantcttcgtgtngccgcacacattatcgatncgncttcgcacgtcgcganngtctctccttcacacgctcttgtctctcgcagntgcgacgacctttctccgctctctctnctcgcctacanttcatctgngcgacactnacgcgatttntctncgcgtgaagtttncgcgcggccggctctgtgtcgttncncgggcgtatcacgctnctttcgagacagcctacacagccactactcttacgccacgatatctcttcaaatgtctctgacgtcatnttgtattctcggnncttcgtgcgtccctactctttcgcttacactctccagtgacgngcttgtctgcgctcttagtgcgggcgatncaatcttgtgttcggtctccaaggtgctaattctctctggggccgcatcttaaatttgcaatgtctgtggcgtcgnactctttcacgttcatgacacctggtacgtgtatccgcgnacaancgtttgtcagggatntctgctgcgntcgtaccccaccgcacattcgttctccgttnccctctgtattcatnngtnctctcttgcgcaaccggctacgcgngttgtcgtgttgcctcgctcgattcgttatcccgctcccacccactcccacgncaccatctactatcacttttgcttgtgttctttantcctctnctagaggtcgtctatagcgctccatttggcatntactgctattctaccgcccttcgtnctctaatnanaacaaagaaaacataacctatttncgtgnggcgcggcggttgggtgcgcgtgtgaaactcttgtntaanccctctaaatccnttctccgctnntnttctcctcggccttctccgctatcgagtcttagctccgaccaaaagacgtggtcggttggtantcgcgttgtgaggttatgtgnntcgncgatctcgngtacagcggtacggttcacgcgctcgtcgcgccgcgcctcgctcttntncctcttctcgcaagatacattcggttattcgaacatggaaatctcgctcgnttgcgctcgcggttctttctgcttcccatgtacgnaatactcgcttgcgattcacgcgcctccgcttcgctcgtgtgtcgcactcggtgcggctttgcncttcgatgtgctccatcgctcgccctctgcgactacgcgaagtnttggaaggactcggcggcttgggttggtcgcgggtntgnggtngncttcatctctaggtcgttnccgntggctngcgtnttcttgatctcctcgcgccgcaagagcgcatctcacacattactcgctcacctcgcccggctgtcgcgccttgtgttcttcttattccaaatttatgcgcggtggctcgcttgccgacacgcggcggcacggcgcgcttctntgctctcgctcaggcgtggcgaaatgataataaaataatatccttcactctatctctnctctcgctactctgctnccatctnnnctctccactntcgcgnnctctcggngcgcgctcctttcgttctcgcggggtcncgcttgcgtttctttatagcggcggagcaaagacttacgacancgctccgctctcgcggtgcgctncgcctncgtcgnctctnncgtctccgcgctcgcgtcagccgtcgnctctanctgnccgcgcgnctgtancgncgcttncctctcgctcgggttnccgacccagtcgcccaanccnccgtncgcgtctncgtctcctctcttcgtctctctctccctgtttgcgtcttncgtctcgtntngtatctgtcgtcctcgtgtgtctgcgtcgtgtcgcc

SEQ ID NO: 4861 - DNA, 709 bp, Glycine max
  misc_feature (2)..(26): n is a, c, g, or t
  misc_feature (28)..(67): n is a, c, g, or t
  misc_feature (69)..(70): n is a, c, g, or t
  misc_feature (72)..(74): n is a, c, g, or t
  misc_feature (76)..(76): n is a, c, g, or t
  misc_feature (78)..(82): n is a, c, g, or t
  misc_feature (85)..(85): n is a, c, g, or t
  misc_feature (87)..(88): n is a, c, g, or t
  misc_feature (91)..(92): n is a, c, g, or t
  misc_feature (97)..(98): n is a, c, g, or t
  misc_feature (107)..(108): n is a, c, g, or t
  misc_feature (111)..(111): n is a, c, g, or t
  misc_feature (113)..(113): n is a, c, g, or t
  misc_feature (117)..(120): n is a, c, g, or t
  misc_feature (125)..(126): n is a, c, g, or t
  misc_feature (129)..(130): n is a, c, g, or t
  misc_feature (133)..(134): n is a, c, g, or t
  misc_feature (138)..(138): n is a, c, g, or t
  misc_feature (143)..(144): n is a, c, g, or t
  misc_feature (147)..(147): n is a, c, g, or t
  misc_feature (149)..(149): n is a, c, g, or t
  misc_feature (152)..(152): n is a, c, g, or t
  misc_feature (156)..(156): n is a, c, g, or t
  misc_feature (172)..(172): n is a, c, g, or t
  misc_feature (178)..(178): n is a, c, g, or t
  misc_feature (186)..(186): n is a, c, g, or t
  misc_feature (690)..(693): n is a, c, g, or t
  misc_feature (696)..(699): n is a, c, g, or t
  misc_feature (704)..(707): n is a, c, g, or t
  Peptide Sequence Number=SeqID_7143
  Probeset Number=SeqID_14640
gnnnnnnnnnnnnnnnnnnnnnnnnnannnnnnnnnnnnnnnnnnnnnnnnnnnnnnnnnnnnnnnntnncnnncntnnnnnaancnncannacagnngtaaaaccnncangncaannnntgtanntgnnatnngggncaaannaantntgngggncaggcgcaacaaccanaacctngccaattngagcacgaccgggttcaaggccgatctcagcgcttttcagagccgcgccgtcacgggccccggctatgcctcgcgcgtatacgcgaccgacaacacggtgggttgggatcatggcgtcggcgccatcgagcagaccggcaatccgctcgacttggccattcacggggatggcttcattgccgtgcaggatgtgacgggcaacgaagcctacacacgggcgggcgatctgcacgtggatcccaacggtcagttgctgacagcgaccgggttgccggtgatgggtgacaacggcccgatcagcgtcccgccgcacagctcgatcagcgtcggccgcgacggaacgatgtcgatcgttccactcggacaaacgcccaacaccatttcgacggtggcgcgtgtcaagttggtcaacccggcgctggattcgatccagcgcggcaatgacggcttgttccgcgcgaacagcggtcagccgctcgagggggggcccggtacccaattcgnnnnaannnncaatnnnnca

SEQ ID NO: 4862 - DNA, 619 bp, Glycine max
  misc_feature (588)..(588): n is a, c, g, or t
  misc_feature (591)..(591): n is a, c, g, or t
  misc_feature (619)..(619): n is a, c, g, or t
  Peptide Sequence Number=SeqID_7144
  Probeset Number=SeqID_14641
tcgagtcagctacgtaggcccccccccccccccgaatccgacagaaaagcttatgctgaggaaactattgctaacgttaaaaaacaaagacaagttattgagaatttgaagaacgaaaatatggctttaagagaaacaattgctcgaattaacgatcagcaaactcaactgactcaaaatcttgctgcaaagaatgcaagttttgacacaatgagagcagaatacgaaatgtcaattgaaaatgaacaaatgaagatcagagaatatgacagaaatattgaagcttttcgtgacagaatcaagagccaaaagaaggatttaggtggtgtaaatgctggttctgaaaatcaaaatgctcttggcaaacagatcaaaattttagaaaatagacttgataaagcaaaccaaaagtttaatgaagcgattgctaccaacaagagtttgagacaaaatattgacagtttaagacgtgaaagagttatattcgataatctttataagaagttggaaaaggaacttcatgaaaagagaaagaatatggccagcattattgaaagtgccaacagtgcttatgaagagagagacaanggntaatgatcagattcaaaacttgaaacan

SEQ ID NO: 4863 - DNA, 1631 bp, Glycine max
  misc_feature (1)..(1): n is a, c, g, or t
  misc_feature (48)..(49): n is a, c, g, or t
  misc_feature (57)..(57): n is a, c, g, or t
  misc_feature (76)..(76): n is a, c, g, or t
  misc_feature (83)..(83): n is a, c, g, or t
  misc_feature (101)..(101): n is a, c, g, or t
  misc_feature (179)..(179): n is a, c, g, or t
  misc_feature (189)..(189): n is a, c, g, or t
  misc_feature (212)..(213): n is a, c, g, or t
  misc_feature (236)..(236): n is a, c, g, or t
  misc_feature (278)..(278): n is a, c, g, or t
  misc_feature (282)..(282): n is a, c, g, or t
  misc_feature (339)..(339): n is a, c, g, or t
  misc_feature (341)..(343): n is a, c, g, or t
  misc_feature (376)..(376): n is a, c, g, or t
  misc_feature (498)..(498): n is a, c, g, or t
  misc_feature (534)..(534): n is a, c, g, or t
  misc_feature (616)..(616): n is a, c, g, or t
  misc_feature (626)..(626): n is a, c, g, or t
  misc_feature (673)..(673): n is a, c, g, or t
  misc_feature (817)..(817): n is a, c, g, or t
  misc_feature (893)..(893): n is a, c, g, or t
  misc_feature (924)..(924): n is a, c, g, or t
  misc_feature (952)..(952): n is a, c, g, or t
  misc_feature (955)..(955): n is a, c, g, or t
  misc_feature (1059)..(1059): n is a, c, g, or t
  misc_feature (1354)..(1354): n is a, c, g, or t
  misc_feature (1438)..(1438): n is a, c, g, or t
  misc_feature (1547)..(1547): n is a, c, g, or t
  Peptide Sequence Number=SeqID_7145
  Probeset Number=SeqID_14642
ncggggttacgtgagtagtctgtagacggcgcaacgacgacgtgaggnnaagctcgncgtggcacgtcagagccgngtgcatntcgtcagtacacgcatcngactacatcacacctgcacatagtgattagatatccgtagatctggtataactgtgtcagtgcaattatatagattantatatgaganagcatgtgtcgtgagagagaggnngacaatatgaagtatatatatcntgtatctctctcgtatatatgttgttgagtgatgtatacgtnagancacaatctcgccgcactgtggcactatggtcgattccatcgatacaacgataccaangnnngcaccttagttcacacctcatactctacagtgngttcacatcatgccatgtgttctgctcgcgctacgatatgatatatgagataatcgctcatctccatactatatagtctacggcgacctccatataagtcaacgatctgatctgaattgttntagcagttctataataggtagtcatgatttgagaanggccgcatccacatcgtctaagctgtatatatgacatagtatgaggtcgtctatgtcaatacacagtatagggtgcatagtnacgccgcgtnacgtatatacatatcatgttggtagtgttattgccagaatatattancacgatgctatacatgtaaagtaatctgcgatgcatacctgacctcacagctcatcgtcatatctaacacttagtaatgaacagtatatattatatagaactaaagctgctcatgtcgcacttgtgaccatcgttaaatctgtnaacctagtcaccttccgctttgttactgtgaatatatactgggtgcgttctgtgtatctcttcgcgctacattgtngttctcctatttctcgcagcatccctcgatnactctcagcgagatatatataggcgggnagnagacaataatatggtattgctagaggtggagcggactagataggaacatctaggcgagtggcgtgagagcgcgagttctgagagtcacaagagtatagtgatancaagagcgcgattcggtgcggctcctgctcgacaaggggaagtatatactataaagagaacagaatacatgtacagaatggcaccagcaggcggaggcacgattcgggagataagtatcgcttgcactcgcacagtttgttataatcgcgcagagaggctcgtgatcgaagtccacagcgacgaggtgaagtaggggcaacatataacataagaaatcacacgacagaagtagtactctatatctttgaggtcttatcgctagtagaggtgtaaggagtatatttaatttatttntttatgtatttatgatgagcctgttccgttggttggtaagagatcgatgtgctttgtttttgcacaacaaactaaaaagtaagnaataatgcttatatatgggttttggagttcgttttgttatcatagtgtttggtggtttacacataatgtatgttatacagagttgaggaaggggcacctgcacgcggcnaagtcgagagcttgtgttgtgtggttattgctgtgggttatgtaggacgaagtacttagaagtagacatgaagaggtcaaaaga

SEQ ID NO: 4864 - DNA, 1588 bp, Glycine max
  misc_feature (26)..(26): n is a, c, g, or t
  misc_feature (31)..(31): n is a, c, g, or t
  misc_feature (467)..(467): n is a, c, g, or t
  misc_feature (700)..(700): n is a, c, g, or t
  misc_feature (835)..(835): n is a, c, g, or t
  misc_feature (1176)..(1176): n is a, c, g, or t
  misc_feature (1232)..(1232): n is a, c, g, or t
  misc_feature (1271)..(1271): n is a, c, g, or t
  misc_feature (1338)..(1338): n is a, c, g, or t
  misc_feature (1373)..(1373): n is a, c, g, or t
  misc_feature (1401)..(1401): n is a, c, g, or t
  misc_feature (1440)..(1440): n is a, c, g, or t
  misc_feature (1474)..(1474): n is a, c, g, or t
  misc_feature (1557)..(1557): n is a, c, g, or t
  misc_feature (1559)..(1559): n is a, c, g, or t
  misc_feature (1582)..(1582): n is a, c, g, or t
  misc_feature (1587)..(1588): n is a, c, g, or t
  Probeset Number=SeqID_14643
gcctcgtccgggcgccgtcctcttcncttcnctctctctcttacactcactgattccccttactctccccaaccggcgcacgccactcacggtctcgcccacaccccactcaacagacaccgcagaagatatatctgtagcttgtcctttctatgctctcactcatctctcctctcgaagaaggcggcacatgagtgctgttgtacgcactcatatagtatgcactactctcgtcgccattcgcattcatatctagtttcattgcgcgccctcatccaccctcgcgccacaactaatcgacgcttatccctccttgttcgttcttgtgtcttgctatccaccgcaagcgcgatatgtaataagacgtcatcataatataggtcatgccagactccaactacaccatctcgtcatgatatggccccccacgacgcctttatctaactatgacacagtatagctgtgcncagaaggtgaggggctagaaggtgtccgcactcgtgtatgcgtaggcgccccaagctgatgccgcgactttactagtctcatgcacttcttgacatctattataatacgacgctcactctacgcgcagccctggatatatcatttatactatactacctcgtcatcagcttctcttggtctacacttctatctcgcgttgtcttccatgtagtgtcccgcccacactaatgtntctcatctcttatcccacgcctacttgatcctctctacagccccgcactcgcctataatcgtgtattcgattagcacagctgacgacactgctagcgtgatctctactgttactaccaggcacatatagtagcanatgtgcgctacgacgcatctctgtcgactactgctgcattattcttcgacgttcgcttctgtgtgtatatacgagcgacggcgcaatggagctgacgtacaatctgctctttctctgctcctacgccatatctggtcccgcgctgcgacgactacactaagagtgtacctacacttagagtgcgcatacatgatattgtgatcattgagcatacggctagatgtacgtggacactcagccacccgtctagtatactatggtgtgcatgcgacagcacggtgattgaatcacagtccgcctactatgctaattctgtcattcatagctctatgattgcaagntgctctcgtactgttcgtgtccgtaatatgcgtgatctattcattatcatcttgcngacacgtgtcttgtcgcgttgactacgctattattccgntgctactaatcgctcgcgactcactcgttctctctcatctaccacatatctagactataatactatnatagtactagctctgatcgatcatacactcgactnactctgctcgtcgtgactatcgcagtcncacatctatgtagactcattacttctcgcctcccagcgnatgatgatgtacgtactgtctcactctctctgtntgcgcctacgcgtatctctgcctctcatactgattcgcatgatcagatgcgcgcttctgtaactagatcgcagctgtacgttnancacgctgaactctaaatcatcantatcnn

SEQ ID NO: 4865 - DNA, 344 bp, Glycine max
  Peptide Sequence Number=SeqID_7146
  Probeset Number=SeqID_14644
atagtataacagagacctccacaggcttggataatatctttcgttcattgaggagcggacgtcatgggcaccgcttgaacttgaggagtgataatagccagcaaatccgtgggtcaaatactgctgttgtaccacaaggccttgaggagttgcttgtcactcaattaaggcgacctactgctgaaaagtcatccaatcagaacatagcagaagcaggttctcatgttgagatgcaatttgaacatactgatggagctgtgagggatattgaagctgtcagccaggagagtagtggtagtggagcaactttcggtgaaagccttcggagcttggatgatgagatt

SEQ ID NO: 4866 - DNA, 1545 bp, Glycine max
  misc_feature (1)..(33): n is a, c, g, or t
  misc_feature (38)..(38): n is a, c, g, or t
  misc_feature (43)..(43): n is a, c, g, or t
  misc_feature (49)..(49): n is a, c, g, or t
  misc_feature (64)..(66): n is a, c, g, or t
  misc_feature (68)..(69): n is a, c, g, or t
  misc_feature (75)..(75): n is a, c, g, or t
  misc_feature (84)..(84): n is a, c, g, or t
  misc_feature (427)..(427): n is a, c, g, or t
  misc_feature (617)..(617): n is a, c, g, or t
  misc_feature (913)..(913): n is a, c, g, or t
  misc_feature (918)..(918): n is a, c, g, or t
  misc_feature (1188)..(1188): n is a, c, g, or t
  misc_feature (1448)..(1448): n is a, c, g, or t
  misc_feature (1523)..(1523): n is a, c, g, or t
  Peptide Sequence Number=SeqID_7147
  Probeset Number=SeqID_14645
nnnnnnnnnnnnnnnnnnnnnnnnnnnnnnnnnaaaanaattnaaaccncttaaccacaagacnnnannaacacnacaacaacncaccaacaaagcgatacacctacacgcacaggagccgcagcgaccataccgacactcacaccaagccgaaaactactcataaacaagacaatgggaggcgctgaagcaaacactaaggttggttgactttgctgttgtcttgtgatactgtcgttattttctcctatataactcgtgttacgaattatttgtatatgtgcgttgtgtttactgtcggctgagctcattgagtgtccgacatctcttatggtggttagtggtgtgtgttagatcaggagtcagacgcgtatcttgactatgtgtatatactatattatcattactataactctcacttctctcncactatctcgtttgatgttatgtgttattatgttagttctttatctcattcttattcttatactacgattcttctctctacttcctctcatcctacgtacgtctctctcctctactcttttattatatatggttctcagtttaatttagtgttctgtcgtattgtgtatttgacgaactatctcaggccntatcgtcgtctcgtatcggcgggttattgtgtatgtgatggcattaatctctggtgtcgtcttcctgctgcgtcctgcgtggctgaggttgtcctcgccttccgtcgctgtccgcgctcgtaacgtaagtttatgtggcgatgtcttcatagactatattatatttacgactgaatataatgttctagatctgataacacagttctacatgactcatacctattatctcacttatctctctcctctgctgacaatcatagcagtcaacgctaatactcacattagggtgcacaccngatgntcaatgagggctgtgcatcaggactatatatgtcttacaatcgagctgtactcatgagtctatcattagatgataacgtcatagccctctcgtatcatagtgtggaatacgtccgcagattagtacgtcattctgacggaaagatgatcgttatactatcacatctcgtctacatgctgcgcgcgtgcgtcatcatatctacatccacttagcatagaactgggatcgcagctgtgtattcatcacgttacacatacatatagtagccancgctctcctcagcatcacacgattgtgtgtttgcgtcacactcgcgagccgttgaatagacatctatactacacaccgcttatgatgtactcatcgcggcagcgatccccctgcacttgctgagttgcgatttaagcgtgtactagtccgatcgtcgtagtcgtaagatatctcagtcgaccacgtatatcgcatctaccctctatcgctgctctcgctgtgcagactggtatctaagtactgtcaatatctatactgtnctgcagatgcgatcgcgtgatgcaatcgctgcgtacgcttgcatctgcgtttgctcttatcctctactcactctntacattatctctcgctcttctg

SEQ ID NO: 4867 - DNA, 617 bp, Glycine max
  Probeset Number=SeqID_14646
atactcgttgagtttatatttcccaccctctgatctcccccgaggcgcgagcaggaagacgccggcgggcggctccggcgaccggagaatctgcggccttcctccccggcctttgcataagattgctgccagagtgaaactagtctgttggtggaaatggccagtacagcatgcttcgtgattgtaagtaagaacgacatcccaatctatgaggcagaagttggatctgcacccaaaaaagaagatctggcttatcaccatcagttcatcctgcatgctgcgctagatgctgtttcgggactaacatggaacacacccgccatgttcctgagcgcggctgacagatttactgacccttgcgacgtctggttacgcaacccgccggcgatattagaatcgtggtggttcccccacccccccagccggggcgggaactaaaacgctttttttcaacaaggcccttgaaattttacatgcaggaaatttcctcaatccccgctggcacccggcccggattttccggcatcccaaccgtcccccttttccgacccccccaggggggagcgggttccccctccgacggcaagaaattctggtaacccgttgttgggcccacg

SEQ ID NO: 4868 - DNA, 1734 bp, Glycine max
  misc_feature (54)..(54): n is a, c, g, or t
  misc_feature (138)..(138): n is a, c, g, or t
  misc_feature (157)..(157): n is a, c, g, or t
  misc_feature (179)..(179): n is a, c, g, or t
  misc_feature (267)..(267): n is a, c, g, or t
  misc_feature (559)..(559): n is a, c, g, or t
  misc_feature (752)..(752): n is a, c, g, or t
  misc_feature (997)..(997): n is a, c, g, or t
  misc_feature (1264)..(1264): n is a, c, g, or t
  misc_feature (1360)..(1360): n is a, c, g, or t
  misc_feature (1682)..(1682): n is a, c, g, or t
  Peptide Sequence Number=SeqID_7148
  Probeset Number=SeqID_14647
agcacgtctcgtagcttgactctctcgtgagtgattgacaatcgtctcgcacanccataagattcgtgcgtctcgccgttatgatgacgtacttccgagctgtgcaatgcaccggagatagcgcgttctatatagtgnctcatcgcgtctataccantctcaaagcatcgtctgacatncgctgacatgcatacagtatagacagcagagtatgaacggactatataaccatcagacgagagtaacagactcaagctcgagatacanaggcgcggacacgatcgatacaggactctcgtactatacacgtgtgcatgtaatcacgctgattctctcgttgatactttgcacacgcaccgcagtatacacatcacgcatgtacaacgatcaacatccatgcccgacataacacaatacatctgcagtagaaatgtccacgccgtcgagatcctagacagcagacgttacaactacgccgacgcgagacgcactcctagtacttcatacgctcttacaaatcggttgctgagtatggagtgtactagtacagaactcagtngtcaatagtgacagagatatatgcaatatcacggtctcgtgcgacacgcggaacttacgcgcaacatcacccaccatcatcgtgctccgccttcgcgatctcgcacgttcaccgacttcgcgtgcgacagcacgactcctatcataaattcacgtctccgcatgcttctcgccatatgatgatcagttcactnaactaatcctgctacacgcatgctgagacattacatcgacggacagtaagattcatagctataacaaacagagcacaacccgacgctacataccactactggctgtactacattgaccagtgacatattatcccgcctagagtcgcgactcagctagagtgagagtgcgcgatccgtcatacgtgattgtgaatttagatactgatatctaatatgaatgtgtgatatagagtagctcgaattcnctcgctgtcatctcactgtgcatcgctacaagagctcacagcgccacacgtacatgatagcacatcatcagcttctccacacaccacccagcgccgcgcactgcatctaccacacgccctcactacacactcgtgaaatgcagcgcggaactaaagtagcagatcactgcgtccgatacacagtgatgatgcagagatgcgcgtagtcacacgattacgggagcacgcgcgaacgtcacgccgtccatccactcaccgccctccacnacgtcacagaatcaaatcgtagactcacacaagtgactgtcagaaagagaacacacacgcacgcgacaacaacacatcacctcacgcgagctgggngcgccccgcactcgctcctgagtgtcatgtttgagagatgttagtagctgacgtgagataggacagtcgtacggccgcgccggatccccgaacctggcaaggatttatactcgagatggtgtatcgtgactcgatagtcatattctatcttattaagcagctaccctctctatctcctgctctgctctctgtcggctctcgatgtaaggtcgcagagataatcctatcactacatttgtatgaacgcgcactacagaacgatatatgttgtactagttacaacacacatatgaccgtaatagctgggcgtgctgtgtatctntactacgtacacccgcaccaaccgcactccctctcgtcctcggccaaacggc

SEQ ID NO: 4869 - DNA, 859 bp, Glycine max
  Probeset Number=SeqID_14648
ataatactaattgcttctgatcaacgacattgttgattcaagcacctgagccatggcttcactctcagtctcttcctcctcgacaatcatcgattcaagagctcctcttccttcttctcgacaagcctccgcctcttctccgtcgtgtatctcccttcccacacttcctcctcagccggctcagtctcagacacgtgctgcgaaagccactgcttactgtcggaagattgtgaggaacgttttgacgagagctgcggatgttgaagttgctgccactactcaagttgaagctcctgcggcgaataccgaagctgcgagtacagagttacctgatatcgtcaagaccgttcaagaagcttgggacaaggtggaggataagtatgcagttagttctctggcagtttctggttttgtggctctttggggaactgctggtgtgatctcggctattgacaggcttccgttggttcctggtgttcttgaagttgttggtattggttacacaggggtggtttgcttacaagaacctggtcttcaagccagacagggagtctttgtttcagaaggtgaaagacacatacagagacataattgggagcaactgaaccagaggatgatgaagaagaagaagagccttttagagggggccattcatgactttcgaatgaatctaacacagcccacatctttctttcaagcttcccttgttgtaactaaataattttcgtcctctctctctctgcctcgggtctttttagctcaaaatataccatatccatccatttatgtcagtgttgtaaattcctcaagactacatatataatatgagatgtttgttacatttttaccgagttttcac

SEQ ID NO: 4870 - DNA, 1791 bp, Glycine max
  misc_feature (341)..(341): n is a, c, g, or t
  misc_feature (421)..(421): n is a, c, g, or t
  misc_feature (561)..(561): n is a, c, g, or t
  misc_feature (801)..(801): n is a, c, g, or t
  misc_feature (831)..(831): n is a, c, g, or t
  misc_feature (933)..(933): n is a, c, g, or t
  misc_feature (1085)..(1085): n is a, c, g, or t
  misc_feature (1163)..(1163): n is a, c, g, or t
  misc_feature (1363)..(1363): n is a, c, g, or t
  misc_feature (1596)..(1596): n is a, c, g, or t
  misc_feature (1607)..(1607): n is a, c, g, or t
  misc_feature (1710)..(1710): n is a, c, g, or t
  Peptide Sequence Number=SeqID_7149
  Probeset Number=SeqID_14649
tgtggtgcccagcatcccgctccacgcaatactatttttcccaccgcctatctattttccgcgcgcgctgtaattccacgcctttcacgctgttcatccgcatcggttatacgcacacaccactatcgcgcctgtgcagtttcacccatgcttattttatacccattatactctgaaggcggcgcgagcactggttttgttaatacgaatagtggtagtgtcgagggtcgcgcgcactcaaactacgactatgcggaatagttttccaacactcatcacacttcttatacacactctcacttcccgcggcgcccacagcatttatctacacgcgccgcctnaaaatattataatattatcgttcccggataggagtgccgcattttaataaaacccccgcaatctatatatacatataatnacaacatctcacccgccccctctttatattatataaatgtcccgatcgcccgctatcacttattttgattagtgactatccgcccgccgcgaatataaacaaccgcccgggcggggcgttgggtgcacccccccgcgccnacacataactaaaaacctagcaacgtgttttatacacaccgtccccgctctcacggcgacaactatcaacgacgcctagatatatcggcgcgcgcgccggtggtaagattatacacatatatacgacctctgcgaatgaaaaagtaacgcagtcgaaccccgagcaccaaccccattcgtgctcttccattttctccacccccgcggcgcgtatttaattatattgtcggagttgatatngagaaaaagaatgtggacgccgccgcgggngtaaaaataaacatacgtctgtcggtgtcggcggcaacgtgaataataaccgcgcgggcgataaaatactgcggtcatacacaagctcgtcgtacactctancacgcagcgtgctgctgacgcataataaacgaccagcgacataggcggtggcgcgtgatactatgatatagcacattcatctgatcatactacatcgtgctatgcaaccctcgctctgaacggtgatgtttgtacgcccgacaacgccgcgnccgacgtcatattcacgcacactccactcgtcttattgtctccgcgacactcgctgtgtgacgcgcatcaactatgantgatgcaactgcgtgtattcgtaccaaaacgctcggtgggtgttggataatattcccgcatgtatgtgcgtgcagcgccacattagttgatgagctactccactacccgtttcatatctacctcacgcatattgttgggacgtcgcgcggtagatattgcacaaattaaataataccgccgctcgccacatacataacancggctcggtccgcgcgcgacacaatagatagcgtgacaatatatcgtccgacatcgcgcgccgcggccgcaagaatcacaaggcacataaatgatggtgtgtaatacaatacagcactgtcgcggacacgcggacgagagacgacacgaatatatacacggcgccgacgcgcgcgctgcggcgataagcggacatacagacatgaatgacgtaggtgcactctcgtcgccgangcgaccgccgnataatatacatagtaccgcgcataaactcgctagcggccgcgcggcgcgcggagaaattgatgatgtgtgacagagctgcaagcgcgccgtgcgcccgagcangcaaatgtcagtgatacactatcgtcgatatcgcccacgcgaacatataagaccgtcaaatgtcgtacgacgcgaacgagg

SEQ ID NO: 4871 - DNA, 480 bp, Glycine max
  Probeset Number=SeqID_14650
ctatttcgataagctcgagggcgagctcgagcggcgcagcatagcaggctattctccccgtccatggcgattctcgccgctcgattttgatttcttttccctttctctttgatctccagtgtcgcgtgtaatttgttctgcacttgcggtgtaatttgttcatcaaggaattcatcgtctccatcttgtccaaattcatgttatagaacaggtttgtgtcccagggattggattctcctcccccatcttcgcttgctggtatttcctgatgcaattctgcctccagtgtctactaagaaactccttcagttttttgttcttgcaagaggtgaagagagatgatggatgagggagttggtgttcgactgtttttgctgtgtggtccctgaatcaggagggggtttgtttgtccaggacgaaccgggtgggatgtttatccgacctgtttagtgattttactgctaataaatgtgtactgtg

SEQ ID NO: 4872 - DNA, 361 bp, Glycine max
  Peptide Sequence Number=SeqID_7150
  Probeset Number=SeqID_14651
ggctcaacctgcaagcctcacaagaataggccttgctggcctggctgtgatgggccaaaaccttgctctcaacattgctgagaaaggctttcccatttctgtctacaaccaaaccacatccaaagtttatgacacacttaaaatagcaaaacaaaaaagaaaccttcctatatatagctaccataaccctaaattctttatccaatccattcaaaagccaaagatcataataatacttatcaatagctatacacctattaaccaaaccatcaagaccctctcatcacacttagaaacaaataattacatcattaataataacaataaataatataagaacactgatataacagaaaatcaa

SEQ ID NO: 4873 - DNA, 1809 bp, Glycine max
  misc_feature (1)..(1): n is a, c, g, or t
  misc_feature (18)..(18): n is a, c, g, or t
  misc_feature (21)..(21): n is a, c, g, or t
  misc_feature (45)..(45): n is a, c, g, or t
  misc_feature (61)..(61): n is a, c, g, or t
  misc_feature (73)..(73): n is a, c, g, or t
  misc_feature (80)..(80): n is a, c, g, or t
  misc_feature (96)..(96): n is a, c, g, or t
  misc_feature (148)..(148): n is a, c, g, or t
  misc_feature (152)..(152): n is a, c, g, or t
  misc_feature (161)..(161): n is a, c, g, or t
  misc_feature (206)..(206): n is a, c, g, or t
  misc_feature (221)..(221): n is a, c, g, or t
  misc_feature (226)..(226): n is a, c, g, or t
  misc_feature (304)..(304): n is a, c, g, or t
  misc_feature (325)..(325): n is a, c, g, or t
  misc_feature (328)..(328): n is a, c, g, or t
  misc_feature (366)..(366): n is a, c, g, or t
  misc_feature (430)..(430): n is a, c, g, or t
  misc_feature (456)..(456): n is a, c, g, or t
  misc_feature (487)..(487): n is a, c, g, or t
  misc_feature (539)..(539): n is a, c, g, or t
  misc_feature (543)..(543): n is a, c, g, or t
  misc_feature (612)..(613): n is a, c, g, or t
  misc_feature (631)..(631): n is a, c, g, or t
  misc_feature (634)..(634): n is a, c, g, or t
  misc_feature (637)..(637): n is a, c, g, or t
  misc_feature (648)..(648): n is a, c, g, or t
  misc_feature (665)..(665): n is a, c, g, or t
  misc_feature (688)..(688): n is a, c, g, or t
  misc_feature (765)..(765): n is a, c, g, or t
  misc_feature (768)..(768): n is a, c, g, or t
  misc_feature (780)..(780): n is a, c, g, or t
  misc_feature (883)..(883): n is a, c, g, or t
  misc_feature (899)..(899): n is a, c, g, or t
  misc_feature (901)..(901): n is a, c, g, or t
  misc_feature (932)..(932): n is a, c, g, or t
  misc_feature (988)..(988): n is a, c, g, or t
  misc_feature (1143)..(1143): n is a, c, g, or t
  misc_feature (1153)..(1153): n is a, c, g, or t
  misc_feature (1179)..(1179): n is a, c, g, or t
  misc_feature (1216)..(1216): n is a, c, g, or t
  misc_feature (1249)..(1249): n is a, c, g, or t
  misc_feature (1369)..(1369): n is a, c, g, or t
  misc_feature (1392)..(1392): n is a, c, g, or t
  misc_feature (1449)..(1449): n is a, c, g, or t
  misc_feature (1497)..(1497): n is a, c, g, or t
  misc_feature (1531)..(1531): n is a, c, g, or t
  misc_feature (1561)..(1561): n is a, c, g, or t
  misc_feature (1586)..(1586): n is a, c, g, or t
  misc_feature (1602)..(1602): n is a, c, g, or t
  misc_feature (1670)..(1670): n is a, c, g, or t
  misc_feature (1742)..(1742): n is a, c, g, or t
  Peptide Sequence Number=SeqID_7151
  Probeset Number=SeqID_14652
ntagcacgatagcacgtnctnagcagcagcaatctgtctccagtngcgggtcgcggcagtncagcagtcacanacacgtntgtacatacgtcatanccagtcatctcaactacaggccgtgcaccacagcagtgctctgcatgaacancganggcacacangtggcagcagcacgagtgcgatggaccagacacttagagtagtanagcacagcagcagancacanatggtcatgcatacacatacagatgtgcacatcatcgatcgcggcacggcgctcacacagtcactcacagacaacatncacagctcacagcagcagcangtncagactatacatacggatgatgtgcaagctacactgcngactctcatcatcgtcacttgagtagcactgcacatctctacacgtcacacggcacagagtcancagcgagactgcagcagcagccatcncagctccagccgtcgcagcatatcaataganccacagcacgagacatgaacacaaatgatcgtcgctacttctctgtgcgctncagngcaccatacacacagtcagcacatcactcacactacatcgagcactgcaacagcacaccatgcaatgcnngcacatcacttgaatgtncantantacagcacatncaacgtgcgacatatanaccgctcagcacagcacagcatnagcagcaccagtagcggtctcgcagcaacgctgcacactcagtcatctgcaccagcagtgaagacgacacactacanctncacgccagctgngacgacacagagctatgactacatgcacagactatacatagatccaagcgcgcacctgctccactatcatctcacgcacacacaaccaacgcagcatcagtangatgcagcacagctgncntctacagatatgcagacggcgactgcagacnccgacagacgcgacataagtcatgcagagctacgacttgtcacttgcgcatcactngcgaggcgcgaccgactcaaggccgcatgactgcacacgcgcacctcgagatagtcatagacacgtacatcagcagcatcacatgatgcgcatccgtctgatcagcggcgctcgaccatgcgcgcactagctagatgctatctgcatgtacatgnacatgcatgntctcatcataactggacgtatcgctnatatcgtggctaagagatacgagagagaggagagtcnggagtgtacgcgagcctatcggcgagtatgcancatcagagatagacgcgtagcatgcgttcaactacaactcagcgcgagcacatcatgctgtcatagcagcacagtagtagcgtcctagtgcgacgttagcattagcgtcagcatcagacntagataactatcgtagtgtcgancagctctgatgtcgtgaagagcgactatcagatgatcatagatgatagtaatgagantgcgcagcgtgcgcagtcatgagcatcatctcgtgcatacgtagcgcncggctcgagagctgcgacgagtctcatagatatnacactagagtatcagaggaaggatgctgtngaggtgtatatgtgagagtgtgtgngcgaacgttggtatantagtactatgatagacgactgtgtatctctctagtgtgagagagatgtagaagctagtccgcagagangggaggagagagcaaggtgcggcgagactctgacattagagtatacgtgtgtagaaacgagcagtgcatcgnatatctagtagtgtagcgataggaagcaagagatcgcgacagagaagagaggagacaacagacaggg

SEQ ID NO: 4874 - DNA, 594 bp, Glycine max
  Probeset Number=SeqID_14653
tttttttttttttttttcacaaatgtgtatatcttttcacaatatcactatataaattttatgagtacacggcgctccacgagaaatgtgtgtggtgggtctctggcggaaaaacaaatattgggaacagagaaagaaaaacagtgtaccccctcttgcgagcgtctcactttcccagagaagattttaccccttgtgtgtgacccgcgcagaaaaatattctcgacacaaactgtgccccccgaggtgagtgactgtgacaaaaatcacgggtgtaaataaaaaaataaaaactcctcttcatatcaaacccccaaatactcgagaaaccccttctctttgcgcgagatatacctgtgacatgagcccccccctcttcctggggactcgccaccattttatttgcgagaaaaccccttgtgtataaagcgccccctcccccaaaaatagtgggagacctcactgtggaagaagaagagtggacaccctccctgtgtcacaaaatctcctacgcggagtgtttctcttgtgagtatgtgtgtgacaccccgagagagcgcgacagcgtctctatatactgtgtctcattgtggg

SEQ ID NO: 4875 - DNA, 1761 bp, Glycine max
  misc_feature (8)..(10): n is a, c, g, or t
  misc_feature (14)..(18): n is a, c, g, or t
  misc_feature (25)..(25): n is a, c, g, or t
  misc_feature (30)..(30): n is a, c, g, or t
  misc_feature (63)..(63): n is a, c, g, or t
  misc_feature (339)..(339): n is a, c, g, or t
  misc_feature (624)..(624): n is a, c, g, or t
  misc_feature (773)..(773): n is a, c, g, or t
  misc_feature (885)..(885): n is a, c, g, or t
  misc_feature (1006)..(1006): n is a, c, g, or t
  misc_feature (1091)..(1091): n is a, c, g, or t
  misc_feature (1103)..(1103): n is a, c, g, or t
  misc_feature (1219)..(1219): n is a, c, g, or t
  misc_feature (1282)..(1282): n is a, c, g, or t
  misc_feature (1370)..(1370): n is a, c, g, or t
  misc_feature (1404)..(1404): n is a, c, g, or t
  misc_feature (1426)..(1426): n is a, c, g, or t
  misc_feature (1459)..(1459): n is a, c, g, or t
  misc_feature (1479)..(1479): n is a, c, g, or t
  misc_feature (1538)..(1538): n is a, c, g, or t
  misc_feature (1542)..(1542): n is a, c, g, or t
  misc_feature (1578)..(1578): n is a, c, g, or t
  misc_feature (1581)..(1581): n is a, c, g, or t
  misc_feature (1599)..(1599): n is a, c, g, or t
  misc_feature (1602)..(1602): n is a, c, g, or t
  misc_feature (1636)..(1636): n is a, c, g, or t
  misc_feature (1643)..(1643): n is a, c, g, or t
  misc_feature (1697)..(1697): n is a, c, g, or t
  misc_feature (1700)..(1700): n is a, c, g, or t
  misc_feature (1703)..(1703): n is a, c, g, or t
  Peptide Sequence Number=SeqID_7152
  Probeset Number=SeqID_14654
gggggggnnntttnnnnntttgttnttttntttatctgtacgttttctagtggtgttgttatntgtagagtgtgagattaattgtgatcttgcgagcacagcgcacacccactcaccttatattacacgatgcgtgctcgagttgtgatctgtgtctgtatacgatgctattgttggatgtggcttattgcaaataagatgtggtgtgcgagctagtagactctctctgtggtctcccgcgaccgctcgtccacaccaattctgtaaccacgtgcgcccggctccgttgtaatcagctgactctagcttgatggtttgctatgttataatgatattatnctgggtgtggtgtattcgcccacgcattaaccttgtggatcgctgtgtgtatgagggaggaccgtcgcggcgagcatcaacataatatccattatatatttgaagcgcgaccaacgcgccctagatagtagtgaggggccgatggttagtacacccgcgcacgtatttgttgctttgctccgcacagagtgttgttgacacgcgtactgatctacggatccaagcaatgcgcaatgatattctacccgacgtgcacgctgtggcgtttatattggtcggagtgtngtgagtgttcgccagcggcgacaattagagtgtatgtatgcgcgcgcgtctgctatggaggagtcacgtatgaaagaatcgagaatagcaggatatgtacggaagcgtcaccgttccgttttatataatacatgattacgtgctcgctnttagcgcgcccagtcgcataaattgctaaaacgcgtacatcgtccaataatcataatgttaatcgttgcgctatagtaccttgaggctctccattactcttatctactctcnttctcgagctacctattacatacagcgacatgcgctctaagctcaggaattagtgcgccctgtgaacacagtcgagtcactatctctcgagacgtgcacgacagtatgataccgattattnccttgagtaggatacgtctaacagatcacacacgtgagatcgatcactcgcacctgtagaaccttatataagaagttgtgacgtngacgacggtggnatcttattatgagcgtatccgtaatccgacatacgcccactatcgtctacacatatcatcctcgtacaactccacattgtgctctacatgacgtcacaaggtgtagtacaaatctngaagcgagtaaatatactagatgtataaaataagagatgcaacatacccggtgttatgaagancgcgcagatatttagcatcgtgcgtgaaacgaagttcgttgcgacgagctaagtgctatgtagtgcgcagcacactatctacactaancgtaccacgtctgatcatacgtacaccagtcgantatacgtagagagagtagcatntctctagcgtctccgctcgctcatgcatgaccnctctcagtactctgacctancactcacgatgacattctgcatgtctggatcatcgtgtcactatatctatatcaacatnacgngtgagcactgcatcacttccagtatacatatgcatncanaagcagacagtgactatntgnaatagcatgtgttacgagacgagactgcgtcgcntgcgagncgatggctatgctgccagcgctgtgcgatatcgcttgcgcgcgacgtagtcagncgntgntgcgagaccgagcgggcgacgcactctatgtatgatattgttaatacactacgtatgt

SEQ ID NO: 4876 - DNA, 1694 bp, Glycine max
  misc_feature (20)..(21): n is a, c, g, or t
  misc_feature (23)..(23): n is a, c, g, or t
  misc_feature (39)..(39): n is a, c, g, or t
  misc_feature (415)..(415): n is a, c, g, or t
  misc_feature (429)..(429): n is a, c, g, or t
  misc_feature (443)..(443): n is a, c, g, or t
  misc_feature (706)..(706): n is a, c, g, or t
  misc_feature (729)..(729): n is a, c, g, or t
  misc_feature (847)..(847): n is a, c, g, or t
  misc_feature (869)..(869): n is a, c, g, or t
  misc_feature (901)..(901): n is a, c, g, or t
  misc_feature (948)..(948): n is a, c, g, or t
  misc_feature (958)..(958): n is a, c, g, or t
  misc_feature (968)..(968): n is a, c, g, or t
  misc_feature (1050)..(1050): n is a, c, g, or t
  misc_feature (1092)..(1092): n is a, c, g, or t
  misc_feature (1094)..(1094): n is a, c, g, or t
  misc_feature (1169)..(1169): n is a, c, g, or t
  misc_feature (1176)..(1176): n is a, c, g, or t
  misc_feature (1236)..(1236): n is a, c, g, or t
  misc_feature (1268)..(1268): n is a, c, g, or t
  misc_feature (1367)..(1367): n is a, c, g, or t
  misc_feature (1432)..(1432): n is a, c, g, or t
  misc_feature (1434)..(1434): n is a, c, g, or t
  misc_feature (1520)..(1520): n is a, c, g, or t
  misc_feature (1524)..(1524): n is a, c, g, or t
  misc_feature (1542)..(1543): n is a, c, g, or t
  misc_feature (1578)..(1578): n is a, c, g, or t
  misc_feature (1594)..(1594): n is a, c, g, or t
  misc_feature (1638)..(1638): n is a, c, g, or t
  misc_feature (1680)..(1680): n is a, c, g, or t
  misc_feature (1682)..(1682): n is a, c, g, or t
  misc_feature (1694)..(1694): n is a, c, g, or t
  Probeset Number=SeqID_14655
gggttgcgcgcgcgggggcnntnccgccgtctcctgacnacacacgcacagcacctacaacgtgcgccccacagcaccagacgcgcgacacgagtatagatatgtcgcagacgcagcgaccctctccacagcagttatagattatatgagataaagattccactcccctctcaccttcctcactgtacgcggagtgatccacgctgtccatagttctcttcctacacacgactcttcatcgcttctgctcatatcttgttctctgtttcgactcgcacatagtcatgctcgccgcttagtgtcactgccgcgcggtagtctctttactgttgcgctggcgtagcagaaatcttagcggccactagtatcactgatagctctcatcgacttattgacaatatcaatcatcacgacncacatctatcatgnctctaccagcatgnaagtatgagatagtctatcactcgcgtctactctcgccgctgtctgcgcacgacatctgctctctatgtcatcgatagtcttctgtgtcgacctctcacctcctctactactccgtctatacggcgataatctccttgctagacctgtcacacttcgtatgtgtcgcacctcgagcgtgtaggcgtgacgttacgatgtgactcgtgatagcgagatgcgccggcattcgctactgttactacatactcttatgcgactgccncccgtatctcatcctgctgcganctctcgctgatcgtcttccacgttcgactgtctgattatgatctcatcgtcacgcgcgatctgcgcgcgccggtatggttctcctctgtcgtttgactgacaatctctctatcctatntaagattgacatgcatgacgancacggtgcgctcttgctacttgtatgagttgntacatgtgcgcgcgctccataccactctgatatctgacctcagacantgaatatacnaagctagtgntacggcagctgcagccatcgtccttattatctacatcgtatcccctgcctccgcatcttctgacttgcgttgagtcgccttnataccgatctatacataccatggatactacgatcgaacgacnantgcctacttcttcgatgactactgcagcgtctgatacgctgctcagtcatacactcattgtcctagcactcgcgntgaatgntgtagactatgtgcgtagacgcgcgacgctcgtcctcgtcagatgcttacctctacatgntctcgcgtcatcgcagtcgcacgcgcacgtgntgagtatgcatgtcttatgatgactgcattcagtgaaatcgacatctgcgttacatatacatattcagtcctatatgtatagatgagtgagtacgctgngtgcacgcgtctgcactgtgccacgctgactgaacactgtctatggtcgacacgtgatgatggtngnatctacatggcgagcttgcgtcgtgtgtagtcgctagcagataccgaagtcgactgcagcgacgtagctgaacatcggcagccacngatnagcatacgagctgctgtnntgctgcgactcacccgctatgtgctgtctccgtcngccgtcggctgtatgntagtcgtctatgtactcagctcataagtacgagtactcagacgnacgagacctaagtcactcatgtcagtactcgtccgcactcgnantaagctatcatn

SEQ ID NO: 4877 - DNA, 495 bp, Glycine max
  misc_feature (96)..(98): n is a, c, g, or t
  misc_feature (443)..(443): n is a, c, g, or t
  misc_feature (483)..(483): n is a, c, g, or t
  misc_feature (487)..(487): n is a, c, g, or t
  Peptide Sequence Number=SeqID_7153
  Probeset Number=SeqID_14656
cttccttgtttgttcatcgtcttctcactcaagatctaaccggagaacgaagactccgccgaatcgaagttcttccacttcatcctcaacaaaaannngtcttcctcgaggaatctacccaaggagaatccactttctcgtccgagcgtagtggccaagactcgagccccactcggcgacgtcgtgaaccgccgtaatcctctcggagacatcacgaatcagaagaccggatctagaatctccgctccgtcttctactctcgtgcattgttcgaataagatcgggaaatcaaagaaggcaccgaaacctcccaaatcgaacgtgctcgttccttacgaagacatcgaatcatccttcgttgcagagtcagatttgggaaatgatgatgatgatgaggttgatgatattgacagtaacctcgtggatccgcagctttgtggtgnctttgcttgcgatatctacgagcatttgcgttcatcagangtgnagaaaggc

SEQ ID NO: 4878 - DNA, 777 bp, Glycine max
  misc_feature (621)..(621): n is a, c, g, or t
  misc_feature (633)..(633): n is a, c, g, or t
  misc_feature (662)..(662): n is a, c, g, or t
  misc_feature (680)..(680): n is a, c, g, or t
  misc_feature (684)..(684): n is a, c, g, or t
  misc_feature (691)..(691): n is a, c, g, or t
  misc_feature (708)..(708): n is a, c, g, or t
  misc_feature (711)..(711): n is a, c, g, or t
  misc_feature (718)..(719): n is a, c, g, or t
  misc_feature (736)..(736): n is a, c, g, or t
  misc_feature (740)..(741): n is a, c, g, or t
  misc_feature (754)..(754): n is a, c, g, or t
  misc_feature (758)..(758): n is a, c, g, or t
  misc_feature (775)..(777): n is a, c, g, or t
  Peptide Sequence Number=SeqID_7154
  Probeset Number=SeqID_14657
cgggccccccctcgagtcagctactaggccccccccccaattattttttaactattaaaaaattcttttaaaaaactggtaagtgtataaataaagataaaaggatcaatttgagataaccgagagtgaaatttttggctagttgtaagggtaatgtgtgaaatgcatatatgaaggaaaaaagaggaaaaaatatagagattgtttaattaagatagtgtagctagttcatgccttagagatagatctagccaagaaacattcaagtgtgaagtgaaatctatctttctaggtcaaacgctaatgtttatataggactatacaataactgatcaatccgatattctcacaagagtatatcacaatattctattcgttgcccaaagacccttggacatgtatcaagagtgattaaagttgcttaacgactaagcaacacaaaaagtaggatgttaaactcacaatcatgaacactctgttagtacctaaggatagtaaacaatgaaagcccgactgggttcgataatggagatcaaccaaagtctcaagtgcataagtacgaagagattaagcgtgaaagtgatcatcattaacgatcaagaagatcacagttatcgcttngttgtaagccanaaagacatgaagtggtgccttaacttcangaaagaactaaggattcngttncagtggncctacccaaagatactnatncgcctanngacgggtttataaaaanagcnngtcatctgtcatntttnatatcttataaaactgnnn

SEQ ID NO: 4879 - DNA, 474 bp, Glycine max
  misc_feature (38)..(38): n is a, c, g, or t
  misc_feature (51)..(51): n is a, c, g, or t
  misc_feature (96)..(96): n is a, c, g, or t
  misc_feature (98)..(98): n is a, c, g, or t
  misc_feature (180)..(180): n is a, c, g, or t
  misc_feature (223)..(223): n is a, c, g, or t
  misc_feature (229)..(230): n is a, c, g, or t
  misc_feature (261)..(261): n is a, c, g, or t
  misc_feature (265)..(265): n is a, c, g, or t
  misc_feature (296)..(296): n is a, c, g, or t
  misc_feature (304)..(304): n is a, c, g, or t
  misc_feature (325)..(326): n is a, c, g, or t
  misc_feature (337)..(337): n is a, c, g, or t
  misc_feature (368)..(368): n is a, c, g, or t
  misc_feature (443)..(444): n is a, c, g, or t
  Probeset Number=SeqID_14658
ggttcagtccatgaggaggtgaccttgcgagttttggntgatcctgagttngaaaacttgcctgccgctaggattgcagctctttagaaagaagcngngcttctgttggattggcagaagataggtcctggggaattcagggaagtccccgagggtgatttcttaggtgaagtcactggntgtgatttagtgatttgtcacttcttcccttgggagttctttntatgcnngaatttggctaagcttttaaagtctcttgcnccantgcctcttgttccgaagttcatcaagcttgntgctgctnttgccccattctttgttccanntctggctctcntgactttgccttgtgtcttgttgttccgccncggggtccccgctgctcgcttggtcggctttcccgctttgggtggtcttgctgttttttccccttgatcgctggnngctcttcttgttttcatggtcttcttggtg

SEQ ID NO: 4880 - DNA, 399 bp, Glycine max
  Peptide Sequence Number=SeqID_7155
  Probeset Number=SeqID_14659
taccacaccacacataacaatttctgatctttctaaagctatagatatgaatatgcttagggatgcttaaacaaaatcgggtaaatgtgaataataacataaatctaataactacctaccatcctttatatacgggcttataacaggactggccttaaccggtctagaacaatacatattcaaagctaggcacccaattactctgaatcattttaaacctgatcatgaagctacaaatgctgccaaataacattctccaattcactatccaaaggctgacgatgtcttgttcttttatgtgcctacctccctgcacaggagcaacacaaatcatgaacatgatcaacctcctcatcttcgtttgagacacccaaagattcctgaacttttaaatctacc

SEQ ID NO: 4881 - DNA, 1607 bp, Glycine max
  misc_feature (15)..(15): n is a, c, g, or t
  misc_feature (26)..(26): n is a, c, g, or t
  misc_feature (28)..(28): n is a, c, g, or t
  misc_feature (33)..(33): n is a, c, g, or t
  misc_feature (35)..(38): n is a, c, g, or t
  misc_feature (41)..(42): n is a, c, g, or t
  misc_feature (49)..(49): n is a, c, g, or t
  misc_feature (167)..(167): n is a, c, g, or t
  misc_feature (169)..(169): n is a, c, g, or t
  misc_feature (251)..(251): n is a, c, g, or t
  misc_feature (398)..(398): n is a, c, g, or t
  misc_feature (818)..(818): n is a, c, g, or t
  misc_feature (889)..(889): n is a, c, g, or t
  misc_feature (1353)..(1353): n is a, c, g, or t
  misc_feature (1355)..(1355): n is a, c, g, or t
  misc_feature (1505)..(1505): n is a, c, g, or t
  misc_feature (1607)..(1607): n is a, c, g, or t
  Peptide Sequence Number=SeqID_7156
  Probeset Number=SeqID_14660
ttttttttttttttnttttttttttntncttgnannnnaannaacctcnatcatcttaccataaacacaagacaccggcggaagggaggggcgtctctacatcttcaaagaatactccttacgcggacgagcacagtccaacttccgaacataccacaatgaaaaanantaagatataagtgatgcgaagtaagtgcggagagaagtgggggggtgctggtgggggggttgctgcgaggtggtgggttggnggggatggtttagtgatgaggcggatggcatggcggcgggtggtgtggtggcgagtggtgaggttgtgggagatggaagtggtgaacgtggacgagctggtgtggggtatgtggctatttcgatgagaggggtttgccttatttgtngacttcgtgtttttcgtttgctttttcgatgcgtatcaactaatctgctcgtcttcgtgttgtcgttcgtgtctcgttatgatcgttgttagaaggacgctatggatatcggatgacgggtggcggtctgatatgcgacacgatgcttcttatagtatctcacgtatgcgcaaaatcgtttcttatatctatatatctaggcgtgccgacgacgtcctatctcgcgagctcctcactatgtattgtctgtcgtgtctctctactgttcgttatatatatacgtcagacgcgcagcgggcatacgcgttcgtatgtcgagcgcgcgcagatgacgcgccaagatgtagtttccgcgtccgcctctaactagattatcatggagtaatgtgataatagattgctctcttctactcgcgttcnctgatgtcgactcgtcacgcacacgttgctcactatcgtactctctctatatctccgccgtgcacgaccgngcatatatcgatctgtacacgcgacgtcgtatgtatgagaggtgatcagatggcagtgtgataatacgcgtcagacgaggcgagtgtggaggacatgtgtcgctagagtgtatatgacgatgtgagatatacgacggtgaagccgtgcgcgacgcgacgtcggtggagtggagatgagtgttacctcaccgccgtactgcgtgctctggtgactcgatcatgcacactcacgctctctcaatccacactcggcgcctcctctcttctatagtacctacacatcacatcacatacgtgacagcagcaatgttacgacctgaactcatgtaacacggtgagcactctagtctgtttgtatatcttaattcgtgtacagctgaatgagagatgagttacatatctgagattagtatactagagagatcaggcatacaactgtcgagtctcgtcgcgagcagttgcgngngacatgacgaatacatttgaggatatgcatcgtattcatcgacacgataatatacaacgacagaaacatctgtgccacctacatctatactctcgaatccactattgcgacccgaactgttgtcatcgttactatgtatctgcggtgctncgcactagcgctatatacctgcctgtcatacattatatcagatctgtctctctctactgcattcactctctctctctcgatcatactaggtgtatctgaagn

SEQ ID NO: 4882 - DNA, 625 bp, Glycine max
  misc_feature (1)..(17): n is a, c, g, or t
  misc_feature (618)..(625): n is a, c, g, or t
  Probeset Number=SeqID_14661
nnnnnnnnnnnnnnnnnttccattactagtactgaatatatgaatgttatttcaactcatacatgtgatacaaatggccgcagggtaacaaaaaaattatgatataggtctggtgaaggtgacaaaggttacataagtccaactgatttcagatacacaaaagaatgaaaacagtaaaaagatatatttacacgaacacatcattgaaggtaaaaaggaaacatgagagtagtgatgacagaatccataagctggatattaaagttaaagttgatacagcttcaatttataccaattaaagtttgcaatattgtccacaacctgcgatgtgttcctcgtgccgaattcggcacgagggtgggataataacgataataacaaatggatatgaaaacgaaaaaaaaaaaaaaacaaaaacgatggtcagagtgaaaatttctttatggatggataatgttattcagtttagtttgatagtgttacacgtcaaaaaaaatgaagaaaaaaaaaacaaaagacgcaatctagaaattcattttttcttttaagggatagtggattaaattttgtaatggtcctgatcgttgtaaaatatttaacaaattatttttggacaannnnnnnn

SEQ ID NO: 4883 - DNA, 486 bp, Glycine max
  Peptide Sequence Number=SeqID_7157
  Probeset Number=SeqID_14662
gaaatagcttttacttcatatccaaccccacctcttcatcgcagctaagaaatccttagccttggcatctcaatcttatcaccaacttctccaccgctctcgcaccttccgacaatgccgctttcaatcgatctaggccggccaccaagttaactcggtttatccggttgactctgtttacccagttctgagttatccaagtgagtcgactagcgatttttatttctgggccaataaagagatggatggagaagaaggtggtgacatgaggaaattcttgagaactccagtttacatagatacatgcaatggtggatctgatcttgtgtacggtgttgaaaagaatggtgggctagtgaacgctaggggaaataatttcaaaagtacttagattcatagttcacgattacatgaggtcctgggtaaagattattgctaaacccaccgagctcctggtatttttgctttttttttcttctttggatt

SEQ ID NO: 4884 - DNA, 645 bp, Glycine max
  misc_feature (1)..(1): n is a, c, g, or t
  misc_feature (10)..(10): n is a, c, g, or t
  misc_feature (14)..(14): n is a, c, g, or t
  misc_feature (46)..(46): n is a, c, g, or t
  Probeset Number=SeqID_14663
ngtggtggtncaanagacgttatggcatggtaataccatggcgcanaggcgtatccggggtcgaatcctttctgcaaaagcaagggagctcctactacacccgaaaggctacacttactcggaggtgaagaggatgaccaggtccttcgctcacaagctcgggcaaggcggctacggcgctgtctacaggggcagcatgcctgacggccgtgaggtggccgtcaagatgctgacgggcatgctggagggcgtacggcgaggagttcatgaacgaggtggcgagcatcagcaggacgtctcacgtcaacatcgttactctggtagggtactgcctccagggtccaaagagagctctcctgtacgagtacatgcccaatggctccctcgagaggtacaccttcggcagcagcagtggagaagacgccttgagctgggacaggctgttcggtatcgtcgttggagtcgcgcgagggctggagtacctccacacgggctgcaacacccgcatcgtgcacttcgacatcaagccgcacaacatcctgctggaccaggacatgtgtcccaagatctcggacttcgggctggcgaagctgtgcgggcagaaggcgagcagggtgtccatcgggggggggcctacgtagctga

SEQ ID NO: 4885 - DNA, 1969 bp, Glycine max
  misc_feature (1)..(1): n is a, c, g, or t
  misc_feature (31)..(31): n is a, c, g, or t
  misc_feature (62)..(62): n is a, c, g, or t
  misc_feature (105)..(105): n is a, c, g, or t
  misc_feature (130)..(130): n is a, c, g, or t
  misc_feature (154)..(154): n is a, c, g, or t
  misc_feature (158)..(158): n is a, c, g, or t
  misc_feature (213)..(213): n is a, c, g, or t
  misc_feature (215)..(215): n is a, c, g, or t
  misc_feature (231)..(231): n is a, c, g, or t
  misc_feature (238)..(238): n is a, c, g, or t
  misc_feature (254)..(254): n is a, c, g, or t
  misc_feature (267)..(267): n is a, c, g, or t
  misc_feature (324)..(324): n is a, c, g, or t
  misc_feature (359)..(359): n is a, c, g, or t
  misc_feature (361)..(361): n is a, c, g, or t
  misc_feature (367)..(367): n is a, c, g, or t
  misc_feature (369)..(369): n is a, c, g, or t
  misc_feature (382)..(382): n is a, c, g, or t
  misc_feature (401)..(401): n is a, c, g, or t
  misc_feature (477)..(477): n is a, c, g, or t
  misc_feature (533)..(533): n is a, c, g, or t
  misc_feature (567)..(567): n is a, c, g, or t
  misc_feature (618)..(618): n is a, c, g, or t
  misc_feature (693)..(693): n is a, c, g, or t
  misc_feature (711)..(711): n is a, c, g, or t
  misc_feature (746)..(746): n is a, c, g, or t
  misc_feature (926)..(926): n is a, c, g, or t
  misc_feature (967)..(967): n is a, c, g, or t
  misc_feature (1043)..(1043): n is a, c, g, or t
  misc_feature (1183)..(1183): n is a, c, g, or t
  misc_feature (1332)..(1332): n is a, c, g, or t
  misc_feature (1381)..(1381): n is a, c, g, or t
  misc_feature (1386)..(1386): n is a, c, g, or t
  misc_feature (1423)..(1423): n is a, c, g, or t
  misc_feature (1536)..(1536): n is a, c, g, or t
  misc_feature (1800)..(1800): n is a, c, g, or t
  misc_feature (1853)..(1853): n is a, c, g, or t
  Peptide Sequence Number=SeqID_7158
  Probeset Number=SeqID_14664
ncagggacgataccagacagaccacgcactnccgatggctgcagctatgactctagcaagtncgctcgcttgtcgtgtgactttacactagtagtcgtcagtatntcatgcatatgagatgtcgatcatnagcacgacgcacacgtatgagtgntgantaatcatgatctgatcacgcggtggagttaaaggtatcatatgcgatacagccgncngctaagtgacaagcancatgtantacgtgtgagagtggnatgatattcattngtatttggactcctaacatctgatatactaccatattgcgtatcgcgtcactagtantctatcgaatctcacatggtgtctcatctgttcanantcatcncncacatacatctcncacatcgacatggtactcngggcagccgtcatgtgcgcttgtcgagtcctacgctgctcgtcagcgatcagtccgcgatataagagcataacgangacgtggcgcaggtcgcgcagtgacaccgtacaagagcaaggaaatgtatatcggncggatgagtcgtcgagtatatatgattacgacgnatctgcatcagtcgccgtatctataactatagagataatacgggcgtatgntcattcgtcctgagatctacatgacatacatattgatatgtacatagtactgatgcactcgtctcagtataatanataacagaagtggtgcgnggagcgtgcgcagcgatcgtacacacatatactgngtcgcgagtcgtgctcatattcatcgatatatagattcgtctcatacgtatctactctcatcgaatatacatagtaatacgtggagataataacatatcagatgcgatactatcgcacacgtacgatgactcataggcatgtggctcgtccacgactgctggcgcagacattatgtcacnacgacgatacactaatggcggtgctccttacgaacatatangcacctcagcccatctataagctatgatactacgatataagcagcgtgcgcgctaacactacgcgacgacgtatantggcagcgcgtgtcgggctagttgctggctcgttacgtattacatctgtgactcacacagtgtcccgcatggcttgcgcgtgtactctgttcagtgtcataagccggccgtgcgcgcgataagatatgctcgccggcggnaggaggcagaccgtagaagatcgcgtcgcgaggcgggtgataagtacccagtgaggtggggtgcgattatacagattaatattatacacgtccgtgcggctccgtgcagacgcatagcgatgtgccaaattgtgatgatggtgagcgtntataacaacatggccgtagtctacataatattcatatccagctgctccngcgtnttctgcctagacgacgcttatacagtcgatatcttgnccgagcgtataactgttgagatatctgctataatgcgttcatgtgactctagtgctaaatgatagacaacaacacatcatgttgtgtgaagtattataactgaaactactgtncagtacgtgtgtgctcgataaatactattgcatcgtggtccggcgcggtcatgacataagtaggttgagtagagacaagagagactgtgggtgcgtagtggcacttcgagtcagagtgcggcatattattatctaatatatcgatgatgagcggtgcggtgctggtggatagtagtgtgagggtgcggcgagatatacatatgagaggtcgagcgggcagagcgtagtgtcagagagttagtggagagcaaaacatgtgtgtgntttattatatattatcccaccagtatcgtcctctcccgcgcagacagaaagangcaagatacacagtgcaaagagcgagcgcggcactacagtacttgtatccctctcttcacactactctaatatactatatgagcaaagctgggtgagttagatctggataggcagc

SEQ ID NO: 4886 - DNA, 221 bp, Glycine max
  Probeset Number=SeqID_14665
gccagaaggccgccaacacccgaaaagccgccgcgctgctggcgtttcaccataggcgcccccctgatgaggatcataacaatagtcgcctctcacgtcggtggcggaaccccccgggactattatgattccacgcggtttcccctggaggatgcctcctgcggtcttctgttgcgaccctgctgcttatcagagacactgtggcctttttcctttctgga

SEQ ID NO: 4887 - DNA, 402 bp, Glycine max
  Peptide Sequence Number=SeqID_7159
  Probeset Number=SeqID_14666
gattatactgctctttgtaggcaaatgcttgaggcaggttatgtccatgccgaacgtcatccatgaaacctggttgcactaaatgatggatctctcgcatatttcagactttggaatgatgggggatattccaaggcattaccggattgggctcatacaaatgattgtgcactgtgttaatcgtgattctctgagcttggcaaatgactatccttctttgggatttacttctgaagggattgacacacattcaagtatctgatgctccgcaaagcatatttgctgatcggaccacttaatttcaagattttcacggaatcttgaacccactatatgattgtacgtatgaatttaacttctcccttccgccagactattctcttgtgataagaacattgggat

SEQ ID NO: 4888 - DNA, 631 bp, Glycine max
  Peptide Sequence Number=SeqID_7168
  Probeset Number=SeqID_14667
aagagctagctagagtttcccacctcactccctcatcagctcactgtctcgctcgcctcgatcctcttctcttctcctcttcgtacaagctagagcttttctccctcccacccccttcgcacagattcgcggcttgaggaaggactcgcaagaagagtcggtgctgatggaggtctgcggcgccgaggagaagcagacgccgcccaagaagaggagcggcgggaagggggcggcgatgggcgtgcgcgcggatggcggcggcaagggccggcggccgtccttccccgggcgctgcgcgcggctcgtcaaggagcagcgcgcgcggttctacatcatgcgccgctgcgtcaccatgctcgtctgctggcgcgactatgcgtgaggcacgccgcgccgccgccgcgtgagaaggtcgaccgatccatcgaggagtagcagacagacaagctccctctctcactagcccaaggatcctcctcctgtgtaaagagtagtagtagattttttcctctaatttttcctttcttaccgtttgttagcattaagagtagagcgatgcagtgtcgccgcgccgcgcattttcttgtaatattattaatctgaaatctgatgtcatgtgagcatctctctg

SEQ ID NO: 4889 - DNA, 1775 bp, Glycine max
  misc_feature (39)..(39): n is a, c, g, or t
  misc_feature (54)..(54): n is a, c, g, or t
  misc_feature (91)..(91): n is a, c, g, or t
  misc_feature (96)..(96): n is a, c, g, or t
  misc_feature (104)..(104): n is a, c, g, or t
  misc_feature (125)..(125): n is a, c, g, or t
  misc_feature (128)..(128): n is a, c, g, or t
  misc_feature (202)..(202): n is a, c, g, or t
  misc_feature (226)..(226): n is a, c, g, or t
  misc_feature (233)..(233): n is a, c, g, or t
  misc_feature (257)..(257): n is a, c, g, or t
  misc_feature (261)..(261): n is a, c, g, or t
  misc_feature (279)..(279): n is a, c, g, or t
  misc_feature (372)..(372): n is a, c, g, or t
  misc_feature (379)..(379): n is a, c, g, or t
  misc_feature (411)..(411): n is a, c, g, or t
  misc_feature (439)..(439): n is a, c, g, or t
  misc_feature (485)..(485): n is a, c, g, or t
  misc_feature (490)..(490): n is a, c, g, or t
  misc_feature (495)..(495): n is a, c, g, or t
  misc_feature (555)..(555): n is a, c, g, or t
  misc_feature (801)..(801): n is a, c, g, or t
  misc_feature (854)..(854): n is a, c, g, or t
  misc_feature (1145)..(1145): n is a, c, g, or t
  misc_feature (1350)..(1350): n is a, c, g, or t
  Peptide Sequence Number=SeqID_7169
  Probeset Number=SeqID_14668
ctcgcgctgcacgtagtgtattgctcgcagctacactangtcttagcgagatanttgtggttgcagctgcgtcgtgagcgctcgcgcgtanttgtncgatatgntattcgttcagatgttatatntantgagcgccgctcgttcgatatatctagtatgctgcgctacgcagtcgtgtgtaggcttctctcatataagttcnagtgatcgtatgatagagctacantcgtgtnatcagcggctcaatattatagatntttnctattcctcatctatctncgtgctgtcttatctatagattattagatatagtgcgcgcgtagtgcgtgtgtgtgtggcgtcggcgatgtgacatctacgattacttatcgntctgagngatgttgtcgtctgagtcacctcgtgcgctcnctctacattcactcatatatcttacatntgcacgtggtgcgtgtcggctggcgtgcgtcattctcatcgtacantctanctatnaacactcggcgtgctatcagagcttatatactatgtcgcctctcgtatatcatctctacncgcggctgtcgtctcatatcacaacactattctctgcgatctcttgggtcgtcgtggatgtctgacatacaatatatatatacaatcatagcgcgttcttgtatgtactatagtagaatgcaaggcgtgttgtgacgatactcactataataactgatttatctcgtgagtgatatcaataataataaaacatatgaatacgtttaataaatattcttctggtagcgctgacggctccgtactaantacgtcatcgtacggcttgcgcctctcgtgtgcgtatctgcatctgctgacanatattaatatgtgattctggtgtagagtacaagagtagtcgtggcgcgtgtcgctgtgtgtgtactagatatatataatgcgttaggccgtaacaataggtgtgagtgcttcggtctgccggcgtgccatatatcttcgcttgtataattttattataaataaagtagtagttgccgcgcgcaccgctaagccttatttatcttgctgtgtgtcgtgcaattattcacctggggttcttataaaacatggtgccggcttgtgtgttgcgtcataaagggtgtgagggtcantataaatattgtatatagtccgggattctacatgagcgactggtgcgtgctttatattttgcgtgtgcgttgacattaatgctgtgtcatattatacaaatatatctactctggatctatgttgtcctggtcgttctaccattcctgcgtgcttctgtacacgcctctattgagtggcacgatgacacgttgcgtgtcgttgctntattctggccgcgcattaatatagagtcgatcaaagactcaacgtcaatcctactagctgcgtctcctccactacctccctgggcgcgggcgcatgaaaatcaatagagatggagcgtctggtgcaggattctctattgttgtggtgggagtggtgcgtggtagttgatatcttctcattactacatttgtgcgcgtcggccttttactcgggccgctgtgctacatacaatataatgtgctggagggcgggggtggagtgttggggggaacatattgcgatgtcaaaatcatactgctcattgctgcgtactttcttgctcggcgtggggtgtgtgctagtagtgctgcggcgtggctttagagtattggtctcatacctacatacttgccccggttcttgctctcttacacctaaataataca

SEQ ID NO: 4890 - DNA, 881 bp, Glycine max
  misc_feature (1)..(46): n is a, c, g, or t
  misc_feature (881)..(881): n is a, c, g, or t
  Probeset Number=SeqID_14669
nnnnnnnnnnnnnnnnnnnnnnnnnnnnnnnnnnnnnnnnnnnnnnttgccggagccccttccttgaacatcctaatcgaaaaattttttttctcagacatcaaaaaagttgatcttaccaaagcgaaagatcgatccctccttgcgtacaagcgaactcttcttatcgtcagggagatagagaagccgagagacgtgagttggcatgtatagagagatggaggggagctcatggcggcgtctggcattcatagctttgatttctctgcacttcgtcttaggtctatcaggtgattccaagaatacaaataaggcagagtcacacacttcttccagcagaacaggcacaaaagtaatcctcgtactgctcggattcgtggctgtagctatgttctccttctttctgtacaagctatggcagaagaagaaaagagacgagcagtatgctcgactgttgaagctgtttgaggaagatgatgaactggaggttgagctaggacttcgagattaaaaaaaaaaattacaagctatcgacaaaatgcttgaggcatatttgtttgtgttagctttggttttttccgtgtaagataaattataggtattaattattaaagatggatcagagcatgggcctctttgtttcaccatttggccctttgtttcaccatttgtcatctacatataggtgattcatttgtatgatctatttagatgattcattcagactttcgtgactgtttgtttgtccatccaaatagctcatctagatgaatcatctaaatgaatcttatgtttgtttctttattttcatttccatctaaatgagtttagtaaacaaattatcaaaatacccttgtgttgatttaaaaaaaaaaaaaaan

SEQ ID NO: 4891 - DNA, 421 bp, Glycine max
  misc_feature (249)..(249): n is a, c, g, or t
  misc_feature (301)..(301): n is a, c, g, or t
  Peptide Sequence Number=SeqID_7170
  Probeset Number=SeqID_14670
acaccttcctcctcccatccaaattccaaagaagcaaaaaggcggagcagagcaagaccaaagcggccagtctcttgcaagcctcgccgccgtcgccgccggctgatcagctccggtgcgtgcgggatgggcagcgggaggccggctgcgtggcggacgtgcgcggcggcggcggcggctgcgtgcgccgtgccggtggccttgtcactggtgctgctctggctgcccctgctttgctgcgccgtggcngtggtccggttccggcgggcgaggaggaggatgatgcagatgtgcggcggcngcacaagaggcggcgggcgatttggggcggttgacgccggcgatcggctggggctgctgcagaagtacctcgaggatcagctggagctcgtcggcgcggaggcaggggggctcctccgcg

SEQ ID NO: 4892 - DNA, 458 bp, Glycine max
  Probeset Number=SeqID_14671
ttcggggtgccgcaacccgaggcccatcacccggaaatcgacagcggcgtacacaccctgagcgtcctggagcaagccgcccgccatcagcaaccattgaccgtgcgctgggcctgcctgctgcacgacctcggcaagggactgacacccgaaagcgagtggcccaagcatattgcccacgagttcaaaggcctgaagctgatcaaggcggtgaacgagcgctacaaggcgccacgcgactgccaggaactggccttgctggtgggcgaataccacacccatggccatcgtgccctggagctcaaggcctcgaccttgctggagttgttgcagagtttcgatgtctatcgacgcccgcaacgtttcgaggagtttatcgcctcgtgcgagatggatgcgcggggacgcctggggctggaggagcggacttatccacaggcggattatctacgcggggc

SEQ ID NO: 4893 - DNA, 1452 bp, Glycine max
  misc_feature (497)..(497): n is a, c, g, or t
  misc_feature (1225)..(1225): n is a, c, g, or t
  misc_feature (1238)..(1238): n is a, c, g, or t
  Peptide Sequence Number=SeqID_7171
  Probeset Number=SeqID_14672
ccgcgcgtgagcagatgcctctgatgcgttcgcgctcgcgccgcggcggacgtcagtgagtgtgatctatctctatcacacttcatgcgcacagacgtcgtgtgcggagcagcgctcatagcactgactcggagcgtccacgtgacgctgcgtcgcgtccatccagcgcgtggtgcgctcgccatcacactcacgctacgaacacgcttcagccgcgagtcggcccgatgcgcaggcagagtgtgacacgtgcgacgtctctccgcccactcttcgccccactcagttagcccgccgccacctagacccatccacggatttggtgagtctgacgctatactcactgcacgcgtagccatatgactatctgaacgcgccgctctctgtactctgagactcagtgtgtgtatgcgtacatcgtggttactaccctcgcacctctccttgatagtgtgcgctgctcctggtcgcttggcgctgcgttcgcgcggcgtcgncagtcactctgctctcttcctaatacttacacgactctctctgatgctcgccgctcggtatgatctacttactctagctcgtcgcgcagagtcagcgtcggacggacgacgccgcagccagttgacgtgcgcgtcagacccaccgccgctctccctatgacctggggtaggtgttgaagatagattcgatgcgtagcgacagccgccagaaaagttacccttcttcctgtgtgtttggggggcggggcggtggtggaaccacacaacacacctcgccggccacatacccccacctgaccgtgagatggggagcgatgccgcgggcaggcgagcgaagcgcactgcggctattcgactgtttaccacagccctactatacgccatgtgtagctacgcgaaggtcacacatccccacccacagctccttctcacacagcgccgcagcagccggccgtcgggcgacgctggcagagaagtcagccgcaaactgggcggattgttcggcatcatatgctagtataggccggacgcgcgcgccctcccgtttcactattctgttatggtgtcgtgtccgggcgcacttcgggttggtcttccagtgtgttatactagtgtggttattcttcgtgttggtataggattgagtattgtggcttaacacttcttgcttgtttctaggcactaacgagctagtgctcggggtgtccgccctcctgtcatcgatcgcnccacgtggtaggnggcgcgcgccgagcggctcgtttctctgtccggcaaaatccatctcctcctcctagcttctctcctccccttctttcccggacaagcacccgcgtccacacctccttgcaaaacaacccaacacacgcacacgcacgcccccgcagcaagtgccctctcttaagaataaagtaatataaaccagtccgcagtgcaagactctccccagtctcat

SEQ ID NO: 4894 - DNA, 1346 bp, Glycine max
  misc_feature (1)..(1): n is a, c, g, or t
  misc_feature (87)..(87): n is a, c, g, or t
  misc_feature (91)..(91): n is a, c, g, or t
  misc_feature (151)..(151): n is a, c, g, or t
  misc_feature (162)..(162): n is a, c, g, or t
  misc_feature (266)..(266): n is a, c, g, or t
  misc_feature (623)..(623): n is a, c, g, or t
  misc_feature (902)..(903): n is a, c, g, or t
  misc_feature (935)..(935): n is a, c, g, or t
  misc_feature (1101)..(1101): n is a, c, g, or t
  misc_feature (1139)..(1139): n is a, c, g, or t
  misc_feature (1224)..(1224): n is a, c, g, or t
  misc_feature (1327)..(1327): n is a, c, g, or t
  misc_feature (1330)..(1330): n is a, c, g, or t
  misc_feature (1332)..(1332): n is a, c, g, or t
  Probeset Number=SeqID_14673
natgacagtaggtcgtcgtgttcgtgcgtaggcacagtacgagacctacgggtctgacgagctcagtagaggtagctttatctcgtncgancatagaccacacatgcatagagcagacagtgtgtatggactaagatataggacatgatgnttcgtgcgaantgtgttctagtggatcgtgagtagatactcgtaccgtacgtacggagtggtgataatcaatcatggcacgcggatcaggcgcgtagccgagtctagcatcagcnatcacggtcgagcgtgcgggtgcgtgtgtgctttctatagaaatcgattcagtcagggataaatctatcgccgctcattcaatcttgggtggtatgatggcatattcgatcgagcagggtcgagaacaagcgcagcggatgtcttggccgtgtatcggtgaggcctagatacgcgttgtagagagtatagaacagcttaaatgagtggtgagtagtctaacgtagcgcggagggagaataaattctagtaggtagagaggaggcgccgcgcagaagcgcgtccgcgcagaatctggagtagacacgtgtcatagagcgtgatcaaggcgttgcactaagagaacggcgtgggtttgntgttattcgacactaaatgatagccacatggctgtcgctctcctgtcacacttgttatgataatagaggagtatatattaggaggatatgagggatagagagaaatatgcactatgactagagcggcgtgggtgggatcaagtcgtcgctggtgtgctgatagtaggttaaatatatagcatgtagaggacggtgggagtatacataagaataccggggttcctagaacccggagtctacctttctgtctaggtaggtcaggagtgtgttgtctctacnnaagtccagcagcaccacaccccccatctttcntctctcccacatataggcgcacagtgcttcatcttctatgaacggaagtgtgctggagaccatactatgattaacacagaccacatcactaaatattgtaatattgcactttcgctatttaatttcgttggactaatttctgttgtctgttattgccagggcgtcncacctcgcgcgtggtagacggtggcagggctgtccgtntccgcctgccgctgcggccacgcgcgcgaggcggaggatgctgttttctatctaatgtagaggaaataatgtatattttattatntctttttttatatatcgtgaaacatgcgttgggggggtctcctacggcgcgagcgagtaacaacactgacgagccgcgcgggggggggggagaagaaaaaccnaananaggggccaacaacc

SEQ ID NO: 4895 - DNA, 1953 bp, Glycine max
  Peptide Sequence Number=SeqID_7172
  Probeset Number=SeqID_14674
taataaatataattacaaaatttcaaacttgaataatgaacgagaatccaaaaaacaatatatgggcaaagcttgtctctctgcatcctgacaaaagcaacatcctctttgatatcaaatccgacaagataacccaatctcacctgactgatgaatggaaaatttaccaaaaccttgctgaagaaggacctgtatggattgttaatttatcgacgacttttatttgtattgatgaaaattggctagcaacgaatgaagaaagacagctaattggaggagaaaagatcactttctcccaagaaaaaatcacctcagacattaaatttgattatgtcttttatgtgattgatccaaaatccaacaatgagctcaaaagatccaaaaatgagaatacagaaccgagaacatttgttgcaagtcaggacatgatgaagttcctaaaggtccagaatgcgatccatgaagagcttctttgcaccatttgtatggaaaatattactgactgtagaactttgaatccttgtcaacataatttttgtggaaattgtctcatcaactatctgcaaaaatcaactgactgtcctctatgcagagaggaaattgtatcacactcaaaaaatctccttatgcaaaatattatagcacaagcaaactgtgctgttaacatctttaaaaacgtcaaagaatttaaggaatacacggttcttgggcctacctcaaacaatgaaaaagattatcctgcgcaaagtggcgtctatcaagggccttatgtggacggtaaaagaaatggtgaaggagagatgacatatcaagatggaagtgtatataaaggttcctggaaaaatgatcaaagatatggacaaggcaagatgacgtataaagatggcagtagatatgaaggtctctggagaaataataaaagagtcggaaaaggaaagctttatttggagaatggtgatatttatgaagctgaatgggttgatgatatcatgcaaccatttgcaaaaatctcttatcataatggctcgcaatatgaaggagaaattaaaggtttccagaagcatggaaaaggaatgtttaaagatggctcttatcaatatgatggattgtggtcttatgacttgaagcatggacaagggacagataaatctggtaacaaaacatacaaaggaaattgggtcaatgggaaaaaacatgggtatggagagatgaaattttcttacttcagggaatacttgggattttgggccaatgataagatctttggggaaggtaccttcgagtatgactgtaaaacttataaaggaatttggcaaaaaggtggtaatgcaggaaaaggagaaatcatttatggaaatagagaaaaatacgaaggaatgattggtaaaggtttttgtcgagatggagaaggtgttcttactttgcagagcggagacaaatataaaggaaattggtcgaagaatttgctcgaatctccggcgacagttgaatatattaatggagatcgttatacaggaggtgttcaaaatagtgaattatatagagaaggatctggagtcctaatttgtaggaatggtgatcaatatgatgcaaagtggcggaaaggaaagctgcaaggtcgaggaacgatactttatacaaatggtctgaagtattcggtagtatggaagaatggtagagaagtattaagaacagtcatccctcccaaaaaagtcaaaacaagtgctggtagtctcatagaaccttctgcgattcaggcatgaatctaaaaaaacaaagggttcctgttaaaaacaaaattgtgaatattacaataaaaaaacaatttgttttgattttgaataattgttattgatttagaaattcataggaagtttcaataaagtatggtatcatatcaaagtatatcttgaaagatatttatatatagagacgaaataatacttttcaatt

SEQ ID NO: 4896 - DNA, 918 bp, Glycine max
  misc_feature (918)..(918): n is a, c, g, or t
  Peptide Sequence Number=SeqID_7173
  Probeset Number=SeqID_14675
actctttcgagattcccttctagctaaaaccctaatattcttctttccgttgagagaagttctccgtggggaacgatgcctaccccgactagcttgatcatgggtaagatgattatcaccatgactttgagccaaagaatgccttccgtaaccaccgcatcatacgctgaggctaagacagtagtcttctgggacgtggacgagtgcccaatcccggaagatctcgaccctcaatctgtttatcagaacatcagaacagcactagcgaacaaaggttaccacggcgaggtctcaatcatggcgtttggtgacaggaaccagatccctggttactacgaatcagccggaatccaaatctttcccaaaggagataagtatgataggattggtcagatgcagttagagtttttcgggtggatgagggataatagttgtcagtacaccaacatgatggtggtgacacgatccgcaatggagttggtttcttatctcgagtataaaaacacgcaccacaacattctcttcgcgaatcctctgtacccgcaaacaaaggcttgcggctgcaaattcggagctaggcaagaagatcctagcgctgagacttgggtctgggaaaccctagcccttggaggagaccccagcatcaaaacagtagaagagccttgcaggtacagagagtagggtggtggtgatgttaaggattctgtttctccatgagaatggggaatgctcttctacatatttgctaattacttaaatgtttccaagtagctagctacatatttgcttagctgtttaatgtttataaacttgctacataattgcttgcttagtatttaatgtttctaatttgctatgtatttcttggtcgttaatgtttgtaacttgcttggttagttaatgtttataagttgctan

SEQ ID NO: 4897 - DNA, 1738 bp, Glycine max
  misc_feature (45)..(45): n is a, c, g, or t
  misc_feature (59)..(59): n is a, c, g, or t
  misc_feature (62)..(62): n is a, c, g, or t
  misc_feature (64)..(64): n is a, c, g, or t
  misc_feature (75)..(75): n is a, c, g, or t
  misc_feature (83)..(84): n is a, c, g, or t
  misc_feature (115)..(115): n is a, c, g, or t
  misc_feature (134)..(134): n is a, c, g, or t
  misc_feature (164)..(164): n is a, c, g, or t
  misc_feature (168)..(168): n is a, c, g, or t
  misc_feature (199)..(199): n is a, c, g, or t
  misc_feature (237)..(237): n is a, c, g, or t
  misc_feature (239)..(239): n is a, c, g, or t
  misc_feature (279)..(279): n is a, c, g, or t
  misc_feature (281)..(281): n is a, c, g, or t
  misc_feature (305)..(305): n is a, c, g, or t
  misc_feature (340)..(340): n is a, c, g, or t
  misc_feature (423)..(423): n is a, c, g, or t
  misc_feature (426)..(426): n is a, c, g, or t
  misc_feature (431)..(431): n is a, c, g, or t
  misc_feature (433)..(433): n is a, c, g, or t
  misc_feature (498)..(498): n is a, c, g, or t
  misc_feature (541)..(541): n is a, c, g, or t
  misc_feature (547)..(547): n is a, c, g, or t
  misc_feature (597)..(597): n is a, c, g, or t
  misc_feature (628)..(628): n is a, c, g, or t
  misc_feature (699)..(699): n is a, c, g, or t
  misc_feature (715)..(715): n is a, c, g, or t
  misc_feature (718)..(718): n is a, c, g, or t
  misc_feature (874)..(874): n is a, c, g, or t
  misc_feature (876)..(876): n is a, c, g, or t
  misc_feature (896)..(896): n is a, c, g, or t
  misc_feature (952)..(952): n is a, c, g, or t
  misc_feature (1161)..(1161): n is a, c, g, or t
  misc_feature (1164)..(1164): n is a, c, g, or t
  misc_feature (1240)..(1241): n is a, c, g, or t
  misc_feature (1245)..(1245): n is a, c, g, or t
  misc_feature (1252)..(1252): n is a, c, g, or t
  misc_feature (1267)..(1267): n is a, c, g, or t
  misc_feature (1403)..(1403): n is a, c, g, or t
  misc_feature (1432)..(1432): n is a, c, g, or t
  misc_feature (1472)..(1472): n is a, c, g, or t
  misc_feature (1475)..(1478): n is a, c, g, or t
  misc_feature (1531)..(1531): n is a, c, g, or t
  misc_feature (1555)..(1555): n is a, c, g, or t
  misc_feature (1590)..(1590): n is a, c, g, or t
  misc_feature (1594)..(1594): n is a, c, g, or t
  misc_feature (1602)..(1603): n is a, c, g, or t
  misc_feature (1619)..(1620): n is a, c, g, or t
  misc_feature (1658)..(1658): n is a, c, g, or t
  misc_feature (1666)..(1666): n is a, c, g, or t
  misc_feature (1668)..(1668): n is a, c, g, or t
  misc_feature (1670)..(1670): n is a, c, g, or t
  misc_feature (1673)..(1673): n is a, c, g, or t
  misc_feature (1676)..(1676): n is a, c, g, or t
  misc_feature (1678)..(1679): n is a, c, g, or t
  misc_feature (1683)..(1683): n is a, c, g, or t
  misc_feature (1696)..(1699): n is a, c, g, or t
  misc_feature (1701)..(1701): n is a, c, g, or t
  misc_feature (1704)..(1704): n is a, c, g, or t
  misc_feature (1708)..(1709): n is a, c, g, or t
  misc_feature (1711)..(1711): n is a, c, g, or t
  misc_feature (1713)..(1715): n is a, c, g, or t
  misc_feature (1719)..(1719): n is a, c, g, or t
  misc_feature (1722)..(1723): n is a, c, g, or t
  misc_feature (1726)..(1726): n is a, c, g, or t
  misc_feature (1730)..(1734): n is a, c, g, or t
  Peptide Sequence Number=SeqID_7174
  Probeset Number=SeqID_14676
catcgtgagcgcgtcgagagagcggacgagtgtaggagcaggcgncgcagatactgacncgntntggcggtgtgngtcgatannagatatgagacacagtgcaggagtgtgatgngctcggagcatatgtgctnagtctcgatacatactacatgacgacgtcnccgntagagtcgctctgctggccgagacaccacanatcacctgcgcagtggcgaggcgtgcatataattagantncagatggtaggtagttcgcgtgtctcactgtctgtctatngntggtctactgcgcgcgtgtgatgncgatcggtgtcatgcaggcactcgtgctgcgcgcnatacacctacatagaccgagcgtctggtgcacatcatgaacatgagagagtcgagcgagtacaagcaacgagagagcacgacnagncgatngngacgtagccattgacttacatatacgatgctctctatgtgacggtctgtgaccatgcacttatgntcgacgtacgcgcgactcgtactaggtagtgtggttcgcgtcngcgcgnctctgcgctgcatcgagtcagtcgtgagatgcacatatcatcttctgctngtgcgcatcgacgcaatgcaccgcctcgtanatacgcgcgtcgtagtcacgcgatccgtccaagaccagtcgtacgcgtatctctgcagtgcggtagtatcntatcatctcgcgtatntcnacgatcaattatatcgttcctcagagtgcaagtagttgtgcgtcttgattcattcattaaattagtatgtcgtattgagtaggcgctattcgtatatattcagtagtaggcgcgtggcgccgctgagacgtgtcccgcgtattattattatatttntntttctttttgcgttttaatntttgtatgatgttcgccgcgtcgtatcttcactcatcccacttctcctctgatcgntgtcgtcgctgctctttctagtgcgtgatgtgaactgatgtgtggtgatgttcatgatgggttggtgcgggagagagactagagacatattactgagtgcaaccatcaccgtgcgatcgctgagtagtgtgtacatgagagtgtcttacttagttatatatgaggtgtggctatggtgcgctggtgtgtcgcgcgttggtgctgtgttntgncgctatagcgctgtgcgcggtcattgtgcgttattctcacatatatctcctctacatcttcagtttttgcgatggnntgtntccttantctctatatatcttncgctgagatagagatgtgtcgacagagctaatagttgaccgcgcgtcaacagacgtgagagtgcgagtcctgcatgtataggagagtatatagcgtgtgtgagtgtgtgtatatatgtacgagatcctactatttnatatactatggactgtctctgctcacgcnctgtctctctgctgagtgatacgtatcaggggtagagtantgnnnnggagagaattgagtacgccagtacggaggaggagaagagaatagaagcgcggnggagtcacacgcgctgtcgagtcngttgcgagaagagcagtagaggcggcctctcctgntacntttctctnnaaataggcacatcttnntagacagcgatgagtggcggccactagaccgcgagggngagggtgngngnggngangnngggntagccgccgcgannnngnggngggnngngnnngacnccnncgngaannnnnaaaa

SEQ ID NO: 4898 - DNA, 383 bp, Glycine max
  misc_feature (357)..(357): n is a, c, g, or t
  Probeset Number=SeqID_14677
cgaaagggctcggcgaggacggcaaggcggaggaagcctgcttcgtcttggagaagatggcggagagtgggatttggatggatgcagaagggtggcggtctcttgctacatgcgtctgcagcggcggtgcaggtgaggtgaagctcgtcgatgagctagcgttgtcatcttgacatttccagtccatgcgaggctttgacagccttcagctgtggcatttccatttgtctattctctttatcttgcttcagttccagaagcatttagttgtgcaaggcaaaatgcataatgatatgggtataatggcagataaaagatgcgagtcttactgctgaaagtgaagttcgtcagtttatntcaagataaaaaaaaaaaaaaaaagc

SEQ ID NO: 4899 - DNA, 2224 bp, Glycine max
  misc_feature (8)..(8): n is a, c, g, or t
  misc_feature (19)..(22): n is a, c, g, or t
  misc_feature (24)..(26): n is a, c, g, or t
  misc_feature (39)..(40): n is a, c, g, or t
  misc_feature (43)..(43): n is a, c, g, or t
  misc_feature (46)..(46): n is a, c, g, or t
  misc_feature (48)..(49): n is a, c, g, or t
  misc_feature (62)..(63): n is a, c, g, or t
  misc_feature (65)..(65): n is a, c, g, or t
  misc_feature (69)..(69): n is a, c, g, or t
  misc_feature (75)..(75): n is a, c, g, or t
  misc_feature (94)..(95): n is a, c, g, or t
  misc_feature (97)..(97): n is a, c, g, or t
  misc_feature (105)..(105): n is a, c, g, or t
  misc_feature (109)..(109): n is a, c, g, or t
  misc_feature (128)..(131): n is a, c, g, or t
  misc_feature (139)..(139): n is a, c, g, or t
  misc_feature (145)..(145): n is a, c, g, or t
  misc_feature (157)..(157): n is a, c, g, or t
  misc_feature (172)..(172): n is a, c, g, or t
  misc_feature (178)..(178): n is a, c, g, or t
  misc_feature (194)..(194): n is a, c, g, or t
  misc_feature (196)..(196): n is a, c, g, or t
  misc_feature (200)..(202): n is a, c, g, or t
  misc_feature (206)..(206): n is a, c, g, or t
  misc_feature (227)..(227): n is a, c, g, or t
  misc_feature (237)..(237): n is a, c, g, or t
  misc_feature (264)..(264): n is a, c, g, or t
  misc_feature (292)..(292): n is a, c, g, or t
  misc_feature (319)..(319): n is a, c, g, or t
  misc_feature (330)..(331): n is a, c, g, or t
  misc_feature (334)..(334): n is a, c, g, or t
  misc_feature (340)..(340): n is a, c, g, or t
  misc_feature (390)..(390): n is a, c, g, or t
  misc_feature (440)..(440): n is a, c, g, or t
  misc_feature (442)..(442): n is a, c, g, or t
  misc_feature (468)..(468): n is a, c, g, or t
  misc_feature (578)..(578): n is a, c, g, or t
  misc_feature (585)..(585): n is a, c, g, or t
  misc_feature (595)..(596): n is a, c, g, or t
  misc_feature (623)..(623): n is a, c, g, or t
  misc_feature (638)..(638): n is a, c, g, or t
  misc_feature (649)..(649): n is a, c, g, or t
  misc_feature (757)..(757): n is a, c, g, or t
  misc_feature (798)..(798): n is a, c, g, or t
  misc_feature (822)..(823): n is a, c, g, or t
  misc_feature (845)..(845): n is a, c, g, or t
  misc_feature (890)..(890): n is a, c, g, or t
  misc_feature (905)..(905): n is a, c, g, or t
  misc_feature (925)..(925): n is a, c, g, or t
  misc_feature (933)..(933): n is a, c, g, or t
  misc_feature (961)..(961): n is a, c, g, or t
  misc_feature (980)..(980): n is a, c, g, or t
  misc_feature (982)..(982): n is a, c, g, or t
  misc_feature (993)..(993): n is a, c, g, or t
  misc_feature (1006)..(1006): n is a, c, g, or t
  misc_feature (1008)..(1009): n is a, c, g, or t
  misc_feature (1016)..(1016): n is a, c, g, or t
  misc_feature (1027)..(1027): n is a, c, g, or t
  misc_feature (1041)..(1041): n is a, c, g, or t
  misc_feature (1101)..(1101): n is a, c, g, or t
  misc_feature (1118)..(1118): n is a, c, g, or t
  misc_feature (1145)..(1145): n is a, c, g, or t
  misc_feature (1226)..(1226): n is a, c, g, or t
  misc_feature (1228)..(1228): n is a, c, g, or t
  misc_feature (1232)..(1232): n is a, c, g, or t
  misc_feature (1311)..(1311): n is a, c, g, or t
  misc_feature (1336)..(1336): n is a, c, g, or t
  misc_feature (1369)..(1369): n is a, c, g, or t
  misc_feature (1381)..(1381): n is a, c, g, or t
  misc_feature (1383)..(1383): n is a, c, g, or t
  misc_feature (1423)..(1423): n is a, c, g, or t
  misc_feature (1579)..(1579): n is a, c, g, or t
  misc_feature (1591)..(1592): n is a, c, g, or t
  misc_feature (1652)..(1652): n is a, c, g, or t
  misc_feature (1697)..(1697): n is a, c, g, or t
  misc_feature (1701)..(1701): n is a, c, g, or t
  misc_feature (1710)..(1710): n is a, c, g, or t
  misc_feature (1882)..(1882): n is a, c, g, or t
  misc_feature (1894)..(1894): n is a, c, g, or t
  misc_feature (1898)..(1898): n is a, c, g, or t
  misc_feature (1951)..(1951): n is a, c, g, or t
  misc_feature (1977)..(1977): n is a, c, g, or t
  misc_feature (2024)..(2024): n is a, c, g, or t
  misc_feature (2053)..(2054): n is a, c, g, or t
  misc_feature (2059)..(2059): n is a, c, g, or t
  misc_feature (2075)..(2075): n is a, c, g, or t
  misc_feature (2080)..(2080): n is a, c, g, or t
  misc_feature (2083)..(2083): n is a, c, g, or t
  misc_feature (2095)..(2095): n is a, c, g, or t
  misc_feature (2138)..(2138): n is a, c, g, or t
  misc_feature (2184)..(2184): n is a, c, g, or t
  Peptide Sequence Number=SeqID_7175
  Probeset Number=SeqID_14678
gggtgggngggggttgggnnnngnnngggggggcggtgnnggnggngnngggggtgcggcgnntngtgntggtcntgcgttttgtggcgtggtnntngcgcttgnggtnggtgtggcgtgcgctgtcnnnngccgcctnctcatncctgtgtgcgtntggcggtgattcgtngaccgntacgggcgtgtgtcancnaaannnttcnacctctgtctgtgtttcgtcncgctagtctnctcttcggcgaactgccgcgcacgtgntctccagcgtggtgtcggcagcgcgtgnctctcttactgtctatccctatcgatntgctggggcgnnagnagaggnagacggagcgagaggtgaagaggggtcgcgataaagagcagaggaataanagatcgtccgagagcggtatgcggaacgacggtgaatgactaaacaatananaccggtgactagaggtatataggtgngcgcgcagaaggtgaggtacgtagatgcagaaatcacgtacggtacagtgaagcgagagcgaagtactaaagacgagtgtcttgtggtcggtggggtgtgttgtgaatgntcggcgntcgtggtgtnnttagtgcaggttgtatgagatggcggntgaggacgatcacanatatattagtnaatcgacgtgaataacacatatactaatctcacacatagtacataatcacatataatataacgatctgtaaccactagggaactataaaatatgtgatgagatggctnagaagtgagggatgcggagtgatatgtattgggaggtcgantgtttgcgtgagttaggagtgtgnncgcgcgcgcgcgcgagacacgngggacgcgctgcccagacgcgcactgcacgaaagagcgcgtgctncgacgacacgcaganagggacgtggacgacacganagcgcgancgacggcgacacacgcgacgccacatcncgcactctgtctgtctctntntactcctcgcntcgtaccctgctncnnccactcnacgtactcacngtcagacgctcctngctctgtcgcttgacctattcgctgcgctcgtgacgagctgagcagctctctcactcggncgacactcgctcctctnatgtactcgtggtgtatagagtgtcgngagctagcgacgagcatatcgctattgcgtcatgatcgtcgctctagcatgcgcgctggactgactagcactcgacgatcnancagngacgcgcacgatgctactcacgactgtgcgtcatccacgatatacattgatgctatcatgtgtacgcacatgcactcgnccgcagcacctgcttactcatgctnccacgcgttactagacgcgatcagctgctgcgntacactcaagantnatataacatcaaatccccacacacctaccgcacacacacnacactacttatacgtgaggcggtactatgcgagtgtgaggcgcgatacgcagctgtgtcaatgcatgagatgctagacgcggacgagtatgctagctacaagttgtcgacacacgagacagtgcgaatatacctctacacacgattcgacgatcgntagcgcacaganngctgcactgactcacgacctccacgacagacatgctcgacgcgtcctagcggacacacgnacacagcgtcaggactagtagcactactcagctctctctactcanactncacgcagtnacgcccgtcgaccgcgctcactcgcgccgcacgtcgccgtggcactcagcgctactgtcgtctctacgactcccgtctactcgcacacatgtgtacacgcttatcatagacgtgtgctgtcgcgtgcgatcggtgatctgttctgcatctgacttactacctgcatctcacntctctctgctanttcntctacttcgtgtgtgtagtgtcattgtattcctgactcgtctctctctgcgcntcattctatgctctcacttcacgcanctggtgatgcgtgtacgtatgcgttgtcgtcggcgtcctgatcgctngctcgtgcgtactgtccgtcgtcgcagcnncacgngcacgacggtcagagnacgangtngcgacagagcgncgccgaagggacgaaggcgatacagaagacggtgagatgaaanctatgagactgccacgtacatatgaatatactgccgatgagtgtantactgtacatgatgtaatcctaataatactcatcaaacag

SEQ ID NO: 4900 - DNA, 950 bp, Glycine max
  misc_feature (31)..(31): n is a, c, g, or t
  misc_feature (115)..(115): n is a, c, g, or t
  misc_feature (163)..(163): n is a, c, g, or t
  misc_feature (835)..(835): n is a, c, g, or t
  misc_feature (846)..(846): n is a, c, g, or t
  misc_feature (873)..(873): n is a, c, g, or t
  misc_feature (876)..(876): n is a, c, g, or t
  Probeset Number=SeqID_14679
cccgtaagagcgcgcatatctcatgtctctncgggtatgcctgactggacaggatgatgcggtgaggttattgcgctgcgcgggatgtctggtggtttacttcgcgtaaattaanttaaccacccgctgtggtgaggggtgggcgtgtaaaattaccgctcanccgtgtaagctggtttctgctggatccgtgaggcgggggggggtaatcaatcggctgtggtctttgaagcggttgcaggcgaatttgagtctcgttggattacctccttggctccggtcctcaccgatcgaaaaacgggtggctcgtttttttcgtggacgtatcatggtggccctacacttacaactaggcgtatgacggggacgagtgcggttatagcggtccggctgtcgcggatgaatatgaccagccatcgttcgatatcacgaaggataaatgcagcaaatgcctgagcggttgtaagttccgcaattacgtcggcagctttgacggcttcctttccgttagcaggctttcgcagtaaatcccatgacgcagacagaatcagcgattctggcgcacgcccggcgatataaaacagcggagtcgtgcggcttcgtggtaagcacgccggagggggaaagatatttcccctgcgtgaatatctccggtgagccggaggcgtatttccgtatgtcgccggaagactggctgcaggcagaaatgcagggtgagattgtggcgctggtccacagccaccccggtggtctgccctggctgagtgaggccgaccggcggctacaggtgcagagtgatttgccgtggtggctggtctgccgggggacgattttnagtaaaagcancccgggggatccttctgcgtagtgcgnccncctccgcggggagtaccacttttgggggggggggggggtggggatatgacgaggggtggtgtcggttgtattta

SEQ ID NO: 4901 - DNA, 1370 bp, Glycine max
  misc_feature (826)..(826): n is a, c, g, or t
  misc_feature (933)..(934): n is a, c, g, or t
  misc_feature (936)..(936): n is a, c, g, or t
  misc_feature (938)..(940): n is a, c, g, or t
  misc_feature (944)..(947): n is a, c, g, or t
  misc_feature (954)..(954): n is a, c, g, or t
  misc_feature (959)..(960): n is a, c, g, or t
  misc_feature (965)..(965): n is a, c, g, or t
  misc_feature (969)..(969): n is a, c, g, or t
  misc_feature (971)..(973): n is a, c, g, or t
  misc_feature (976)..(976): n is a, c, g, or t
  misc_feature (978)..(978): n is a, c, g, or t
  misc_feature (981)..(984): n is a, c, g, or t
  misc_feature (986)..(986): n is a, c, g, or t
  misc_feature (990)..(991): n is a, c, g, or t
  misc_feature (993)..(994): n is a, c, g, or t
  misc_feature (997)..(998): n is a, c, g, or t
  misc_feature (1002)..(1003): n is a, c, g, or t
  misc_feature (1005)..(1007): n is a, c, g, or t
  misc_feature (1015)..(1016): n is a, c, g, or t
  misc_feature (1018)..(1024): n is a, c, g, or t
  misc_feature (1028)..(1030): n is a, c, g, or t
  misc_feature (1033)..(1033): n is a, c, g, or t
  misc_feature (1035)..(1036): n is a, c, g, or t
  misc_feature (1038)..(1039): n is a, c, g, or t
  misc_feature (1042)..(1042): n is a, c, g, or t
  misc_feature (1045)..(1045): n is a, c, g, or t
  misc_feature (1048)..(1050): n is a, c, g, or t
  misc_feature (1056)..(1059): n is a, c, g, or t
  misc_feature (1061)..(1064): n is a, c, g, or t
  misc_feature (1067)..(1067): n is a, c, g, or t
  misc_feature (1069)..(1071): n is a, c, g, or t
  misc_feature (1075)..(1075): n is a, c, g, or t
  misc_feature (1077)..(1077): n is a, c, g, or t
  misc_feature (1079)..(1083): n is a, c, g, or t
  misc_feature (1089)..(1090): n is a, c, g, or t
  misc_feature (1094)..(1094): n is a, c, g, or t
  misc_feature (1096)..(1100): n is a, c, g, or t
  misc_feature (1105)..(1106): n is a, c, g, or t
  misc_feature (1109)..(1110): n is a, c, g, or t
  misc_feature (1113)..(1114): n is a, c, g, or t
  misc_feature (1118)..(1118): n is a, c, g, or t
  misc_feature (1120)..(1120): n is a, c, g, or t
  misc_feature (1122)..(1124): n is a, c, g, or t
  misc_feature (1126)..(1126): n is a, c, g, or t
  misc_feature (1128)..(1128): n is a, c, g, or t
  misc_feature (1132)..(1133): n is a, c, g, or t
  misc_feature (1141)..(1142): n is a, c, g, or t
  misc_feature (1144)..(1145): n is a, c, g, or t
  misc_feature (1147)..(1148): n is a, c, g, or t
  misc_feature (1150)..(1151): n is a, c, g, or t
  misc_feature (1154)..(1154): n is a, c, g, or t
  misc_feature (1156)..(1158): n is a, c, g, or t
  misc_feature (1160)..(1161): n is a, c, g, or t
  misc_feature (1165)..(1165): n is a, c, g, or t
  misc_feature (1169)..(1170): n is a, c, g, or t
  misc_feature (1172)..(1172): n is a, c, g, or t
  misc_feature (1174)..(1175): n is a, c, g, or t
  misc_feature (1178)..(1178): n is a, c, g, or t
  misc_feature (1182)..(1185): n is a, c, g, or t
  misc_feature (1187)..(1190): n is a, c, g, or t
  misc_feature (1192)..(1194): n is a, c, g, or t
  misc_feature (1196)..(1197): n is a, c, g, or t
  misc_feature (1200)..(1202): n is a, c, g, or t
  misc_feature (1206)..(1206): n is a, c, g, or t
  misc_feature (1208)..(1209): n is a, c, g, or t
  misc_feature (1212)..(1213): n is a, c, g, or t
  misc_feature (1215)..(1216): n is a, c, g, or t
  misc_feature (1219)..(1220): n is a, c, g, or t
  misc_feature (1223)..(1225): n is a, c, g, or t
  misc_feature (1227)..(1227): n is a, c, g, or t
  misc_feature (1232)..(1235): n is a, c, g, or t
  misc_feature (1237)..(1238): n is a, c, g, or t
  misc_feature (1242)..(1244): n is a, c, g, or t
  misc_feature (1246)..(1247): n is a, c, g, or t
  misc_feature (1249)..(1249): n is a, c, g, or t
  misc_feature (1251)..(1251): n is a, c, g, or t
  misc_feature (1253)..(1253): n is a, c, g, or t
  misc_feature (1258)..(1258): n is a, c, g, or t
  misc_feature (1260)..(1260): n is a, c, g, or t
  misc_feature (1262)..(1263): n is a, c, g, or t
  misc_feature (1265)..(1267): n is a, c, g, or t
  misc_feature (1269)..(1269): n is a, c, g, or t
  misc_feature (1273)..(1273): n is a, c, g, or t
  misc_feature (1278)..(1280): n is a, c, g, or t
  misc_feature (1282)..(1283): n is a, c, g, or t
  misc_feature (1285)..(1285): n is a, c, g, or t
  misc_feature (1287)..(1287): n is a, c, g, or t
  misc_feature (1289)..(1289): n is a, c, g, or t
  misc_feature (1293)..(1297): n is a, c, g, or t
  misc_feature (1300)..(1300): n is a, c, g, or t
  misc_feature (1303)..(1305): n is a, c, g, or t
  misc_feature (1307)..(1308): n is a, c, g, or t
  misc_feature (1310)..(1310): n is a, c, g, or t
  misc_feature (1314)..(1319): n is a, c, g, or t
  misc_feature (1322)..(1322): n is a, c, g, or t
  misc_feature (1325)..(1326): n is a, c, g, or t
  misc_feature (1333)..(1338): n is a, c, g, or t
  misc_feature (1340)..(1341): n is a, c, g, or t
  misc_feature (1343)..(1344): n is a, c, g, or t
  misc_feature (1346)..(1347): n is a, c, g, or t
  misc_feature (1351)..(1356): n is a, c, g, or t
  misc_feature (1358)..(1362): n is a, c, g, or t
  misc_feature (1364)..(1364): n is a, c, g, or t
  misc_feature (1367)..(1369): n is a, c, g, or t
  Peptide Sequence Number=SeqID_7176
  Probeset Number=SeqID_14680
gattccgcttctgttcacctctacgtgttgtctgtctgtcgtcgtttttggttatcgcacaggtgttaaattggggggccgggggtccccccccctcgaggggtcggggtttctatcgaataaaggctcttttttttttttgtttgttatttgcacaggaaaagaaacggttcaggtttccttttaccagggggatggcggtaagttagaattattcgtagggactctattccccactaaaagggaattggtctttcgctaatcacaattgtgtggcgagcgagtatattgtgctattggtgttgggtgttgtctcagtctggcgatagtatgagatattgtggttgctgtataggaggattgttgaagactccgattggtcacgaattgtggagtattagcagttgttggacgttagttgtagtatttgattatttaccgagaggtctggggattcgtttgattagaataccggtaaagatcaaccatgtatgatgagacccatatatggcaatagtgtttcggttctgtgtcaactcggcagcgatggtttactttgactgcagaagtagaatttgattgatagtgaggagtggttttgggcgcgagggccgaaacgctaaggttttaagcacttagtggccacgtctcgggtaatcacgctggttattgtttgtgcttagactctgtgcgttaatacactggttattttatctagtgattttactcatattttgatattaactcgggatgtcgtccgttggattgttttcggtacacatgcacactgcggtgcacgatgggatagagcctctggtggcgttcncgcgcagagtattgacctaggtgatcttctgtcacaaagtttcgatttccaacagtgataatatttggctattaacatagacggtctcaggaatatggagcaataannanannnaatnnnncctttancgatnntctancggnannnatngncannnnangttnncnnaannggcnnannntgtttcannannnnnnnggannnacnanntnncanganacnnnttcgcnnnncnnnntgnannntggncncnnnnnattccnntggncnnnnntaacnngcnntcnnatcntngnnntncntaannacgccttnngnncnntnnggntnnnanncgcngttnnangnntgncctnnnnannnntnnntnngcnnntaantnntcnngnntcnngcnnngncaatnnnntnnggtnnnanngncntnctggncntnncnnntnaacnccggnnnanncntnangtcnnnnnaanctnnncnncnggtnnnnnnacnatnnaaagacnnnnnntnncnnanntgannnnnnannnnncntgnnnc

SEQ ID NO: 4902 - DNA, 1383 bp, Glycine max
  misc_feature (32)..(32): n is a, c, g, or t
  misc_feature (73)..(73): n is a, c, g, or t
  misc_feature (75)..(75): n is a, c, g, or t
  misc_feature (340)..(340): n is a, c, g, or t
  misc_feature (395)..(395): n is a, c, g, or t
  misc_feature (568)..(568): n is a, c, g, or t
  misc_feature (605)..(605): n is a, c, g, or t
  misc_feature (763)..(763): n is a, c, g, or t
  misc_feature (787)..(787): n is a, c, g, or t
  misc_feature (796)..(796): n is a, c, g, or t
  misc_feature (965)..(965): n is a, c, g, or t
  misc_feature (1227)..(1227): n is a, c, g, or t
  misc_feature (1234)..(1234): n is a, c, g, or t
  misc_feature (1277)..(1277): n is a, c, g, or t
  misc_feature (1281)..(1282): n is a, c, g, or t
  misc_feature (1288)..(1288): n is a, c, g, or t
  misc_feature (1290)..(1290): n is a, c, g, or t
  misc_feature (1294)..(1294): n is a, c, g, or t
  misc_feature (1345)..(1346): n is a, c, g, or t
  misc_feature (1351)..(1351): n is a, c, g, or t
  misc_feature (1357)..(1357): n is a, c, g, or t
  misc_feature (1371)..(1371): n is a, c, g, or t
  misc_feature (1373)..(1373): n is a, c, g, or t
  Probeset Number=SeqID_14681
cgaaggacgtcgcctgtcgtcgtagagagatnggagtgagacgctggtcagtcttagaggtataacgtcgcgntnagatcatagatactgtacttgtggtcgacgaccgctgcgtgagaggttcagtaatatatagtgtagagtcttgtctgttcgtctgcttgtgtcgtgatgcgatatcgatcgtagtggtgcggagatgtcagacaacacgctcgattgtgtcgctgacatgtgttctcgaagcgaatatgttatttcagtcgctagctcatgtagtgtctcagtgtgtcatgagctcgcacatgttacgtctagatgatttctattactacgcgtngagtcctgtaccatcgactgctcaagatcgcgtgcagtggctcatatttgatgangtgatcgcatatattgttgtgaggtcatatgttttcatgtctgttggtagttgtcgtcgatgattgcaatggtgcgtacatgtcagtttaagctggggtgtgtctcttcctcgctgatatctcagtcctagttcacaagagacgtcgtcgcgcgatagtgctcgatgctctancgtatgaatattgatgctatgattactctctattatnccagctcgcagtgtatcatgataataatctgagtgaagataagtgcgtttatgagactaacgttattgatcatacatacgtcgcagctgtgtggtatgcgcagtggccatcacttcgtatcacgtacatgccagtcagtcacaccgcacatattctanatattgactatctccctactatantgaggcgcntgacatgtactatatagtatacatgcttcactggtctgaggctcgttcggtgtcgtattatggttgtggcgaagtggtagtgcgacgagttgtgacgcatctctatgctatatccttggcatggcgtctctcgcgtgagtgtgtgatcacgtgatgcatatgtagagcngaggcggcgccggacgtcacgttgtgccctgtctagtgtgatgagcgagagggtgtcgcgatatggtagctagatcgtagcctatgtatcgctagattatgagcggacggcggggtcatgtcctggtcatggtggttcgcgtcttccgattcgtcttactcatcgctacacagacgcagcgcgacattctagtactgtgtggacatctatggccttttctgagggagtgagacgtgaccctgctattctataataatcaatnattctcnttatatctctctactactatcgtgaatcctccgggcgcgcagntcgnnaaggananaaanattcctctcggtctctcctgctgtgagtcgccgcgagggtaagtgttgtannaaaanagaaantaacactccgctanangctaaaccct

SEQ ID NO: 4903 - DNA, 1990 bp, Glycine max
  misc_feature (1)..(1): n is a, c, g, or t
  misc_feature (78)..(78): n is a, c, g, or t
  misc_feature (91)..(91): n is a, c, g, or t
  misc_feature (122)..(122): n is a, c, g, or t
  misc_feature (159)..(159): n is a, c, g, or t
  misc_feature (164)..(164): n is a, c, g, or t
  misc_feature (202)..(202): n is a, c, g, or t
  misc_feature (206)..(206): n is a, c, g, or t
  misc_feature (208)..(208): n is a, c, g, or t
  misc_feature (239)..(239): n is a, c, g, or t
  misc_feature (284)..(284): n is a, c, g, or t
  misc_feature (312)..(312): n is a, c, g, or t
  misc_feature (326)..(326): n is a, c, g, or t
  misc_feature (370)..(370): n is a, c, g, or t
  misc_feature (376)..(376): n is a, c, g, or t
  misc_feature (471)..(471): n is a, c, g, or t
  misc_feature (563)..(563): n is a, c, g, or t
  misc_feature (573)..(573): n is a, c, g, or t
  misc_feature (657)..(657): n is a, c, g, or t
  misc_feature (698)..(698): n is a, c, g, or t
  misc_feature (770)..(770): n is a, c, g, or t
  misc_feature (901)..(901): n is a, c, g, or t
  misc_feature (958)..(958): n is a, c, g, or t
  misc_feature (976)..(976): n is a, c, g, or t
  misc_feature (995)..(995): n is a, c, g, or t
  misc_feature (1007)..(1007): n is a, c, g, or t
  misc_feature (1239)..(1239): n is a, c, g, or t
  misc_feature (1244)..(1244): n is a, c, g, or t
  misc_feature (1251)..(1251): n is a, c, g, or t
  misc_feature (1290)..(1290): n is a, c, g, or t
  misc_feature (1530)..(1530): n is a, c, g, or t
  misc_feature (1915)..(1915): n is a, c, g, or t
  misc_feature (1928)..(1929): n is a, c, g, or t
  Peptide Sequence Number=SeqID_7177
  Probeset Number=SeqID_14682
ntgacgactgcagctcacgcagcagagacactgatgtgtcatcgactgtcgaactgatctcagcacatggtgtcagancatcacgtatgantgcgatctagcttgtcagtgtatcatgactntgcatcgcacgctacgtatttatcgtacgtataactncacancacgatgtcttcacacaccgtacgctcacttatagcgncctngnttgctgcgtactgtggctgtcgtagtctcangagtgaggtcgacgcgctgatcgcattagctaagatcaaacgctngtctcgcgcgacagatagagagtagtangtcaccgtggctgncgtaacgcgtagcatatcgtattaatatgcgtctcagcgtactnattagncggcgtcgcgtcagtttcgatctaatcgcataaagtctctagactaactcaatgcgctatatatgactccgtccgtgtcgtcagagattcagtgncttctacctgagtagcacgttagtgagagcgaaagtctaatgtattcatgaactgtcatagacaagccgttcagatggcgcgtacgtcggcncacatgtgtngacactcatcgtctactcaatcacatagatcgccacgcactgccgcgagcgcgtgcgcactgcgctatagtgaggaccgctctncgtgcggatctccgtcgagatgatggagactccgtacaagnatcctgtgtcagcctgtatgtgagtgctactaacgacagcatcatatacttagactatatcgcactctgcantagaatcattgcgcgtacgagcagtatagtgtgcgtctatgtcaccggatgaggctttcgagcatagtaggcagatagtgttgctgatgagcgtcatagttgagttatcgaattcatcaatcatctagagnatgcactcacacgcatatcagatcaccaggtatcgacactactcgcggatcgttcanacagcgagtagtggatgnagactacacaatcgcgtcntcgtgttgatgngtcaattggcgacagcatgttctgtgtatcatactacacgcagttgcgtactgtacgtgcaaataaacaacatagaggagaatactatctcgaactcaagctcgcgacagtgtagagacgtagtcgatgatcaccgtctgccgctcatcatttcgcgtcgcatcccagcctcacttatgccaggtcgcgcaatagatgtcaattcatatcgcagtccagagagtgagctcantcatncaacagncgagtgcgaagatccaaccactatgcgtgtggtgcgcgntgtgtcgatgccacgtcacgtcagtgagctctaactcatatcacacaccacacatacatataaggagtctactctactcatattatccgtgtcgtgcgtctggcgccgactatgctaagtgaggatctttagtagtgtgctgcgaatacctgaatctcacaatatgcatgcagtcgcagattagcccaatgaccaagtagcagtacgcttatacgtgtacacctcacgccacgtctctancactcccttcgccacgatgatctcactcgagtcccccactcacgtgttatgaattgttcattctacagctacacaccctgtgtgttcagtggagaatcgagcggatgttatcatatactctcagcgttgagcagtgcaagacgttatgcgcgggcttagtctatcgacgctctatagactcagtgcgagcttgttgcactaagctatacagtgtttcacatgtcatacgctcatctcggcgagcgtaatacccttccatcatccaacattacgcggtctctgctatcgtatgtggtagagtgtgtgtctgagactctatatcagcaaccacgtgtgtgagcgttatcactatgctcgcatcagaatatcgagtagagacaagatnaagtaaatattannaattatactaacatgcatctacacgtacacagttgacacaataagtatctttagattacat

SEQ ID NO: 4904 - DNA, 423 bp, Glycine max
  Probeset Number=SeqID_14683
ttttaaaatttttttttttttttttttgccaagtaagactcaacgcatcaaatcatctgacacaaattgaatccaactgattagatttacaaactaattctccatttgcgtctctttccaaacaatttacggaaagggtttattctacacatgcatggtgaatcctgcatgggcctatttcgccaaccatcctgacaacatcacttgtacctgcatcctacgcctgctagctgagttgacctgcacctgtctgctgggctggtacttgctgctgtatcgccagttaaaggggagaaatccaatggcagctattacaccagcaggggactcttcttccgtgattgtttcaccgctcttcttgttatgcttcttggcgtacctctggttcctcagaaactatagattcggagtttggcctcgtgc

SEQ ID NO: 4905 - DNA, 824 bp, Glycine max
  misc_feature (1)..(224): n is a, c, g, or t
  misc_feature (270)..(270): n is a, c, g, or t
  Peptide Sequence Number=SeqID_7178
  Probeset Number=SeqID_14684
nnnnnnnnnnnnnnnnnnnnnnnnnnnnnnnnnnnnnnnnnnnnnnnnnnnnnnnnnnnnnnnnnnnnnnnnnnnnnnnnnnnnnnnnnnnnnnnnnnnnnnnnnnnnnnnnnnnnnnnnnnnnnnnnnnnnnnnnnnnnnnnnnnnnnnnnnnnnnnnnnnnnnnnnnnnnnnnnnnnnnnnnnnnnnnnnnnnnnnnnnnnnnnnnnnnnnnnnnnnnnnnnaggtaggaggaaggatactcaagatgaggtcaataaaccctggttngaaagaagattccattctcaaagcattcgggggagagagtgagattggaacacgcgtaagtgtgaatatcgatacaaagtgacctcaaccgaccatcagtcaggactgtcgcctcactcagaggctggtggcatgaccattctggaacctgaagattataagtatggcccgcaagtaagaagaggagatgaatggactacagttaagcctgtcccaaacgctaaaagcatcaacattgggggccaaattcaggtggtgagcaatgtaatatacaagagtgtagaccgcagggtgattgtgacatcaaacaaagatcgagtgtctttggattgataatacaacaagaggagtgagggaatcataggagctgacaaggagatcgtgacagaggagaagccaggcaagtacccccccctgtcctctctccaccaccaccaactaactcatcatcaccgccaccaccaccaccccctgtcctctctccaccaccacctcctcgttgtcccgatctaagtgtttgcatcaatatttttccaaggccacctatcgatacc

SEQ ID NO: 4906 - DNA, 1517 bp, Glycine max
  misc_feature (6)..(6): n is a, c, g, or t
  misc_feature (54)..(54): n is a, c, g, or t
  misc_feature (628)..(628): n is a, c, g, or t
  misc_feature (732)..(732): n is a, c, g, or t
  misc_feature (1444)..(1444): n is a, c, g, or t
  misc_feature (1467)..(1467): n is a, c, g, or t
  Peptide Sequence Number=SeqID_7179
  Probeset Number=SeqID_14685
tttagntcgcatagcgctcggaactgcgtggagttaggcatactacattgtcgngctcgcctgtcgcgtatatgcatactcagcatctcgctatgagtgtccggttcacatagtaagtagtggcgatgttagcttcgcgcattctgtgatgtcgtcaagtgttgttccgcatcgtagtgttctaaccgctacatcttcttcgtgctcgcgcgtgatgctctcgtatcgcggtcgtctagtgtgcgggatgagctactcgtaagtgatgcatccgctatgtgcctcagtcttcgcgcactacttcgaccttcttgttatacattctccgcatagatatttgtcagtctcgccatagtatcgtgtacttagcgggtttcttctatctcgcgcgccgccatttgtcgtgctacgttggatagtgctgcctgtattaatacataacagtcagcggctcatggtgcataattgttatcaacatgccgcgctcgcgtcatgctgcggttgtctcgatgagacagcccctaagatttgcttctgtatctggagcgttcaatgctacgctagtgaggtgaggtacgcagttcgctctgctcgcctggctgatggttcttgtattatgcttcgcgtntttgctccaagctcagtcagattgcttcgttgcggtgggcagtgcgttactgcatatgtgcggattatatctgagtgagtcctgtgcactgtagtgatctgatngctcgatgtcattatcatgtgtcgcgtctcccgattgttcttaatgtgtgtaaatggggttactacgtgtatgcgctctggaacggcggcgcctccgtgctccatattagacggttgttgctgtctgctgcgtatgttttgtggatcgtcacttcggtgcgcgctgccttttcgtccttcattattttatcgcgtgtctgctagatgtattctctggtgtactgctagaatcgctgttatttatttttgagctcgttggtactcttgtgcgtccggtttgtcttgcgcatttgttacttcgtatcgcagccttttcttcctctgccgttacgttttcatataattgtttctgcctatgttcgctgttagagttatgctctcttctgcttttatcataccaggatcgcgcccacgtgccgctccccctctgtctctactgtgatcggtcgctctgctcatgtttctttgtgtatcatcttcgtctgcatttggacgtgcgttagtaggtaatagtaaaaatacaccacttgtggtcctaattctcgcgtctcactatcccttttccacttgtctgcgtcttccttttattttcacattgtcggcacaatatttatatctctcgtcaccccttctcatctcttttttggggaactaacatctcgcttcttcccttttccgcccccacgcatctcgttgactcttgtgagggtgnattatttgtgtaggggctgtccnctctcgcccatctcatattagctacgacgaagacggtgtgaggctcggag
